United States Patent Application Publication US 2018/0126003 A1 - sequence listing, part 54

SEQ ID NO: 94500 - DNA, 2859 bp, Artificial Sequence
  derived and/or modified sequence
atgaacctgtgtggcctgatgcccatcttccctgcccccctggaccaggtggccgacatggaggagctgaccatctgggagcagcacacagccaccctgagcaaggacccccggcggggctttggaattgccatcagcggcggccgggacaggcctgggggctccatggtggtgtctgatgtggtgcctgggggccctgctgagggccgcctgcagacaggagaccacatcgtgatggtgaatggagtgtccatggagaatgccaccagcgcctttgccatccagatcctgaagacctgcaccaagatggccaacatcaccgtgaagaggccccggcgcatccacctgcctgccaccaaggccagccccagcagccctggccggcaggacagtgatgaagatgatggcccccagagggtggaggaggtggaccagggccggggctatgatggagacagcagcagcggcagcggccgctcctgggatgagaggagccggcggccccggcccggccggcggggccgggccggcagccatggaagaagaagccctgggggcggcagcgaggccaacggcctggccctggtgtctggcttcaagaggctgccccggcaggatgtgcagatgaagcctgtgaagtctgtgctggtgaagagaagagacagcgaggagtttggagtgaagctgggcagccagatcttcatcaagcacatcacagattctggcctggccgcccggcaccggggcctgcaggagggggacctgatcctgcagatcaacggggtgagcagccagaacctgagcctgaatgacaccaggaggctcatcgagaagtctgagggcaagctgagcctgctggtgctgcgggaccggggccagttcctggtgaacatccccccagctgtgtctgacagcgacagcagccccctggaggagggcgtgaccatggctgatgagatgagcagccccccagctgacatcagtgacctggccagcgagctgagccaggccccacccagccacatccccccaccacccaggcatgcccagaggagccctgaggccagccagacagacagccctgtggagagcccccggctgcggcgggagagctctgtggacagcaggaccatcagcgagccagatgagcagaggtctgagctgccccgggagagcagctatgacatctacagagtgcccagcagccagagcatggaggaccggggctacagcccagacaccagggtggtgcgcttcctgaagggcaagagcatcggcctgcggctggccggcggcaatgatgtgggcatctttgtgtctggagtgcaggccggcagccctgcagatggccagggcatccaggagggggaccagatcctgcaggtgaatgatgtgcccttccagaacctgacccgggaggaggccgtgcagttcctgctgggcctgcccccaggagaggagatggagctggtgacccagaggaagcaggacatcttctggaagatggtgcagagccgggtgggggacagcttctacatccgcacccactttgagctggagcccagccccccatctggcctgggcttcaccagaggagatgtgttccacgtgctggacaccctgcaccctggccctggccagagccacgcccggggcggccactggctggccgtgaggatgggccgggacctgcgggagcaggagcggggcatcatccccaaccagagcagagctgagcagctggccagcctggaggccgcccagagagctgtgggcgtgggccctggcagcagcgctggcagcaatgcccgggcagagttctggaggctgcggggcctgcggcggggggccaagaagaccacccagaggagccgggaggacctgagcgccctgacccggcagggccgctacccaccctatgaaagagtggtgctgcgggaggccagcttcaagaggcctgtggtgatcctgggccctgtggccgacatcgccatgcagaagctgacagctgagatgccagaccagtttgaaattgctgagaccgtgtccaggacagacagccccagcaagatcatcaagctggacacagtgcgggtgattgctgagaaggacaagcacgccctgctggatgtgacccccagcgccatcgagcggctgaactacgtgcagtactaccccatcgtggtgttcttcatccctgagagcaggcctgccctgaaggccctgcggcagtggctggccccagccagcagaagaagcacccggcggctgtatgcccaggcccagaagctgaggaagcacagcagccacctgttcaccgccaccatccccctgaatggcaccagtgacacctggtaccaggagctgaaggccatcatccgggagcagcagacccggcccatctggacagctgaggaccagctggatggcagcctggaggacaacctggacctgccccaccacggcctggccgacagcagcgctgacctgagctgtgacagccgggtgaacagcgactatgaaacagatggagagggcggggcctacacagatggagagggctacacagatggagagggcggcccctacacagatgtggatgatgagcccccagccccagccctggcccggagcagcgagcctgtgcaggctgatgagagccagagcccccgggaccggggccgcatcagcgcccaccagggcgcccaggtggacagccgccacccccagggccagtggaggcaggacagcatgaggacctatgagcgggaggccctgaagaagaagttcatgagggtgcatgatgctgagagcagtgatgaagatggctatgactggggccctgccacagacctgtag

SEQ ID NO: 94501 - DNA, 2802 bp, Artificial Sequence
  derived and/or modified sequence
atggaggagctgaccatctgggagcagcacacagccaccctgagcaaggacccccggcggggcttcggcatcgccatcagcggcggccgggacaggcctgggggctccatggtggtgtctgatgtggtgcctgggggccctgctgagggccgcctgcagacaggagaccacatcgtgatggtgaatggagtgtccatggagaatgccaccagcgcctttgccatccagatcctgaagacctgcaccaagatggccaacatcaccgtgaagaggccccggcgcatccacctgcctgccaccaaggccagccccagcagccctggccggcaggacagtgatgaagatgatggcccccagagggtggaggaggtggaccagggccggggctatgatggagacagcagcagcggcagcggccgctcctgggatgagaggagcagaagacccaggcctggaagaagaggccgggccggcagccacggccgccgcagccctgggggcggcagcgaggccaacggcctggccctggtgtctggcttcaagaggctgccccggcaggatgtgcagatgaagcctgtgaagtctgtgctggtgaagaggcgggacagcgaggagtttggagtgaagctgggcagccagatcttcatcaagcacatcacagacagcggcctggccgcccggcaccggggcctgcaggagggggacctgatcctgcagatcaatggagtgagcagccagaacctgagcctgaatgacacccggcggctgattgagaagtctgagggcaagctgagcctgctggtgctgcgggaccggggccagttcctggtgaacatccccccagctgtgtctgacagcgacagcagccccctggaggagggcgtgaccatggctgatgagatgagcagccccccagctgacatcagtgacctggccagcgagctgagccaggccccacccagccacatccccccaccacccaggcatgcccagaggagccctgaggccagccagacagacagccctgtggagagcccccggctgcggcgggagagctctgtggacagcaggaccatcagcgagccagatgagcagaggtctgagctgccccgggagagcagctatgacatctacagagtgcccagcagccagagcatggaggaccggggctacagcccagacaccagggtggtgcgcttcctgaagggcaagagcatcggcctgcggctggccggcggcaatgatgtgggcatctttgtgtctggagtgcaggccggcagccctgcagatggccagggcatccaggagggggaccagatcctgcaggtgaatgatgtgcccttccagaacctgacccgggaggaggccgtgcagttcctgctgggcctgcccccaggagaggagatggagctggtgacccagaggaagcaggacatcttctggaagatggtgcagagccgggtgggggacagcttctacatccgcacccactttgagctggagcccagcccccccagcggcctgggcttcaccagaggagatgtgttccacgtgctggacaccctgcaccctggccctggccagagccacgcccggggcggccactggctggccgtgaggatgggccgggacctgcgggagcaggagcggggcatcatccccaaccagagcagagctgagcagctggccagcctggaggccgcccagagagctgtgggcgtgggccctggcagcagcgctggcagcaatgcccgggcagagttctggaggctgcggggcctgcggcggggggccaagaagaccacccagaggagccgggaggacctgagcgccctgacccggcagggccgctacccaccctatgagcgggtggtgctgcgggaggccagcttcaagaggcctgtggtgatcctgggccctgtggccgacatcgccatgcagaagctgacagctgagatgccagaccagtttgaaattgctgagaccgtgtccaggacagacagccccagcaagatcatcaagctggacacagtgcgggtgattgctgagaaggacaagcacgccctgctggatgtgaccccatctgccatcgagcggctgaactacgtgcagtactaccccatcgtggtgttcttcatccctgagagcaggcctgccctgaaggccctgcggcagtggctggccccagccagccgccgcagcacccggcggctgtatgcccaggcccagaagctgaggaagcacagcagccacctgttcaccgccaccatccccctgaatggcaccagtgacacctggtaccaggagctgaaggccatcatccgggagcagcagacccggcccatctggacagctgaggaccagctggatggcagcctggaggacaacctggacctgccccaccacggcctggccgacagcagcgctgacctgagctgtgacagccgggtgaacagcgactatgaaacagatggagagggcggggcctacacagatggagagggctacacagatggagagggcggcccctacacagatgtggatgatgagcccccagccccagccctggcccggagcagcgagcctgtgcaggctgatgagagccagagcccccgggaccggggccgcatcagcgcccaccagggcgcccaggtggacagccgccacccccagggccagtggaggcaggacagcatgaggacctatgaaagagaggccctgaagaagaagttcatgagggtgcatgatgctgagagcagtgatgaagatggctatgactggggccctgccacagacctgtag

SEQ ID NO: 94502 - DNA, 2652 bp, Artificial Sequence
  derived and/or modified sequence
atggtggtgtctgatgtggtgcctgggggccctgctgagggccgcctgcagacaggagaccacatcgtgatggtgaatggagtgtccatggagaatgccaccagcgcctttgccatccagatcctgaagacctgcaccaagatggccaacatcaccgtgaagaggccccggcgcatccacctgcctgccaccaaggccagccccagcagccctggccggcaggacagtgatgaagatgatggcccccagagggtggaggaggtggaccagggccggggctatgatggagacagcagcagcggcagcggccgctcctgggatgagaggagcagaagacccaggcctggaagaagaggccgggccggcagccacggccgccgcagccctgggggcggcagcgaggccaacggcctggccctggtgtctggcttcaagaggctgccccggcaggatgtgcagatgaagcctgtgaagtctgtgctggtgaagaggcgggacagcgaggagtttggagtgaagctgggcagccagatcttcatcaagcacatcacagacagcggcctggccgcccggcaccggggcctgcaggagggggacctgatcctgcagatcaatggagtgagcagccagaacctgagcctgaatgacacccggcggctgattgagaagtctgagggcaagctgagcctgctggtgctgcgggaccggggccagttcctggtgaacatccccccagctgtgtctgacagcgacagcagccccctggaggacatcagtgacctggccagcgagctgagccaggccccacccagccacatccccccaccacccaggcatgcccagaggagccctgaggccagccagacagacagccctgtggagagcccccggctgcggcgggagagctctgtggacagcaggaccatcagcgagccagatgagcagaggtctgagctgccccgggagagcagctatgacatctacagagtgcccagcagccagagcatggaggaccggggctacagcccagacaccagggtggtgcgcttcctgaagggcaagagcatcggcctgcggctggccggcggcaatgatgtgggcatctttgtgtctggagtgcaggccggcagccctgcagatggccagggcatccaggagggggaccagatcctgcaggtgaatgatgtgcccttccagaacctgacccgggaggaggccgtgcagttcctgctgggcctgcccccaggagaggagatggagctggtgacccagaggaagcaggacatcttctggaagatggtgcagagccgggtgggggacagcttctacatccgcacccactttgagctggagcccagcccccccagcggcctgggcttcaccagaggagatgtgttccacgtgctggacaccctgcaccctggccctggccagagccacgcccggggcggccactggctggccgtgaggatgggccgggacctgcgggagcaggagcggggcatcatccccaaccagagcagagctgagcagctggccagcctggaggccgcccagagagctgtgggcgtgggccctggcagcagcgctggcagcaatgcccgggcagagttctggaggctgcggggcctgcggcggggggccaagaagaccacccagaggagccgggaggacctgagcgccctgacccggcagggccgctacccaccctatgagcgggtggtgctgcgggaggccagcttcaagaggcctgtggtgatcctgggccctgtggccgacatcgccatgcagaagctgacagctgagatgccagaccagtttgaaattgctgagaccgtgtccaggacagacagccccagcaagatcatcaagctggacacagtgcgggtgattgctgagaaggacaagcacgccctgctggatgtgaccccatctgccatcgagcggctgaactacgtgcagtactaccccatcgtggtgttcttcatccctgagagcaggcctgccctgaaggccctgcggcagtggctggccccagccagccgccgcagcacccggcggctgtatgcccaggcccagaagctgaggaagcacagcagccacctgttcaccgccaccatccccctgaatggcaccagtgacacctggtaccaggagctgaaggccatcatccgggagcagcagacccggcccatctggacagctgaggaccagctggatggcagcctggaggacaacctggacctgccccaccacggcctggccgacagcagcgctgacctgagctgtgacagccgggtgaacagcgactatgaaacagatggagagggcggggcctacacagatggagagggctacacagatggagagggcggcccctacacagatgtggatgatgagcccccagccccagccctggcccggagcagcgagcctgtgcaggctgatgagagccagagcccccgggaccggggccgcatcagcgcccaccagggcgcccaggtggacagccgccacccccagggccagtggaggcaggacagcatgaggacctatgaaagagaggccctgaagaagaagttcatgagggtgcatgatgctgagagcagtgatgaagatggctatgactggggccctgccacagacctgtag

SEQ ID NO: 94503 - DNA, 2760 bp, Artificial Sequence
  derived and/or modified sequence
atggaggagctgaccatctgggagcagcacacagccaccctgagcaaggacccccggcggggcttcggcatcgccatcagcggcggccgggacaggcctgggggctccatggtggtgtctgatgtggtgcctgggggccctgctgagggccgcctgcagacaggagaccacatcgtgatggtgaatggagtgtccatggagaatgccaccagcgcctttgccatccagatcctgaagacctgcaccaagatggccaacatcaccgtgaagaggccccggcgcatccacctgcctgccaccaaggccagccccagcagccctggccggcaggacagtgatgaagatgatggcccccagagggtggaggaggtggaccagggccggggctatgatggagacagcagcagcggcagcggccgctcctgggatgagaggagcagaagacccaggcctggaagaagaggccgggccggcagccacggccgccgcagccctgggggcggcagcgaggccaacggcctggccctggtgtctggcttcaagaggctgccccggcaggatgtgcagatgaagcctgtgaagtctgtgctggtgaagaggcgggacagcgaggagtttggagtgaagctgggcagccagatcttcatcaagcacatcacagacagcggcctggccgcccggcaccggggcctgcaggagggggacctgatcctgcagatcaatggagtgagcagccagaacctgagcctgaatgacacccggcggctgattgagaagtctgagggcaagctgagcctgctggtgctgcgggaccggggccagttcctggtgaacatccccccagctgtgtctgacagcgacagcagccccctggaggacatcagtgacctggccagcgagctgagccaggccccacccagccacatccccccaccacccaggcatgcccagaggagccctgaggccagccagacagacagccctgtggagagcccccggctgcggcgggagagctctgtggacagcaggaccatcagcgagccagatgagcagaggtctgagctgccccgggagagcagctatgacatctacagagtgcccagcagccagagcatggaggaccggggctacagcccagacaccagggtggtgcgcttcctgaagggcaagagcatcggcctgcggctggccggcggcaatgatgtgggcatctttgtgtctggagtgcaggccggcagccctgcagatggccagggcatccaggagggggaccagatcctgcaggtgaatgatgtgcccttccagaacctgacccgggaggaggccgtgcagttcctgctgggcctgcccccaggagaggagatggagctggtgacccagaggaagcaggacatcttctggaagatggtgcagagccgggtgggggacagcttctacatccgcacccactttgagctggagcccagcccccccagcggcctgggcttcaccagaggagatgtgttccacgtgctggacaccctgcaccctggccctggccagagccacgcccggggcggccactggctggccgtgaggatgggccgggacctgcgggagcaggagcggggcatcatccccaaccagagcagagctgagcagctggccagcctggaggccgcccagagagctgtgggcgtgggccctggcagcagcgctggcagcaatgcccgggcagagttctggaggctgcggggcctgcggcggggggccaagaagaccacccagaggagccgggaggacctgagcgccctgacccggcagggccgctacccaccctatgagcgggtggtgctgcgggaggccagcttcaagaggcctgtggtgatcctgggccctgtggccgacatcgccatgcagaagctgacagctgagatgccagaccagtttgaaattgctgagaccgtgtccaggacagacagccccagcaagatcatcaagctggacacagtgcgggtgattgctgagaaggacaagcacgccctgctggatgtgaccccatctgccatcgagcggctgaactacgtgcagtactaccccatcgtggtgttcttcatccctgagagcaggcctgccctgaaggccctgcggcagtggctggccccagccagccgccgcagcacccggcggctgtatgcccaggcccagaagctgaggaagcacagcagccacctgttcaccgccaccatccccctgaatggcaccagtgacacctggtaccaggagctgaaggccatcatccgggagcagcagacccggcccatctggacagctgaggaccagctggatggcagcctggaggacaacctggacctgccccaccacggcctggccgacagcagcgctgacctgagctgtgacagccgggtgaacagcgactatgaaacagatggagagggcggggcctacacagatggagagggctacacagatggagagggcggcccctacacagatgtggatgatgagcccccagccccagccctggcccggagcagcgagcctgtgcaggctgatgagagccagagcccccgggaccggggccgcatcagcgcccaccagggcgcccaggtggacagccgccacccccagggccagtggaggcaggacagcatgaggacctatgaaagagaggccctgaagaagaagttcatgagggtgcatgatgctgagagcagtgatgaagatggctatgactggggccctgccacagacctgtag

SEQ ID NO: 94504 - DNA, 2787 bp, Artificial Sequence
  derived and/or modified sequence
atggccgtgcggttccaggtggccgacatggaggagctgaccatctgggagcaacacacagctactctttccaaagatcctaggaggggtttcgggattgccatttcgggaggtcgcgatcgccccgggggctctatggtcgtcagcgacgtcgtgccaggggggccagcagagggtcgactgcagacaggcgaccacatcgttatggtgaatggggttagcatggaaaacgctacatccgcctttgccatccaaatcctgaagacatgtaccaagatggcaaatattactgtcaagaggcccaggcgaattcacctccccgccacaaaagcttccccatccagcccggggcggcaagactctgacgaggacgacggcccgcagagagtggaggaggttgaccaaggccggggctacgacggcgattcttcaagtggtagcgggaggtcctgggacgaaaggtcccgacggccacgccctggacggcggggtagagctggaagtcacgggagaagaagccccggaggagggtctgaagccaatggtctggcgctggttagtgggttcaaacgactgcctcgtcaggatgtgcagatgaaacctgtgaagagcgtacttgtgaagaggagagattcagaagagtttggcgtgaagcttggttcccagatctttataaagcatattactgattcagggctagcagcacgacacagagggctgcaggagggcgacctgattcttcagattaacggcgtgagctcacaaaacttgtctctaaacgatactcgccggctgattgagaaaagcgagggcaaactttcgcttctggttctgcgcgacagagggcaattcctcgtcaacatccctcccgctgtgtcagacagtgactcttcacccctcgaggatatttcggatctcgccagcgagctgtcacaagccccacccagccatatacctccacctccacggcacgcacaaaggtcacctgaagcaagccaaaccgacagtcccgtggagtcaccccggctcagaagggaatcatcagtcgactcaaggaccatctctgaacccgacgaacagcgctccgagttgcctagagagtctagctacgatatctacagagttccatccagccagagtatggaggaccgtggttacagcccggataccagggtagttcggttcctgaaagggaagtccattggattacgcctggcagggggcaacgatgtcggaatattcgtgagtggagtgcaggcaggtagtcccgctgatggtcaggggattcaggaaggcgaccagatcctgcaggtcaatgatgtgccttttcaaaacttgacccgcgaagaagccgtgcaatttttgctggggttgccccccggagaagaaatggagttggtgacccagcgcaaacaggatattttctggaaaatggtgcagagtcgggtgggggattccttctacattaggacccacttcgagttagaaccgtcaccaccgtccggtctgggattcactcggggtgacgtttttcacgtactggacacgctccaccctggccccggccagtcacacgccagaggcggacattggttggcggtgaggatggggagagaccttcgagaacaggagcgcggaatcattcctaatcagtcacgcgctgagcaactggcctccctggaagctgcccaacgcgccgtcggggtcgggccagggagtagcgccggctcaaacgcgagagccgaattctggagactccgcggtctgcgaaggggcgccaagaaaacaacccaaaggagccgggaggacctaagtgctctcacaaggcaaggcagatatccgccttatgaaagagttgtgctacgagaagcttcattcaaaagacccgtggtgatcctgggcccggtggctgacatagcaatgcaaaagctgaccgcagagatgcccgatcaatttgagatagctgaaactgtgtctcgaacagactccccctcaaagattattaaattggacacagtacgggtcattgcggagaaggacaagcatgcccttctggatgtgaccccttccgctatcgagcggctgaactatgtgcagtattatccaatcgtggtcttcttcatcccagaaagtcgccctgccctgaaagcgttgcggcaatggcttgcccccgctagtcggcggtccactagacgtctctacgcacaggcacagaaactgcgcaaacattcatcacatctgtttaccgccactattcccctgaacggtacttctgatacctggtaccaggagctgaaggccattattagagagcagcagacacgtccaatctggacagccgaagaccagttggacgggtcgctggaagacaacctggatctgcctcaccacgggctagctgatagcagcgccgacctctcctgcgatagccgggttaactccgactatgaaactgacggtgagggtggtgcctacactgacggggagggatacacggacggggaaggcggtccttatacggacgtggacgatgagcctcctgctccagctctggctcggtcatccgagcctgtccaggcagacgagagccagagcccccgcgaccggggtaggattagtgcccaccaaggggcacaggtagactcgcgacatccccaggggcagtggagacaggattccatgagaacatatgaacgggaagcattgaagaagaagttcatgagagtgcacgatgccgaatcttctgacgaggacggatacgattgggggccagccacagatttatag

SEQ ID NO: 94505 - DNA, 2859 bp, Artificial Sequence
  derived and/or modified sequence
atgaacctgtgcggcctgatgcccatcttccccgcccccctggaccaggtcgccgacatggaagagttgacaatatgggaacagcacaccgcaaccctctccaaggacccccgccgagggtttggtatcgcgatatctggtggccgcgacaggccaggaggctctatggtcgtgtcagacgttgtgcccggaggccccgcggaaggtagactgcagactggggatcacattgtgatggttaacggagtgtcgatggagaacgcgacaagtgcatttgccattcagatcttgaagacttgcaccaagatggccaatatcacagtgaaaaggccccgccggatacatctccccgccactaaggcttcgccatcaagtccagggaggcaggactctgatgaggatgacggtccgcagagggttgaggaagtagaccagggccgcggatacgatggagattccagctctggaagcggtaggagctgggacgaaagaagccggcgcccaagacctggccgcagaggaagggccggatcacatgggaggcgatctcctggaggcgggtccgaggctaatggactggctttagtcagcggctttaagcgcctgcctcgccaggatgtgcagatgaagcccgtgaagtccgtgctggtgaagcggcgagactcagaggaatttggtgtgaagctgggatcccaaatttttattaaacatatcactgacagcggcctggctgcgcggcatcgggggttgcaggagggagatctgattctgcaaattaatggagtatctagccagaacttatcacttaatgatactaggagactcatagagaagtctgaaggcaaactgtctttgctggttctgcgagaccgaggacagtttcttgtgaacatccctcctgcagtgtctgattccgactcctccccactagaggaaggtgtcaccatggcagacgaaatgtccagccctccagccgatattagtgatctcgcttctgaactgtctcaggctccccccagccatataccacctccacctagacacgcacaacgcagcccagaagcctcccagaccgattctcctgtcgagtcacccaggctgcgaagagaatcttcagtggatagcaggaccatttcagagccggatgagcagcggtccgagttacccagagaatcatcgtatgatatttatagagtgccctcttcacagtcaatggaggatcggggatattcccccgacacaagggtcgttaggttcctaaaggggaagtcaatcggcctccgacttgccggaggaaatgacgtgggaattttcgttagtggtgttcaggctgggagccccgctgatggccaggggatccaggaaggcgatcagattctgcaagttaatgacgtgccgtttcagaacttaacacgtgaggaagcggtacaattcttgctggggctgcctccgggagaggagatggaactcgtaacacagagaaagcaggatattttttggaagatggtgcagtccagagtgggcgatagtttctacatccggacccactttgagctggagcccagtccgccatcaggcttgggctttacacgtggagacgttttccacgtgcttgatactttgcatccaggcccaggccaatcacacgcgcgtggaggacactggctggccgtgcgcatgggccgcgacctgcgcgaacaggaaagggggataatcccaaatcagtcaagggcagaacagttagcaagcctggaggcggctcagcgagcagtgggagtgggacccggctcatctgccgggtccaacgcacgagcagagttttggaggctgcgaggacttcgtcgcggggccaagaagaccactcagagatccagagaagacctaagcgccctgacacgacagggccgctatccaccttacgagcgggttgtgctcagggaggcatccttcaagcgacccgtggtaatcctgggcccagtggccgatattgccatgcaaaaactgaccgccgagatgccagaccagtttgagattgcagaaactgtatctcgcaccgactcgcctagtaaaattataaagttggatacggttagagtcatcgccgagaaggataaacatgcgttgctcgacgtgaccccgtcagcgatagagcggctaaactacgtgcagtactaccctatagtggtgttttttatccctgagtctcgcccggctctcaaagcactccgtcagtggttggctcccgccagccgccggtccacgcgccgactttatgctcaggctcagaaactgcgcaaacacagtagccacttatttacagctactataccactgaacggtacgtctgacacgtggtaccaggaacttaaggcaattattagggagcaacaaacccgtcctatctggacagccgaggatcagctcgacggaagcctcgaggacaacctggacctgcctcatcatgggctggccgacagctctgctgacctttcctgtgacagccgcgtgaattctgattacgagactgacggggagggcggcgcctacacggacggcgagggctacacggatggcgagggtgggccctacacagatgtagatgatgaaccgcctgcccctgccctagccagaagcagcgagccagtgcaggcggacgaatcccaatcaccacgagaccggggcagaattagcgcgcatcagggtgcccaagtggactctcgccaccctcaggggcagtggagacaggattctatgagaacttatgaacgcgaagcgctgaagaaaaaatttatgcgggtgcacgacgccgagagctcagatgaagacggatacgactgggggccagcgactgatctgtag

SEQ ID NO: 94506 - DNA, 2802 bp, Artificial Sequence
  derived and/or modified sequence
atggaggagctgaccatctgggagcagcacaccgccaccctgagcaaagatccccgtcggggattcggtattgcgatttccgggggccgggatcggcccggggggagcatggtcgttagcgacgtggtgcccggtggtcccgctgagggcaggctgcagactggggatcatatagtgatggtgaatggggtgtcaatggaaaatgcaacatcagccttcgctattcaaatcctgaagacctgcacaaaaatggccaacattaccgtaaaaaggccgcgccgcatccaccttcctgctaccaaagcctcgccttcatctccagggcggcaggattctgacgaagatgacggcccccaacgggtggaggaggtggaccaaggccgcggttatgacggggactcctctagcggcagcggtcggtcctgggatgaaagaagtagaagacctaggccgggacgtagaggcagagccggcagtcacggtcggagatccccaggtggaggtagtgaggcgaatgggctggctctggtaagcggattcaagaggttgcccagacaggatgtgcagatgaagcccgtgaagagcgtgctcgtgaagcggcgggactccgaggaattcggggtcaagctgggctcccagatcttcataaagcatatcaccgacagcggtctcgccgctcgacacagaggactccaggaaggcgatctgatactgcagataaatggcgtcagcagccagaacctcagtcttaacgacacacgaaggttaattgaaaagtcggaaggaaagttgagcctactggtcctaagggacaggggacagttcctggtcaatataccaccagccgtgtccgatagtgattcctcccctctcgaagaaggcgtcaccatggccgatgaaatgtcgtcgcccccagctgacatatccgacttggcttccgagttaagtcaggcgcccccctctcatatccccccccctccgcggcatgcccagcgtagcccagaggcatcccagaccgattcccccgtggagagcccgcgtctgcgccgcgaaagcagcgtggattcccggacgattagcgagcctgacgaacagaggagcgagctgcctcgcgagagctcttacgatatctatagggtgccatcctctcagtctatggaggaccgtggatatagtcccgacactagagttgtgcgtttcctaaagggaaagtcaattggccttcgactggctgggggaaatgacgtcgggatttttgtgtctggagtgcaagctggctcgccagctgacggccagggaatacaagaaggcgaccagatcctccaggttaatgatgtgcccttccaaaacctcacgagagaagaggcggtgcagttcctgctgggtcttccgcctggcgaagagatggagctggtgacccagaggaagcaggatatcttttggaaaatggtgcagtcccgcgtcggagactctttctacataagaactcatttcgagctggaaccttcccctcctagtggcctcgggtttaccaggggagatgtgttccacgtccttgacactctgcatcctggaccaggccagagtcatgccagaggtgggcattggctggcagtcagaatgggacgggacctgcgcgagcaggagcgtggtatcattccaaaccagtcccgggccgagcaacttgcatcactggaggccgctcagcgtgcagtcggagtagggcctggttcttcagccggtagcaacgcaagagcagaattctggaggctgagaggtctgagaagaggcgccaaaaagaccactcagcgcagcagggaagacctcagcgcactgaccaggcagggacgatatccgccatatgagcgagtagtgctcagagaggccagtttcaaacgcccagtggtgattctcggccccgtggccgacattgccatgcaaaagctcactgcggaaatgccagatcagttcgagatcgccgaaacagtctccaggacagactcaccctcaaaaattattaaattggatactgtcagggttatcgctgaaaaagacaaacatgcactcctcgacgtaacaccctccgccatcgagaggttgaactatgtgcagtattacccaattgtcgtgttctttatcccggagtcacgtcctgctctaaaagccttgagacagtggttggctccagcgtcgcgcagatccacccgacgattgtatgctcaggctcagaaactacgtaagcatagcagtcatctttttaccgctacgatcccactgaatggcacctctgatacgtggtaccaggaattgaaagcaattattcgcgaacaacagaccagaccaatttggactgctgaagaccagctcgatgggagcctggaagacaacctggatttgccacatcacggtctggcagattcttcagcagacctctcttgtgatagcagagttaatagtgattatgagacagatggcgaagggggcgcctatacagacggagaaggttatacagacggggagggcgggccctataccgatgtcgacgacgagccacccgctcccgcattggccagatcatccgaacctgtgcaagccgatgagagccaaagcccaagggataggggccgaatctccgctcatcagggagcccaggttgacagcagacatccacaggggcagtggagacaggatagcatgaggacgtatgaacgcgaggcgctgaagaaaaaatttatgagggtacatgacgccgagtcatctgatgaggatgggtatgactggggccccgccaccgacctgtag

SEQ ID NO: 94507 - DNA, 2652 bp, Artificial Sequence
  derived and/or modified sequence
atggtggtgagcgacgtggtgcccggcggccccgccgagggccggctgcagactggtgaccatattgtcatggttaatggggtttcaatggagaacgccacaagtgcttttgcaatccagatcctaaagacctgtacaaagatggccaacataacagtcaaacggccgcggcgcatccatctacctgcaaccaaagcaagcccaagctcccccggccgacaagatagtgacgaagatgacggtccacagcgcgtcgaagaagtcgaccagggtcgtggctatgatggcgatagttcttcaggtagcggaagaagctgggacgaaaggagtcgccgaccacggcccggcagaaggggtagggcaggaagccacggcaggcggagtccaggcgggggaagtgaggccaacgggctggcactagttagcggctttaagcgtttacctagacaagacgtgcagatgaagccagtgaagtccgtgctcgttaagagacgggactcagaagagtttggagtgaaacttgggagccaaatatttattaagcatatcactgattccggtttagccgccaggcataggggcctccaggagggggacctcattcttcagatcaacggggtgtcttctcagaacttatccctgaatgacaccagacgcttgatcgagaaatcagagggcaaactcagcctcctcgtgctaagggaccgcgggcagttcctcgtgaacatacctccagccgtttctgacagtgactcaagcccgctggaggacattagcgacctggctagtgagctttctcaggcccctcccagtcatattcccccaccccctcggcatgctcagcgctcacctgaggccagccagacagattcccctgttgaatctccccggctgcgaagggagtccagcgttgatagtaggacgatcagcgaaccagatgagcagcgctccgaactgccaagagagtcctcatacgacatctaccgcgttccctcctctcagtcaatggaagaccgcggttatagtcccgacacccgcgtagtccgatttcttaaggggaaatcaattggtctcagattggctgggggtaatgacgtcggaattttcgtgtccggcgtgcaggccgggtcacccgcggacggacaggggatccaggagggcgaccaaatcctccaggttaatgacgtcccttttcagaacttgaccagagaggaggcggtgcaatttctgctgggtctcccaccaggcgaagagatggagcttgtcacacagcgcaagcaagacatcttctggaagatggttcaatccagagttggagactctttttacattaggacccactttgagcttgaaccttcccctccgagtggcctgggctttacccgcggcgacgtctttcacgtactggacacgctgcaccccggccccggacaaagccacgcacgtggaggccactggttggcggtccgtatgggacgcgatctgagggagcaagaacgggggataatccctaaccagtctagggcagaacagctggcttccctcgaagcagcgcagagggctgttggtgtagggcctggtagttccgctgggtcgaacgcacgcgctgagttctggagacttcggggcttgcggcggggcgccaagaagacaacacaaaggtcaagagaagatctgtcagcattaactaggcagggacgatatcccccctatgagagagttgtcctgagggaagcttccttcaaacggcccgtggtaattcttggcccagttgcagatattgcaatgcagaagctgacagctgagatgcctgatcagttcgagatcgcagagaccgtcagccggaccgattccccttccaaaatcattaagctggacactgtgcgcgtgattgcggaaaaagacaagcatgccctgctagatgtgaccccctcagcgatagaaagactgaactacgtacaatattatcccattgtagtattcttcattccagaaagccgtcccgccctgaaggccctgcggcagtggttggctccagcaagcaggcggagtacaaggcgcctgtacgcccaggcccaaaaactccgcaagcattcatcccacctgtttaccgctacgatccccctgaacggaactagtgatacgtggtaccaggagctcaaagcaatcatccgcgagcagcaaacccgtccgatttggacagccgaggaccagctggacggttctctagaagacaatttagacctaccgcatcacgggctggccgacagctcggctgacctttcctgcgacagcagggtgaattctgactacgaaactgacggggagggcggcgcatacaccgacggcgaagggtataccgatggggagggaggtccctatacagatgtggacgacgagcccccggcaccggcactggcaagatcttccgagccggtgcaggcagacgaaagccagtcacctcgcgaccgcggcaggatctccgcccaccagggcgcccaggttgattcccggcacccgcaggggcaatggcgacaggattccatgaggacctacgaaagggaggctctaaagaagaagtttatgagagtgcacgacgccgagtcttccgatgaggatggctacgattggggccctgccaccgacctgtag

SEQ ID NO: 94508 - DNA, 2760 bp, Artificial Sequence
  derived and/or modified sequence
atggaggagctgaccatctgggagcagcacaccgccaccctgagcaaggatccaagacgaggttttggcatcgccatcagtggaggacgggatcggccagggggatccatggtggtgagcgatgtagttcccggcgggcctgctgaagggagacttcaaaccggcgaccatatcgtcatggtaaacggagtgagcatggagaacgctacgagcgcctttgctatccagatcctgaagacatgcaccaagatggccaacatcacagtgaagagacccaggaggatccatttaccagcgacaaaggcaagtccttctagtccaggtagacaggacagcgatgaggatgacgggccacagagggtggaagaagtggaccaggggagaggctacgatggggacagttccagtggctctgggcgaagttgggatgaaagatccagaaggcctcgaccaggacgtcggggccgcgctgggagtcacgggaggcggagccccggggggggcagtgaggctaacgggctagccctggtgtcgggctttaaaaggctaccccggcaggatgtccaaatgaaaccagtcaagagcgtccttgttaagagaagagactctgaagagtttggcgtaaagctgggttcccagattttcataaagcacatcacggactccgggttggccgcccgtcatagaggactgcaagagggagatctgatcttacaaatcaacggcgtgtctagccagaatttgtcactgaatgatacacggcggctgattgagaagtccgagggcaagttgtctctgctggttctaagagaccggggtcagtttctggtgaatattccaccagcggtttctgattccgactccagccccctggaggatatcagtgacttggcctcggagttatcccaagctccaccttcgcacatacctcctcctccacggcacgctcagcgctcccccgaggctagccagaccgacagcccagtggaaagccctcggctgcggagagaatcttccgtggactcccgcactattagcgaacctgacgagcagcgctccgagctacctcgggagtccagttatgatatctatcgggttcctagcagtcaaagtatggaagacagaggatactcgcctgacacaagagtggtgcgctttctgaagggcaaatccatcggacttaggctggccggtgggaacgacgtgggcatattcgtgtcaggcgtacaagcgggaagtcccgctgacggccaaggcattcaggagggagatcagattcttcaagtcaacgacgtgccttttcaaaatctcacacgggaggaggcagtccagtttctactgggactgcctcctggcgaagagatggagctggtgacccagagaaaacaggatatattctggaagatggtgcagagccgggtcggagactcgttctacattagaacccacttcgagttagagccatcccctccttccggtttaggtttcaccagaggggacgtctttcatgtattagatacgctccaccctggaccaggccaatcgcatgcccgaggcgggcactggctggccgtaaggatgggccgggacttacgagaacaagaacggggaatcattccgaaccagtcccgagctgaacagcttgctagccttgaggcagcccagagggccgtaggtgtgggccctggcagtagtgcgggatcgaatgcccgggctgagttctggagactgcgcggtctccgaaggggcgctaaaaaaaccacacagagaagccgggaggacctcagtgcactcaccagacagggtcgttaccccccttatgagagggttgtgctgagagaggcgtctttcaagagaccggtcgtcatactcgggcctgtcgccgacatcgcaatgcagaagttaaccgcggagatgcctgatcagtttgaaattgccgagaccgtaagcagaacagacagcccatctaaaattataaagctggacaccgtgcgcgtgattgccgagaaagataaacacgctttgctggacgtcaccccatccgccattgagcggctgaactacgtacagtattaccccattgttgtgtttttcattcctgagtcgcgcccagcactgaaagcactccggcagtggctggctcctgcatccagaagaagcactcgacgactgtacgcccaagctcagaagcttcgcaagcacagttctcatctctttaccgctacaatccctcttaatggtacatctgatacttggtaccaggaactcaaagccatcatcagagagcagcagactagacccatctggactgcagaggaccaactggatggcagcctggaagataacttggacctgccacaccacggtctggcggatagtagtgccgatcttagttgtgattctcgggtgaatagcgattacgaaaccgacggcgaaggaggagcatataccgacggagagggatacaccgatggcgaaggcggaccttacaccgacgtggatgacgagccccctgcacccgctcttgcgcgcagcagtgagcctgtgcaggctgacgaaagtcaatcgccccgtgatcggggccgtatatctgcccatcagggggctcaggttgactcacgacacccacaaggccaatggcggcaggacagcatgcgaacgtacgaaagggaggccttgaaaaagaagttcatgcgcgtccacgacgccgagagttccgatgaggacggttatgactggggacctgccacagacttgtag

SEQ ID NO: 94509 - DNA, 2787 bp, Artificial Sequence
  derived and/or modified sequence
atggccgtgagattccaggtggccgacatggaagagttgaccatttgggaacagcacacggctactctcagcaaggatcctaggcggggatttggaatagccatcagcggcggaagagacagacctggaggaagtatggtggtcagcgatgtcgtgccaggagggcctgctgagggcaggctacagaccggcgatcacatagtgatggttaatggagtttcaatggaaaacgccaccagcgcttttgcgattcaaatcctgaagacgtgtactaagatggctaatatcactgttaaaagaccacggcgaattcatcttccggcaaccaaggctagtcccagcagccccggtcgacaggacagcgacgaggatgacggccctcagagggtcgaggaagttgatcaggggagagggtatgatggcgattcttctagcgggtctggaaggtcctgggatgagcggagcagaaggccaaggcctgggagaaggggccgagcagggtcccacggaaggaggagccccggaggtggatccgaggctaacggactggctctggtcagtggtttcaagcgccttcccagacaggatgtgcaaatgaagccggtgaaatccgtgctggttaaacgccgagattcagaggagtttggcgtaaagctgggaagccagatctttattaagcacattactgacagtggattagccgctaggcatagaggactacaggagggagacttaattctgcagatcaatggtgtctccagccagaatttatcactgaacgatacaaggaggctgatcgaaaaatccgagggcaaactcagcctcctggtgctgcgtgataggggccaatttctggtcaacatccctcccgcagtgagcgacagtgactccagtcccctggaggatatttccgacctcgcatcagagctgagtcaggctcctccctcacacattcctcccccacccaggcatgcacagcgtagtcctgaagccagtcagactgacagccctgtggaaagcccacggctgagaagggaatccagtgtcgacagccggacgattagcgaacctgacgagcagcgaagcgaactgccacgcgagagctcatacgacatctacagggtgcccagcagccaatcaatggaggaccggggttattcccccgacacgcgagtggttagatttctgaaggggaaaagtattgggttgagacttgccggtgggaacgatgtgggaatcttcgtgtctggcgtgcaggcgggaagccccgctgatggtcagggtatccaggaaggtgaccagatattacaggtgaatgacgtgcccttccaaaaccttacccgtgaggaagccgttcagttcctgctagggctgccacccggagaagaaatggaactggtgactcagcgcaaacaggacatcttctggaagatggttcagtctcgtgtgggagattcgttctacatccgcacacatttcgaattagaaccatctccacccagcggacttggattcactcgcggagacgtgtttcatgtgctggacaccttgcacccaggcccaggccaatcacacgctagaggagggcattggctggccgtgagaatggggagggacctgcgggaacaagaacggggtatcatacccaatcagagcagggccgaacagttggcctctctcgaagccgcacaacgcgctgtgggggtgggcccaggatcatcagccggtagtaacgctcgtgctgagttctggagacttcggggactcagacgaggggctaagaaaaccactcagcgctcacgtgaggatctgtccgcacttacacgccaggggcgatatcccccttacgagagagttgtcctgagagaagcatccttcaagcgcccagttgtgattctcggtcctgtagctgacattgcgatgcagaagctgaccgccgaaatgccagatcagttcgagatcgctgaaaccgtatcacgaactgacagcccatctaagatcatcaagttggatacagtgagggtcattgccgagaaggataaacacgccttgttggatgtaaccccgtccgccattgagcggctcaactatgtgcagtactatccaatagtcgtgttttttatccccgagagcaggcctgccctcaaggcacttcggcaatggctagctccggcttcgcggcgatctaccaggcgcctgtacgcccaagcacaaaagctgaggaagcattcaagccatctctttacagctactatccctctcaacggaaccagcgacacttggtaccaagaactcaaggccataattagagaacagcaaaccaggccaatctggactgcagaggatcaactggacggttctctcgaggacaacctggatctgcctcaccacggccttgccgatagcagcgccgacttatcatgtgacagcagagtgaacagcgactacgagactgacggcgaggggggtgcatacactgatggtgaggggtataccgacggcgaaggtggtccttacacagacgtggacgatgagccacctgctccagctctggccaggtctagcgagcccgtgcaggccgacgagagccagtcaccgagggatagaggaagaatcagcgcccatcagggcgcacaggtggattcacgacaccctcagggacagtggaggcaggacagcatgcggacgtatgaacgggaagctctgaaaaagaagtttatgagagtgcacgatgccgaatcaagtgatgaagatgggtacgactggggtcctgccaccgatctgtag

SEQ ID NO: 94510 - DNA, 2859 bp, Artificial Sequence
  derived and/or modified sequence
atgaatctgtgcggattgatgccaatatttcctgcacccttagatcaagtggcagatatggaggagttgacaatttgggagcagcatacagccaccttgagtaaggatcccaggcggggattcggcattgcaataagcggtggaagagaccgccctgggggatcaatggtcgtttcggatgtggtgcccggagggcctgcagaagggaggctgcagacaggcgaccacatcgtaatggtaaacggagtctcaatggagaacgcaacaagcgcattcgcaatccagattctgaaaacctgcaccaagatggctaacattactgtgaaaagacctcggagaatacatttacccgctaccaaagccagtccttccagcccaggaaggcaggattccgatgaggatgacggaccccaaagggtcgaggaagtggatcaaggtagaggatacgacggcgactcttcgagtggcagcggcagaagctgggacgagcgctcacgacgtcctcgcccaggacgacgcggtcgagctgggtctcacggcagaagatctcccggaggcggatcagaagccaatggcctggccctggtttctggtttcaagcgactacctcggcaggacgtccaaatgaagcccgtgaagtcagttctcgtgaaaaggcgagattccgaagagttcggcgtcaagttgggttctcagatattcatcaaacacattaccgacagtggtctggcagctagacaccgagggctacaagagggtgacctgattttacagataaacggggtgagctcacagaatctttcactcaacgatacgcggagactaattgagaaatctgagggtaaactctcgctcctagtgttgagggatcggggtcagtttctcgtgaatatcccaccggctgtaagcgactctgactccagtccgcttgaggagggtgtgacaatggccgacgagatgtcatctcctcctgctgatatttccgacttggcctcagagctcagccaagcacccccatcgcatatccctccgccaccacggcacgcccagaggagtcccgaggcgtctcagaccgactctccggttgagtcccccagattgcgcagagagagtagtgtcgactcaaggacgatatccgagccggacgagcagcgaagtgaactgcccagggagtctagctacgacatttacagggtcccctccagtcagagcatggaggacagggggtactctccagacacacgcgtggtgaggttcctcaaggggaagtcgatcggtctgagactcgctggcggaaacgacgtcgggattttcgtgtccggggtgcaggcaggatctccagctgacggacaaggaattcaggaaggggaccaaattctacaagtcaacgatgtgcctttccaaaacctcacccgcgaagaggccgtgcaattcctgttgggtctgcctcccggagaggaaatggaactcgtgactcagaggaaacaggatatcttctggaaaatggtccagtctcgggtgggagactcattctatatcagaacacattttgagctggagccttcacctccttctggcctgggattcacgagaggggatgtctttcacgtccttgacacactgcaccccggaccaggtcagtctcatgctcggggaggccactggttggctgtccgcatggggagggacctgcgggagcaagaacggggaattatccctaaccaatcaagagcggaacagctggccagtttggaggcggcacagcgggctgtcggcgttggccctggttcaagtgccggtagcaatgctcgcgctgagttctggcgtctccgcggactgaggcgcggagccaaaaaaacaacccagcgaagcagggaagatctctctgccctgaccaggcagggacgttaccccccttacgagagggtagtcctacgtgaagccagcttcaaacgtccagtcgtgattctaggtcctgttgccgatatcgccatgcaaaaactgacagcagaaatgcctgatcagttcgagatcgcagagacagtatctcgaaccgactcgccttccaagattatcaaattggacacagttcgggtgattgctgagaaagacaagcacgctctactggacgtgactccaagcgctatcgagaggctcaactacgtgcagtattaccccattgtagtgttcttcatccctgagagcaggccggctctcaaggctttacgccagtggctggcaccggcaagccgccgttcgacaaggcgtctttatgcccaggcccaaaaactccggaagcactccagtcatttgtttaccgccaccatccctttgaacggaacgtctgacacctggtaccaggagctgaaagcgattatccgcgagcagcagacaagaccaatatggacagccgaggaccagttggatggctccttggaggataatctggacctcccacaccacgggctggccgactccagtgctgatcttagttgtgatagccgtgtgaatagcgattatgaaacagatggcgagggaggcgcttataccgacggagaaggatataccgacggtgagggcggaccatacaccgacgtcgacgatgagccacccgcacctgctttagcaaggtcttctgagcctgtgcaggctgacgagagccagagtccgagggaccgcggaagaatctctgcccatcaaggggctcaagtggacagcagacatccccaaggccaatggagacaggactctatgcgtacctacgaacgcgaagccctgaagaagaagttcatgcgtgttcacgatgcggagtcctccgatgaggacggctatgactgggggcctgccactgacctatag

SEQ ID NO: 94511 - DNA, 2802 bp, Artificial Sequence
  derived and/or modified sequence
atggaggagcttaccatctgggagcagcacactgctacactgagtaaggacccacggagaggattcggaatcgccatttcagggggaagagataggcccggtgggtcaatggttgtgtccgatgtcgttcctggtggaccggctgagggccgactgcaaacaggagaccatattgtgatggttaatggcgtgtcgatggagaacgctacctccgcgttcgcaattcagatcctgaaaacttgcacgaagatggcaaatataactgtaaaacggccaagaagaattcaccttcccgctacgaaagccagcccttcatcgccaggacgtcaggattctgacgaggatgacggtccacagcgagttgaagaagtcgaccagggcagggggtacgatggggacagctcctctggtagcggacgctcatgggacgaaaggtccagaaggccgaggccgggaagaagaggcagggccggatcccacggcagacgctcaccaggcggagggtctgaagccaacgggctggctctggtgagcgggtttaagaggttaccaagacaggatgtccagatgaaacctgtgaagagtgtgctggtaaaaaggagggattccgaggagttcggggtgaagctggggagccaaatttttatcaaacacattacagatagtggtctggctgcgaggcaccgagggttacaggagggggacctgattctacagatcaatggcgtctcttcccagaacctgtcattgaatgacacaaggcgccttatcgaaaagtccgaaggaaaactttcactcctcgtgctcagggaccgtggtcagtttctggtgaacattcctccagctgtatctgactcagactctagcccgctggaagaaggcgtcacgatggcagatgagatgtctagccctcctgccgacattagtgatctcgcttctgaattgtcgcaggccccacctagccatatcccccctccaccaaggcatgcgcagcgtagtcccgaggctagtcaaaccgattcgccagtggaatctcctagactgcggcgagaatcgtccgtcgacagccgcaccatcagcgagcccgatgagcaaaggtctgagcttcccagggagtcatcttacgatatctacagggtcccttcctctcaatccatggaagatagaggatactctcctgatactcgcgtcgtcagattcctgaaaggaaagtctatcggattaagacttgctggcggtaatgacgtggggatttttgtcagtggtgtgcaggccggaagtcccgctgacgggcagggcatccaggagggagaccagatcctgcaggtcaacgacgtgcctttccaaaatctgacacgtgaggaagctgtccagtttctgcttggactgccacccggagaggaaatggagctggttacgcagcggaagcaggatattttctggaaaatggtgcaatcccgcgtgggcgactcgttctacataagaacgcacttcgagcttgaaccgtcgccaccgagcggcctgggctttaccagaggtgatgtgttccatgtgctggacacactccacccgggtcctggacagagccatgccaggggtgggcattggcttgccgtgcgaatgggtcgagatctgcgcgaacaagagcgtggtattatacccaaccaatcgcgggcagagcagcttgcatcactggaagccgctcaacgtgcagtaggcgtaggccctggaagttctgccggttccaatgccagagccgagttctggcgacttcgtggcctgcgcaggggcgcaaagaaaactacacagcgatccagagaagatcttagcgcactgactagacagggcagataccccccttacgagcgtgttgtcttacgggaggcgtctttcaaaaggcctgtggtcattttaggacctgtggcggatattgccatgcagaaattaaccgccgaaatgccagaccagttcgagatagcagagacagtgagtcgcactgactctccatcaaagattattaagcttgacacagtgcgagtgattgctgaaaaggataaacacgcgctcctagatgtgacaccaagcgccattgagagactcaactatgtccagtactatccaatcgttgttttcttcatccccgaatccagaccagcactgaaggctctgagacagtggctggcccctgcttcaagacggagcactcgacgcctgtatgcccaggcgcagaagctgcgcaagcactcatcacatttgtttacggcgacgatacccctaaacggcacctccgacacgtggtatcaggaactgaaagccatcatccgggagcagcagacaagacccatttggacggcggaagatcagctcgacggcagtcttgaagataatctggatcttcctcaccacgggctcgccgactcttcagccgacctttcttgcgatagccgcgtgaattcagattatgagaccgacggtgaaggtggggcatacacggatggcgaggggtacacggatggagaaggtgggccatatacggatgttgatgacgaacccccagctcctgctctagccagatcgtccgagccagttcaggctgatgaaagccaatcgcccagagatagaggtaggattagtgctcaccagggggcacaagtagacagtcggcacccccagggacagtggagacaggattcgatgagaacctacgagagagaggccttgaagaagaagtttatgagggtgcacgacgccgagtctagtgatgaggacggatatgactgggggccagcaaccgatctgtag

SEQ ID NO: 94512 - DNA, 2652 bp, Artificial Sequence
  derived and/or modified sequence
atggtggtttctgatgtggtgcctggaggacccgctgaaggacgccttcagacaggagatcacatcgttatggttaatggggtgagcatggagaacgctacctcagcctttgcgatccaaattctcaagacctgtaccaagatggcgaacataactgtgaaacgaccacgacggatacatctccctgccacaaaggctagcccttcttcaccaggccgacaggacagcgatgaggatgacggtcctcagcgcgtggaagaggtggaccaaggacgcggatacgacggtgacagtagctcagggtctgggaggagctgggacgagaggtctcggcgtcctaggccaggcaggaggggtagggccggatctcatggacgcaggtcgccgggtggtggcagcgaagccaacgggctcgctctggtctctgggtttaaaagactgcccaggcaggacgtgcaaatgaagcccgtcaagtccgttctggttaagcgcagagactccgaggagtttggggtcaaactgggatcccagatcttcatcaaacatatcacagactccggtttggccgctcgccaccggggattgcaggagggtgatttgatcctgcagattaatggcgtgtcctcccaaaatctgtctctcaatgatacccggagactcatagagaaatcagaagggaagcttagtctactcgttctaagagataggggccagttcctggtcaacatccctcccgctgtgtctgactccgatagctctcccttagaggatataagtgatctggcctctgagctgtctcaggcccctccctcacatatcccacccccacccagacatgctcaacggtcgccagaggctagtcagacagatagtccagtggaatcccccaggctcagaagggaatcgagtgttgattctcgaactattagtgaacccgatgagcagcgcagtgagttgcccagggagtcctcatatgatatttatagagtcccgagttcccagagtatggaggacaggggttactctcctgataccagagtagtgcgttttctaaaggggaagtcgatcggtctgcgcttggctggaggtaacgacgtgggcattttcgtgtccggggtccaggccggatctcctgctgacggccagggcatccaggaaggagaccagatactgcaggtgaatgatgtgccattccaaaatctgacacgcgaagaggctgttcagttcctgctcggcctgcccccaggagaggaaatggagttggttacccagcgcaaacaggacatcttttggaagatggtccagagccgagtcggggattctttctatattagaacccactttgaattggaaccatccccacccagtggcttaggcttcacaaggggcgacgttttccatgtgctcgacacactgcaccctggcccaggtcaatcacatgcccgtggtggacattggttggctgtgcgaatgggacgcgacctccgagagcaggaacgcggtattattccaaaccagtcccgggctgagcagctggcttcactggaggcagcacagcgcgcagtgggcgttgggcctgggagcagcgcaggcagtaacgccagagcagagttctggcggctccgaggcctgcggaggggggctaagaaaacgactcagaggtctagggaagacttaagtgcactgacaagacaagggcgatatcccccatatgagcgggtggtactgcgggaggcctcattcaagcggccagtcgtgatcctcggacccgtggccgacatcgcgatgcagaaattaaccgccgagatgcccgaccagtttgagatagcggaaaccgtttctcgaacagacagtccatctaagattatcaagctggacaccgtacgtgtgatcgctgagaaggacaagcacgccttgctggacgtgaccccctcggcgatcgagcgactgaactatgtacagtactaccctatcgtggttttcttcattcccgagtccaggcctgctttaaaggctctgcgccagtggcttgccccagcttcccgaagatctacccgcagactgtacgctcaagcgcagaaactgcgcaagcactcaagtcacctttttactgccactataccactcaatgggacttccgatacatggtatcaggagctgaaggcaatcattagagagcagcaaacaaggccgatttggacagcggaagaccaattggatggttcactcgaggacaatttagatctgcctcaccacgggctggccgattccagcgccgacctaagttgtgattcccgcgttaactccgactacgagaccgacggggaagggggtgcttacacggacggggagggctacacggatggcgaggggggaccctacacagacgtagacgatgagcctcctgccccagcactggcaagaagttcagaaccagtgcaggcggatgagtcacagagtccacgggacagaggcagaatttcagcgcaccagggcgcacaagtggattcacggcacccccaggggcaatggcggcaggattctatgaggacctacgagagagaggccctcaaaaaaaaattcatgcgggtgcacgacgccgagagcagcgatgaggatggctacgactggggccctgctactgatctatag

SEQ ID NO: 94513 - DNA, 2760 bp, Artificial Sequence
  derived and/or modified sequence
atggaggaactcacaatctgggagcagcataccgccactctcagcaaagatcctcggagaggatttgggatcgctatcagcgggggacgggacaggccaggcggttcaatggtggtgtccgacgtcgtcccgggaggcccagccgaagggaggctccagacaggtgatcacattgttatggtgaatggagtgtccatggagaacgcaaccagtgcctttgccattcagattttgaagacatgtaccaaaatggccaacattacggtgaagaggcctaggcggatccacctccccgcaaccaaagcatctccctcgagccccggaaggcaggattctgacgaagacgacgggccacaacgagtggaggaagtagaccagggtcgtgggtatgacggagacagttctagcggaagcggcaggtcgtgggatgaaagatcccgacgtccccgaccaggacgcagaggcagagctggatctcatggacgtaggtcgcctggcggtgggagtgaggcgaacggcttggccctggtctcagggtttaaacgactgccaagacaggatgtgcagatgaagccagtgaagtcagtgctcgttaaaagacgcgacagtgaagaatttggcgtgaagctgggaagccagatctttatcaaacacataacagacagcggactcgcggcacggcacagggggttgcaggagggcgatctcatacttcaaatcaatggcgtttcaagtcagaacctgagcctcaacgatacacgacgcctgatcgagaagtccgagggcaaactttctctcctcgttctccgggatcgcggacagtttctggtaaacattcccccagccgtcagcgatagcgactctagccccctcgaggacatcagcgacctggcctctgaattgagtcaagcccctccatcgcacatccccccaccacctcgccacgcccagaggagccccgaggctagccagacagattctcccgttgagtcccctagactgcggagagagtcaagcgtggattcccgaaccatttccgagcccgacgagcaaagaagcgagctcccaagagagagcagttatgacatttatcgagtgccctcctcacagtctatggaagatcggggatattcaccggacacgcgggttgtccgcttcttaaagggcaagtctataggcttgagactggcgggaggtaacgacgtggggatattcgtgtcgggcgtgcaggctgggagcccggcagatgggcaaggaatccaagagggtgaccagatattacaggtgaacgatgtgccatttcagaatttaaccagggaagaggccgtccagtttcttctcgggcttcctcccggagaagagatggaactcgtgacccaacgcaagcaggatattttctggaagatggtccagtccagggtgggcgatagtttttatatccgaacccactttgagcttgaaccatcacctccttcaggcttgggctttacgcggggtgatgtcttccatgtcctagataccctccacccaggccctggtcagtctcacgcgagggggggtcattggctcgccgtgaggatggggcgagatctcagggagcaggagcgagggatcattcccaatcaatcccgagctgagcagttagcgtctctggaagccgcacaacgggctgtaggtgtagggccaggctccagcgccggatcaaatgctagagcagagttttggcgcctgcgagggcttagacgtggggcaaagaaaactacgcaaagatcccgggaagacctgtccgccctcacacgtcaggggcgttaccctccctacgagagggtggtgctgcgggaagcatcattcaagcggcctgtcgtcattctcggtccagttgccgacatcgctatgcaaaaactgactgccgaaatgccggatcagtttgaaatcgctgaaaccgtaagtaggaccgattcaccttctaaaattatcaagctggacacggtccgggtgatcgccgagaaggacaagcacgctctgcttgatgtcacccctagcgctattgaacgtctcaattatgtgcagtattaccccattgtggtcttcttcattcctgaatcaagacccgctcttaaagccctccggcagtggctggcaccggcatcccgcagatctactaggcgcctgtatgcgcaggctcagaagctgcgtaaacatagcagccatctgtttacagctacgattcctctaaatggcacttctgatacttggtaccaagaactgaaagcgatcatacgggagcagcagacacgacccatttggacggcagaagaccaacttgatggttccttggaggacaaccttgacctgccccaccacggcctggctgattcatcagccgacctcagctgcgactccagagtaaattctgattatgaaacagatggtgagggaggggcttataccgacggcgaggggtataccgacggggaaggcggaccttatactgatgtggatgacgagcccccagcacccgcactggcccgatcgagcgagcccgtgcaagctgatgagagccagtcccccagagatcgtgggcgaatctcagcccaccaaggggctcaggttgacagtaggcacccccagggccaatggcgacaggattccatgcggacctacgagagagaggccctaaagaagaaattcatgcgcgtccacgacgctgagagtagtgacgaagacgggtacgattgggggcctgcaacagatctgtag

SEQ ID NO: 94514 - DNA, 3068 bp, Artificial Sequence
  derived and/or modified sequence
agccgggagctgcggagctggagggaggaggacgagagcccggccctcagcccgctgtgactctcctcagccccctcccccagcccggggtgggggccgattgactgtttccaggaccccctcgggtaggggggctggagagcccccaggtggaccatggcggtgagattccaggtggctgacatggaggagctgaccatctgggaacagcacacggccacactgtccaaggacccccgccggggctttggcattgcgatctctggaggccgagaccggcccggtggatccatggttgtatctgacgtggtacctggagggccggcggagggcaggctacagacaggcgaccacatcgtcatggtgaacggggtttccatggagaatgccacctccgcgtttgccattcagatactcaagacctgcaccaagatggccaacatcacagtgaaacgtccccggaggatccacctgcccgccaccaaagccagcccctccagcccagggcgccaggactcggatgaagacgatgggccccagcgggtggaggaggtggaccagggccggggctatgacggcgactcatccagtggctccggccgctcctgggacgagcgctcccgccggccgaggcctggtcgccggggccgggccggcagccatgggcgtaggagcccaggtggtggctctgaggccaacgggctggccctggtgtccggctttaagcggctgccacggcaggacgtgcagatgaagcctgtgaagtcagtgctggtgaagaggagagacagcgaagagtttggcgtcaagctgggcagtcagatcttcatcaagcacattacagattcgggcctggctgcccggcaccgtgggctgcaggaaggagatctcattctacagatcaacggggtgtctagccagaacctgtcactgaacgacacccggcgactgattgagaagtcagaagggaagctaagcctgctggtgctgagagatcgtgggcagttcctggtgaacattccgcctgctgtcagtgacagcgacagctcgccattggaggacatctcggacctcgcctcggagctatcgcaggcaccaccatcccacatcccaccaccaccccggcatgctcagcggagccccgaggccagccagaccgactctcccgtggagagtccccggcttcggcgggaaagttcagtagattccagaaccatctcggaaccagatgagcaacggtcagagttgcccagggaaagcagctatgacatctacagagtgcccagcagtcagagcatggaggatcgtgggtacagccccgacacgcgtgtggtccgcttcctcaagggcaagagcatcgggctgcggctggcagggggcaatgacgtgggcatcttcgtgtccggggtgcaggcgggcagcccggccgacgggcagggcatccaggagggagatcagattctgcaggtgaatgacgtgccattccagaacctgacacgggaggaggcagtgcagttcctgctggggctgccaccaggcgaggagatggagctggtgacgcagaggaagcaggacattttctggaaaatggtgcagtcccgcgtgggtgactccttctacatccgcactcactttgagctggagcccagtccaccgtctggcctgggcttcacccgtggcgacgtcttccacgtgctggacacgctgcaccccggccccgggcagagccacgcacgaggaggccactggctggcggtgcgcatgggtcgtgacctgcgggagcaagagcggggcatcattcccaaccagagcagggcggagcagctggccagcctggaagctgcccagagggccgtgggagtcgggcccggctcctccgcgggctccaatgctcgggccgagttctggcggctgcggggtcttcgtcgaggagccaagaagaccactcagcggagccgtgaggacctctcagctctgacccgacagggccgctacccgccctacgaacgagtggtgttgcgagaagccagtttcaagcgcccggtagtgatcctgggacccgtggccgacattgctatgcagaagttgactgctgagatgcctgaccagtttgaaatcgcagagactgtgtccaggaccgacagcccctccaagatcatcaaactagacaccgtgcgggtgattgcagaaaaagacaagcatgcgctcctggatgtgaccccctccgccatcgagcgcctcaactatgtgcagtactaccccattgtggtcttcttcatccccgagagccggccggccctcaaggcactgcgccagtggctggcgcctgcctcccgccgcagcacccgtcgcctctacgcacaagcccagaagctgcgaaaacacagcagccacctcttcacagccaccatccctctgaatggcacgagtgacacctggtaccaggagctcaaggccatcattcgagagcagcagacgcggcccatctggacggcggaagatcagctggatggctccttggaggacaacctagacctccctcaccacggcctggccgacagctccgctgacctcagctgcgacagccgcgttaacagcgactacgagacggacggcgagggcggcgcgtacacggatggcgagggctacacagacggcgagggggggccctacacggatgtggatgatgagcccccggctccagccctggcccggtcctcggagcccgtgcaggcagatgagtcccagagcccgagggatcgtgggagaatctcggctcatcagggggcccaggtggacagccgccacccccagggacagtggcgacaggacagcatgcgaacctatgaacgggaagccctgaagaaaaagtttatgcgagtacatgatgcggagtcctccgatgaagacggctatgactggggtccggccactgacctgtgacctctcgaaggctgccagctggtccgtcctccttctccctccctggggctgggactcagtttcccatacagaacccacaaccttacctccctccgcctggtctttaataaacagagtattttcac

SEQ ID NO: 94515 - DNA, 2859 bp, Artificial Sequence
  derived and/or modified sequence
atgaacctgtgtggcctcatgcccatcttccccgctcccctcgaccaggtggctgacatggaggagctgaccatctgggaacagcacacggccacactgtccaaggacccccgccggggctttggcattgcgatctctggaggccgagaccggcccggtggatccatggttgtatctgacgtggtacctggagggccggcggagggcaggctacagacaggcgaccacatcgtcatggtgaacggggtttccatggagaatgccacctccgcgtttgccattcagatactcaagacctgcaccaagatggccaacatcacagtgaaacgtccccggaggatccacctgcccgccaccaaagccagcccctccagcccagggcgccaggactcggatgaagacgatgggccccagcgggtggaggaggtggaccagggccggggctatgacggcgactcatccagtggctccggccgctcctgggacgagcgctcccgccggccgaggcctggtcgccggggccgggccggcagccatgggcgtaggagcccaggtggtggctctgaggccaacgggctggccctggtgtccggctttaagcggctgccacggcaggacgtgcagatgaagcctgtgaagtcagtgctggtgaagaggagagacagcgaagagtttggcgtcaagctgggcagtcagatcttcatcaagcacattacagattcgggcctggctgcccggcaccgtgggctgcaggaaggagatctcattctacagatcaacggggtgtctagccagaacctgtcactgaacgacacccggcgactgattgagaagtcagaagggaagctaagcctgctggtgctgagagatcgtgggcagttcctggtgaacattccgcctgctgtcagtgacagcgacagctcgccattggaggaaggcgtgaccatggctgatgagatgtcctctccccctgcagacatctcggacctcgcctcggagctatcgcaggcaccaccatcccacatcccaccaccaccccggcatgctcagcggagccccgaggccagccagaccgactctcccgtggagagtccccggcttcggcgggaaagttcagtagattccagaaccatctcggaaccagatgagcaacggtcagagttgcccagggaaagcagctatgacatctacagagtgcccagcagtcagagcatggaggatcgtgggtacagccccgacacgcgtgtggtccgcttcctcaagggcaagagcatcgggctgcggctggcagggggcaatgacgtgggcatcttcgtgtccggggtgcaggcgggcagcccggccgacgggcagggcatccaggagggagatcagattctgcaggtgaatgacgtgccattccagaacctgacacgggaggaggcagtgcagttcctgctggggctgccaccaggcgaggagatggagctggtgacgcagaggaagcaggacattttctggaaaatggtgcagtcccgcgtgggtgactccttctacatccgcactcactttgagctggagcccagtccaccgtctggcctgggcttcacccgtggcgacgtcttccacgtgctggacacgctgcaccccggccccgggcagagccacgcacgaggaggccactggctggcggtgcgcatgggtcgtgacctgcgggagcaagagcggggcatcattcccaaccagagcagggcggagcagctggccagcctggaagctgcccagagggccgtgggagtcgggcccggctcctccgcgggctccaatgctcgggccgagttctggcggctgcggggtcttcgtcgaggagccaagaagaccactcagcggagccgtgaggacctctcagctctgacccgacagggccgctacccgccctacgaacgagtggtgttgcgagaagccagtttcaagcgcccggtagtgatcctgggacccgtggccgacattgctatgcagaagttgactgctgagatgcctgaccagtttgaaatcgcagagactgtgtccaggaccgacagcccctccaagatcatcaaactagacaccgtgcgggtgattgcagaaaaagacaagcatgcgctcctggatgtgaccccctccgccatcgagcgcctcaactatgtgcagtactaccccattgtggtcttcttcatccccgagagccggccggccctcaaggcactgcgccagtggctggcgcctgcctcccgccgcagcacccgtcgcctctacgcacaagcccagaagctgcgaaaacacagcagccacctcttcacagccaccatccctctgaatggcacgagtgacacctggtaccaggagctcaaggccatcattcgagagcagcagacgcggcccatctggacggcggaagatcagctggatggctccttggaggacaacctagacctccctcaccacggcctggccgacagctccgctgacctcagctgcgacagccgcgttaacagcgactacgagacggacggcgagggcggcgcgtacacggatggcgagggctacacagacggcgagggggggccctacacggatgtggatgatgagcccccggctccagccctggcccggtcctcggagcccgtgcaggcagatgagtcccagagcccgagggatcgtgggagaatctcggctcatcagggggcccaggtggacagccgccacccccagggacagtggcgacaggacagcatgcgaacctatgaacgggaagccctgaagaaaaagtttatgcgagtacatgatgcggagtcctccgatgaagacggctatgactggggtccggccactgacctgtga

SEQ ID NO: 94516 - DNA, 3110 bp, Artificial Sequence
  derived and/or modified sequence
agccgggagctgcggagctggagggaggaggacgagagcccggccctcagcccgctgtgactctcctcagccccctcccccagcccggggtgggggccgattgactgtttccaggaccccctcgggtaggggggctggagagcccccaggtggaccatggcggtgagattccaggtggctgacatggaggagctgaccatctgggaacagcacacggccacactgtccaaggacccccgccggggctttggcattgcgatctctggaggccgagaccggcccggtggatccatggttgtatctgacgtggtacctggagggccggcggagggcaggctacagacaggcgaccacatcgtcatggtgaacggggtttccatggagaatgccacctccgcgtttgccattcagatactcaagacctgcaccaagatggccaacatcacagtgaaacgtccccggaggatccacctgcccgccaccaaagccagcccctccagcccagggcgccaggactcggatgaagacgatgggccccagcgggtggaggaggtggaccagggccggggctatgacggcgactcatccagtggctccggccgctcctgggacgagcgctcccgccggccgaggcctggtcgccggggccgggccggcagccatgggcgtaggagcccaggtggtggctctgaggccaacgggctggccctggtgtccggctttaagcggctgccacggcaggacgtgcagatgaagcctgtgaagtcagtgctggtgaagaggagagacagcgaagagtttggcgtcaagctgggcagtcagatcttcatcaagcacattacagattcgggcctggctgcccggcaccgtgggctgcaggaaggagatctcattctacagatcaacggggtgtctagccagaacctgtcactgaacgacacccggcgactgattgagaagtcagaagggaagctaagcctgctggtgctgagagatcgtgggcagttcctggtgaacattccgcctgctgtcagtgacagcgacagctcgccattggaggaaggcgtgaccatggctgatgagatgtcctctccccctgcagacatctcggacctcgcctcggagctatcgcaggcaccaccatcccacatcccaccaccaccccggcatgctcagcggagccccgaggccagccagaccgactctcccgtggagagtccccggcttcggcgggaaagttcagtagattccagaaccatctcggaaccagatgagcaacggtcagagttgcccagggaaagcagctatgacatctacagagtgcccagcagtcagagcatggaggatcgtgggtacagccccgacacgcgtgtggtccgcttcctcaagggcaagagcatcgggctgcggctggcagggggcaatgacgtgggcatcttcgtgtccggggtgcaggcgggcagcccggccgacgggcagggcatccaggagggagatcagattctgcaggtgaatgacgtgccattccagaacctgacacgggaggaggcagtgcagttcctgctggggctgccaccaggcgaggagatggagctggtgacgcagaggaagcaggacattttctggaaaatggtgcagtcccgcgtgggtgactccttctacatccgcactcactttgagctggagcccagtccaccgtctggcctgggcttcacccgtggcgacgtcttccacgtgctggacacgctgcaccccggccccgggcagagccacgcacgaggaggccactggctggcggtgcgcatgggtcgtgacctgcgggagcaagagcggggcatcattcccaaccagagcagggcggagcagctggccagcctggaagctgcccagagggccgtgggagtcgggcccggctcctccgcgggctccaatgctcgggccgagttctggcggctgcggggtcttcgtcgaggagccaagaagaccactcagcggagccgtgaggacctctcagctctgacccgacagggccgctacccgccctacgaacgagtggtgttgcgagaagccagtttcaagcgcccggtagtgatcctgggacccgtggccgacattgctatgcagaagttgactgctgagatgcctgaccagtttgaaatcgcagagactgtgtccaggaccgacagcccctccaagatcatcaaactagacaccgtgcgggtgattgcagaaaaagacaagcatgcgctcctggatgtgaccccctccgccatcgagcgcctcaactatgtgcagtactaccccattgtggtcttcttcatccccgagagccggccggccctcaaggcactgcgccagtggctggcgcctgcctcccgccgcagcacccgtcgcctctacgcacaagcccagaagctgcgaaaacacagcagccacctcttcacagccaccatccctctgaatggcacgagtgacacctggtaccaggagctcaaggccatcattcgagagcagcagacgcggcccatctggacggcggaagatcagctggatggctccttggaggacaacctagacctccctcaccacggcctggccgacagctccgctgacctcagctgcgacagccgcgttaacagcgactacgagacggacggcgagggcggcgcgtacacggatggcgagggctacacagacggcgagggggggccctacacggatgtggatgatgagcccccggctccagccctggcccggtcctcggagcccgtgcaggcagatgagtcccagagcccgagggatcgtgggagaatctcggctcatcagggggcccaggtggacagccgccacccccagggacagtggcgacaggacagcatgcgaacctatgaacgggaagccctgaagaaaaagtttatgcgagtacatgatgcggagtcctccgatgaagacggctatgactggggtccggccactgacctgtgacctctcgaaggctgccagctggtccgtcctccttctccctccctggggctgggactcagtttcccatacagaacccacaaccttacctccctccgcctggtctttaataaacagagtattttcac

SEQ ID NO: 94517 - DNA, 2894 bp, Artificial Sequence
  derived and/or modified sequence
caggcacccgggccctggcacctgctgcctgcccagaggccacccagcctcctagacaggacccccgccggggctttggcattgcgatctctggaggccgagaccggcccggtggatccatggttgtatctgacgtggtacctggagggccggcggagggcaggctacagacaggcgaccacatcgtcatggtgaacggggtttccatggagaatgccacctccgcgtttgccattcagatactcaagacctgcaccaagatggccaacatcacagtgaaacgtccccggaggatccacctgcccgccaccaaagccagcccctccagcccagggcgccaggactcggatgaagacgatgggccccagcgggtggaggaggtggaccagggccggggctatgacggcgactcatccagtggctccggccgctcctgggacgagcgctcccgccggccgaggcctggtcgccggggccgggccggcagccatgggcgtaggagcccaggtggtggctctgaggccaacgggctggccctggtgtccggctttaagcggctgccacggcaggacgtgcagatgaagcctgtgaagtcagtgctggtgaagaggagagacagcgaagagtttggcgtcaagctgggcagtcagatcttcatcaagcacattacagattcgggcctggctgcccggcaccgtgggctgcaggaaggagatctcattctacagatcaacggggtgtctagccagaacctgtcactgaacgacacccggcgactgattgagaagtcagaagggaagctaagcctgctggtgctgagagatcgtgggcagttcctggtgaacattccgcctgctgtcagtgacagcgacagctcgccattggaggacatctcggacctcgcctcggagctatcgcaggcaccaccatcccacatcccaccaccaccccggcatgctcagcggagccccgaggccagccagaccgactctcccgtggagagtccccggcttcggcgggaaagttcagtagattccagaaccatctcggaaccagatgagcaacggtcagagttgcccagggaaagcagctatgacatctacagagtgcccagcagtcagagcatggaggatcgtgggtacagccccgacacgcgtgtggtccgcttcctcaagggcaagagcatcgggctgcggctggcagggggcaatgacgtgggcatcttcgtgtccggggtgcaggcgggcagcccggccgacgggcagggcatccaggagggagatcagattctgcaggtgaatgacgtgccattccagaacctgacacgggaggaggcagtgcagttcctgctggggctgccaccaggcgaggagatggagctggtgacgcagaggaagcaggacattttctggaaaatggtgcagtcccgcgtgggtgactccttctacatccgcactcactttgagctggagcccagtccaccgtctggcctgggcttcacccgtggcgacgtcttccacgtgctggacacgctgcaccccggccccgggcagagccacgcacgaggaggccactggctggcggtgcgcatgggtcgtgacctgcgggagcaagagcggggcatcattcccaaccagagcagggcggagcagctggccagcctggaagctgcccagagggccgtgggagtcgggcccggctcctccgcgggctccaatgctcgggccgagttctggcggctgcggggtcttcgtcgaggagccaagaagaccactcagcggagccgtgaggacctctcagctctgacccgacagggccgctacccgccctacgaacgagtggtgttgcgagaagccagtttcaagcgcccggtagtgatcctgggacccgtggccgacattgctatgcagaagttgactgctgagatgcctgaccagtttgaaatcgcagagactgtgtccaggaccgacagcccctccaagatcatcaaactagacaccgtgcgggtgattgcagaaaaagacaagcatgcgctcctggatgtgaccccctccgccatcgagcgcctcaactatgtgcagtactaccccattgtggtcttcttcatccccgagagccggccggccctcaaggcactgcgccagtggctggcgcctgcctcccgccgcagcacccgtcgcctctacgcacaagcccagaagctgcgaaaacacagcagccacctcttcacagccaccatccctctgaatggcacgagtgacacctggtaccaggagctcaaggccatcattcgagagcagcagacgcggcccatctggacggcggaagatcagctggatggctccttggaggacaacctagacctccctcaccacggcctggccgacagctccgctgacctcagctgcgacagccgcgttaacagcgactacgagacggacggcgagggcggcgcgtacacggatggcgagggctacacagacggcgagggggggccctacacggatgtggatgatgagcccccggctccagccctggcccggtcctcggagcccgtgcaggcagatgagtcccagagcccgagggatcgtgggagaatctcggctcatcagggggcccaggtggacagccgccacccccagggacagtggcgacaggacagcatgcgaacctatgaacgggaagccctgaagaaaaagtttatgcgagtacatgatgcggagtcctccgatgaagacggctatgactggggtccggccactgacctgtgacctctcgaaggctgccagctggtccgtcctccttctccctccctggggctgggactcagtttcccatacagaacccacaaccttacctccctccgcctggtctttaataaacagagtattttc

SEQ ID NO: 94518 - DNA, 3075 bp, Artificial Sequence
  derived and/or modified sequence
agttccactggcaggggacctgcctccctgttgccaccacaagagaggaaaagttggtcaaacaggtggggaggccagagctacaagcctcgggttccctccccaccacccgtgccaggcaggcacccgggccctggcacctgctgcctgcccagaggccacccagcctcctagacaggtggctgacatggaggagctgaccatctgggaacagcacacggccacactgtccaaggacccccgccggggctttggcattgcgatctctggaggccgagaccggcccggtggatccatggttgtatctgacgtggtacctggagggccggcggagggcaggctacagacaggcgaccacatcgtcatggtgaacggggtttccatggagaatgccacctccgcgtttgccattcagatactcaagacctgcaccaagatggccaacatcacagtgaaacgtccccggaggatccacctgcccgccaccaaagccagcccctccagcccagggcgccaggactcggatgaagacgatgggccccagcgggtggaggaggtggaccagggccggggctatgacggcgactcatccagtggctccggccgctcctgggacgagcgctcccgccggccgaggcctggtcgccggggccgggccggcagccatgggcgtaggagcccaggtggtggctctgaggccaacgggctggccctggtgtccggctttaagcggctgccacggcaggacgtgcagatgaagcctgtgaagtcagtgctggtgaagaggagagacagcgaagagtttggcgtcaagctgggcagtcagatcttcatcaagcacattacagattcgggcctggctgcccggcaccgtgggctgcaggaaggagatctcattctacagatcaacggggtgtctagccagaacctgtcactgaacgacacccggcgactgattgagaagtcagaagggaagctaagcctgctggtgctgagagatcgtgggcagttcctggtgaacattccgcctgctgtcagtgacagcgacagctcgccattggaggacatctcggacctcgcctcggagctatcgcaggcaccaccatcccacatcccaccaccaccccggcatgctcagcggagccccgaggccagccagaccgactctcccgtggagagtccccggcttcggcgggaaagttcagtagattccagaaccatctcggaaccagatgagcaacggtcagagttgcccagggaaagcagctatgacatctacagagtgcccagcagtcagagcatggaggatcgtgggtacagccccgacacgcgtgtggtccgcttcctcaagggcaagagcatcgggctgcggctggcagggggcaatgacgtgggcatcttcgtgtccggggtgcaggcgggcagcccggccgacgggcagggcatccaggagggagatcagattctgcaggtgaatgacgtgccattccagaacctgacacgggaggaggcagtgcagttcctgctggggctgccaccaggcgaggagatggagctggtgacgcagaggaagcaggacattttctggaaaatggtgcagtcccgcgtgggtgactccttctacatccgcactcactttgagctggagcccagtccaccgtctggcctgggcttcacccgtggcgacgtcttccacgtgctggacacgctgcaccccggccccgggcagagccacgcacgaggaggccactggctggcggtgcgcatgggtcgtgacctgcgggagcaagagcggggcatcattcccaaccagagcagggcggagcagctggccagcctggaagctgcccagagggccgtgggagtcgggcccggctcctccgcgggctccaatgctcgggccgagttctggcggctgcggggtcttcgtcgaggagccaagaagaccactcagcggagccgtgaggacctctcagctctgacccgacagggccgctacccgccctacgaacgagtggtgttgcgagaagccagtttcaagcgcccggtagtgatcctgggacccgtggccgacattgctatgcagaagttgactgctgagatgcctgaccagtttgaaatcgcagagactgtgtccaggaccgacagcccctccaagatcatcaaactagacaccgtgcgggtgattgcagaaaaagacaagcatgcgctcctggatgtgaccccctccgccatcgagcgcctcaactatgtgcagtactaccccattgtggtcttcttcatccccgagagccggccggccctcaaggcactgcgccagtggctggcgcctgcctcccgccgcagcacccgtcgcctctacgcacaagcccagaagctgcgaaaacacagcagccacctcttcacagccaccatccctctgaatggcacgagtgacacctggtaccaggagctcaaggccatcattcgagagcagcagacgcggcccatctggacggcggaagatcagctggatggctccttggaggacaacctagacctccctcaccacggcctggccgacagctccgctgacctcagctgcgacagccgcgttaacagcgactacgagacggacggcgagggcggcgcgtacacggatggcgagggctacacagacggcgagggggggccctacacggatgtggatgatgagcccccggctccagccctggcccggtcctcggagcccgtgcaggcagatgagtcccagagcccgagggatcgtgggagaatctcggctcatcagggggcccaggtggacagccgccacccccagggacagtggcgacaggacagcatgcgaacctatgaacgggaagccctgaagaaaaagtttatgcgagtacatgatgcggagtcctccgatgaagacggctatgactggggtccggccactgacctgtgacctctcgaaggctgccagctggtccgtcctccttctccctccctggggctgggactcagtttcccatacagaacccacaaccttacctccctccgcctggtctttaataaacagagtattttcacagc

SEQ ID NO: 94519 - DNA, 618 bp, Artificial Sequence
  derived and/or modified sequence
atgaccatggaaacggttgagtcacagcatgatgggtctatcaccgcctccttgactgagagtaagtccgctcacgtgcaaacccagacaggacagaattccatacctgcccttgcccaagtggtggctattgcccagggaggcactattcagatttccaatcccggctctgatggtgtgcaggggctccaagctttaactatgacaaacagcggggctccgccgccaggggcaaccattgtacaatacgccgctcagtccgccgacggcacccagcagttctttgtgcccgggagccaagtagtcgtgcaggccgccacaggagacatgcccacctatcagatccgtgctcctacagctgctctcccccaaggggtggtaatggccgcctctccaggatccctccactccccccaacagctggcagaggaagccaccaggaagagagagttgcggttaatgaagaatcgggaagcggcgaaagagtgcagaagacggaagaaagagtatgttaagtgcctggaatccagagttgctgtgttggaggtgcaaaataagaagcttattgaggagcttgagactcttaaggacatctgttcacctaagaccgactactag

SEQ ID NO: 94520 - DNA, 618 bp, Artificial Sequence
  derived and/or modified sequence
atgaccatggagaccgtggagagccagcatgatggcagcatcacagccagcctgacagagagcaagagcgcccacgtgcagacccagacaggccagaacagcatcccagccctggcccaggtggtggccatcgcccagggcggcaccatccagatcagcaaccctggcagtgatggagtgcagggcctgcaggccctgaccatgaccaacagcggggcccctcctcctggggccaccatcgtgcagtatgctgcccagagcgcagatggcacccagcagttctttgtgcccggcagccaggtggtggtgcaggccgccactggagacatgcccacctaccagatccgggcccccacagctgccctgccccagggcgtggtgatggccgccagccctggcagcctgcacagcccccagcagctggccgaggaggccaccaggaagcgggagctgcggctgatgaagaaccgggaggccgccaaggagtgcagaagaaggaagaaggagtatgtgaagtgcctggagagccgggtggccgtgctggaggtgcagaacaagaagctgattgaggagctggagaccctgaaggacatctgcagccccaagacagactactag

SEQ ID NO: 94521 - DNA, 618 bp, Artificial Sequence
  derived and/or modified sequence
atgaccatggagaccgtggagagccagcacgacggcagcatcaccgcaagtttgacagaatcaaaatcagcacatgtccagactcaaacaggccaaaactccatccccgcactcgcacaggtcgtagccatagctcaaggcggtacaattcagatatccaatccaggatcagacggtgtacagggcctgcaggctctgactatgacgaactctggagccccaccccccggagcgacaatcgttcagtatgccgcccagtcagccgacggaactcagcaatttttcgttcctgggagtcaggtagtcgtgcaagccgccacaggcgacatgcccacgtatcagatcagggccccaacagccgcactaccacagggcgtggttatggctgcttccccagggtctctgcattccccacagcagctggctgaggaagccacaaggaaacgggaactgaggttgatgaagaatagagaggccgccaaagaatgccggcggagaaagaaagagtacgtaaagtgtctggaatcgcgcgtagctgtacttgaggtacagaataagaagctcatcgaggaattagagacgctgaaggacatctgttctccaaagactgattattag

SEQ ID NO: 94522 - DNA, 618 bp, Artificial Sequence
  derived and/or modified sequence
atgaccatggagacagtggagagtcaacacgatggaagtatcaccgcaagtctcacggaatctaaaagtgcccacgtccagacccagactggtcagaattccatacccgcactcgctcaggtggtggccatcgcccaggggggaacaattcagatcagcaatccagggagcgacggcgtgcagggccttcaggccctgactatgacaaactcaggcgcaccgcctcccggagcaacaatcgtacagtacgccgcacaaagcgcagacggcactcagcagtttttcgtgcccggttcacaggtggtcgtacaggcggcaacgggtgatatgccaacatatcagatcagggcgcctaccgcggctctgccccaaggggtggtgatggcagccagtcctggttcactccactctccccagcagttagccgaggaggccacacggaagcgagaattgcgactgatgaagaaccgcgaggcggctaaggaatgtaggagacgcaagaaagagtatgtgaaatgtctcgagtcccgggtggcagtattggaggttcagaataagaagctcatcgaagagctcgaaaccttgaaagacatttgcagcccaaagacagactattag

SEQ ID NO: 94523 - DNA, 618 bp, Artificial Sequence
  derived and/or modified sequence
atgaccatggaaacagttgaatcccagcatgatggaagtataacagcttctttgacagagagcaagtctgctcatgtgcagactcagactggccaaaattcaatccctgctttagctcaggtagttgctatagcccaaggtggaacaatccagatttctaacccaggatctgatggtgttcagggactgcaggcattaacaatgacaaattcaggagctcctccaccaggtgctacaattgtacagtacgcagcacaatcagctgatggcacacagcagttctttgtcccaggcagccaggttgttgttcaagctgccactggtgacatgccaacttaccagatccgagctcctactgctgctttgccacagggagtggtgatggctgcatcgcccggaagtttgcacagtccccagcagctggcagaagaagcaacacgcaaacgagagctgaggctaatgaaaaacagggaagctgccaaagaatgtcgacgtcgaaagaaagaatatgtaaaatgtctggagagccgagttgcagtgctggaagtccagaacaagaagcttatagaggaacttgaaaccttgaaagacatttgttctcccaaaacagattactag

SEQ ID NO: 94524 - DNA, 618 bp, Artificial Sequence
  derived and/or modified sequence
atgaccatggagaccgtggagagccagcacgacggcagcatcaccgccagcctgaccgagagcaagagcgcccacgtgcagacccagaccggccagaacagcatccccgccctggcccaggtggtggccatcgcccagggcggcaccatccagatcagcaaccccggcagcgacggcgtgcagggcctgcaggccctgaccatgaccaacagcggcgcccccccccccggcgccaccatcgtgcagtacgccgcccagagcgccgacggcacccagcagttcttcgtgcccggcagccaggtggtggtgcaggccgccaccggcgacatgcccacctaccagatcagagcccccaccgccgccctgccccagggcgtggtgatggccgccagccccggcagcctgcacagcccccagcagctggccgaggaggccaccagaaagagagagctgagactgatgaagaacagagaggccgccaaggagtgcagaagaagaaagaaggagtacgtgaagtgcctggagagcagagtggccgtgctggaggtgcagaacaagaagctgatcgaggagctggagaccctgaaggacatctgcagccccaagaccgactactag

SEQ ID NO: 94525 - protein, 282 aa, Artificial Sequence
  derived and/or modified sequence
MWWHQHNLCFRRPIEEDYSSGDVEEKVAAIAETDESAESEGVIDSHKRREILSRRPSYRKILNELSSDVPGVPKIEEERSEEEGTPPSIATMAVPTSIYQTSTGQYIAIAQGGTIQISNPGSDGVQGLQALTMTNSGAPPPGATIVQYAAQSADGTQQFFVPGSQVVVQDEETELAPSHMAAATGDMPTYQIRAPTAALPQGVVMAASPGSLHSPQQLAEEATRKRELRLMKNREAAKECRRRKKEYVKCLESRVAVLEVQNKKLIEELETLKDICSPKTDY

SEQ ID NO: 94526 - DNA, 849 bp, Artificial Sequence
  derived and/or modified sequence
atgtggtggcaccagcataacttgtgttttcggcgccctatagaggaagattatagtagtggcgacgtggaagagaaagtggccgctatcgcggagacggacgagagcgcagaatccgagggcgttatcgatagtcataaaagaagagaaatcctttccagaaggccatcttatcgtaaaatcttaaacgaactgtcctctgacgtgcctggagttccgaaaatagaagaggaaagaagcgaggaggagggcacgcctcccagcatcgcaactatggcagtgcctactagcatctatcagacgagcactggccagtacattgccattgcccagggcgggaccattcagatctccaaccctggctctgacggtgtccagggacttcaggcgctcacaatgacaaatagcggtgcccccccacccggtgccactatcgtgcagtatgccgcacagtctgctgatgggacgcaacagttcttcgtgccaggctcccaggtcgtagtccaagacgaggagactgaactggccccgagtcatatggcagccgccactggagacatgccgacctaccagataagggcacctacagccgcactgccacagggagtagtgatggccgcctctccggggtctctccacagtccgcagcaactggccgaggaggccacacgaaagcgcgagctgcgactgatgaaaaaccgggaggccgctaaggaatgccgtcggcgcaagaaagagtacgtgaagtgtttagaaagccgagttgcagtgctcgaggtccagaacaaaaagctgatagaggagctggaaaccctgaaagacatctgctcacctaagaccgattactag

SEQ ID NO: 94527 - DNA, 849 bp, Artificial Sequence
  derived and/or modified sequence
atgtggtggcaccagcacaacctgtgcttcagaagacccatcgaggaggactacagcagtggagatgtggaggagaaggtggccgccatcgccgagacagatgagagcgctgagagcgagggcgtgattgacagccacaagaggcgggagatcctgagccggcggcccagctacaggaagatcctgaatgagctgagcagtgatgtgcctggggtgcccaagattgaggaggagaggtctgaggaggagggcaccccacccagcatcgccaccatggctgtgcccaccagcatctaccagaccagcacaggccagtacatcgccatcgcccagggcggcaccatccagatcagcaaccctggcagtgatggagtgcagggcctgcaggccctgaccatgaccaacagcggggcccctcctcctggggccaccatcgtgcagtatgctgcccagagcgcagatggcacccagcagttctttgtgcccggcagccaggtggtggtgcaggatgaggagacagagctggcccccagccacatggccgccgccaccggggacatgcccacctaccagatccgggcccccacagctgccctgccccagggcgtggtgatggccgccagccctggcagcctgcacagcccccagcagctggccgaggaggccaccaggaagcgggagctgcggctgatgaagaaccgggaggccgccaaggaatgtagaagaaggaagaaggagtatgtgaagtgcctggagagccgggtggccgtgctggaggtgcagaacaagaagctgattgaggagctggagaccctgaaggacatctgcagccccaagacagactactag

SEQ ID NO: 94528 - DNA, 849 bp, Artificial Sequence
  derived and/or modified sequence
atgtggtggcaccagcacaacctgtgcttccggcggcccatcgaggaagactacagcagtggtgacgtggaggaaaaggtagccgccatcgcagagacagacgagagcgctgagtccgagggcgtgattgatagccacaaaaggagagagatattatcaagacgcccctcctaccgaaagatcctgaacgagctctctagtgatgttcctggagtgcctaaaattgaggaagaaaggagtgaggaggaggggactccaccatcgatcgcaacaatggccgttcccacgagcatctaccaaacaagcactggccaatatatcgcaatcgctcaaggcgggaccattcagatctctaatcccggaagcgatggagttcaggggcttcaagcccttacaatgactaacagcggagccccaccaccaggcgccacaatagtacagtacgccgcacagagcgctgacggaacccagcagttcttcgtccccggctcccaggtggttgtgcaggatgaggagaccgagctagcaccttctcacatggccgctgccactggggatatgcccacctaccagattagagcacccaccgctgcccttccacagggcgttgtaatggccgccagccccggtagcctccacagccctcagcagttggctgaggaagcaactcgaaaacgggaactgcggctcatgaaaaatagagaggccgcgaaggagtgccgccgtcgcaaaaaggaatatgttaaatgtctggagtctcgggtcgctgtgctcgaagtccaaaacaagaaactcatcgaagaactggagactctgaaggacatttgtagtccgaaaacagactactag

SEQ ID NO: 94529 - DNA, 849 bp, Artificial Sequence
  derived and/or modified sequence
atgtggtggcaccaacacaatctctgctttcgccgaccaattgaggaggattacagttccggagacgtggaggaaaaggtggccgctatcgccgaaactgatgaaagtgcagagtctgagggggttattgatagtcataagagacgggaaatcctgtcccgtagaccatcataccgcaagatcctgaacgagctctcctcggacgtgccaggagtgccaaagatcgaggaagaaaggagcgaggaggagggaacacccccttcgatcgctactatggcggtgccaacgagtatctaccagacgtccaccgggcagtacatagcaattgcacaggggggaaccatccaaatctctaaccctggtagcgacggggtccagggcctgcaggccctaaccatgacaaactctggggctccacccccaggcgctaccattgttcagtatgccgctcagtctgccgacgggacacagcagttctttgtcccaggctcccaggtggtagtacaggacgaagaaacggagctggctccaagccatatggctgctgctacaggggatatgcctacttaccagatccgagcacctacagccgctcttccacagggggtagtgatggcggctagtccgggatccttgcactctccgcagcaacttgctgaggaggcgaccagaaagagggagctgagactgatgaaaaaccgcgaggccgctaaggagtgcagaagacggaagaaggagtatgtaaaatgtctcgaaagcagggtggccgttctcgaagtccagaacaagaaactgattgaggaattagagactcttaaggacatttgctccccgaagacagactactag

SEQ ID NO: 94530 - DNA, 849 bp, Artificial Sequence
  derived and/or modified sequence
atgtggtggcatcagcataatctatgtttcaggcgtcctatagaagaggattattcttcaggggatgtggaagaaaaggtagcagcaattgcagagacagatgaatctgcagaatcagaaggtgtaattgattctcataaacgtagagaaatcctttcacgaagaccctcttataggaaaatactgaatgaactgtcctctgatgtgcctggtgttcccaagattgaagaagagagatcagaggaagaaggaacaccacctagtattgctaccatggcagtaccaactagcatatatcagactagcacggggcaatacattgctatagcccaaggtggaacaatccagatttctaacccaggatctgatggtgttcagggactgcaggcattaacaatgacaaattcaggagctcctccaccaggtgctacaattgtacagtacgcagcacaatcagctgatggcacacagcagttctttgtcccaggcagccaggttgttgttcaagatgaggaaactgaacttgccccaagtcacatggctgctgccactggtgacatgccaacttaccagatccgagctcctactgctgctttgccacagggagtggtgatggctgcatcgcccggaagtttgcacagtccccagcagctggcagaagaagcaacacgcaaacgagagctgaggctaatgaaaaacagggaagctgccaaagaatgtcgacgtcgaaagaaagaatatgtaaaatgtctggagagccgagttgcagtgctggaagtccagaacaagaagcttatagaggaacttgaaaccttgaaagacatttgttctcccaaaacagattactag

SEQ ID NO: 94531 - DNA, 849 bp, Artificial Sequence
  derived and/or modified sequence
atgtggtggcaccagcacaacctgtgcttcagaagacccatcgaggaggactacagcagcggcgacgtggaggagaaggtggccgccatcgccgagaccgacgagagcgccgagagcgagggcgtgatcgacagccacaagagaagagagatcctgagcagaagacccagctacagaaagatcctgaacgagctgagcagcgacgtgcccggcgtgcccaagatcgaggaggagagaagcgaggaggagggcaccccccccagcatcgccaccatggccgtgcccaccagcatctaccagaccagcaccggccagtacatcgccatcgcccagggcggcaccatccagatcagcaaccccggcagcgacggcgtgcagggcctgcaggccctgaccatgaccaacagcggcgcccccccccccggcgccaccatcgtgcagtacgccgcccagagcgccgacggcacccagcagttcttcgtgcccggcagccaggtggtggtgcaggacgaggagaccgagctggcccccagccacatggccgccgccaccggcgacatgcccacctaccagatcagagcccccaccgccgccctgccccagggcgtggtgatggccgccagccccggcagcctgcacagcccccagcagctggccgaggaggccaccagaaagagagagctgagactgatgaagaacagagaggccgccaaggagtgcagaagaagaaagaaggagtacgtgaagtgcctggagagcagagtggccgtgctggaggtgcagaacaagaagctgatcgaggagctggagaccctgaaggacatctgcagccccaagaccgactactag

SEQ ID NO: 94532 - DNA, 1030 bp, Artificial Sequence
  derived and/or modified sequence
ctaggccccgccccctgacccgcaccttcccgccgcccctccccggttccatttcattgttggattgtggcgcttcactcctgctggcggccggcagggggcggagttcgagcctggatttttttcctcggggcctcccccgggaggccgtcccggcgtgggggaggggaggacggggcgggaggacgcggttcggtcggctgcagcgctacttttggtccggggtcggcagggaggccgcggctaccgcatcacagctgacgtgaggactacgtggggccgctgccggctccgggttgctgggcggcggcgccgctgctgagcggcggtcgggctcgccgtctccacctcctcgcgtccgtaatcagtgacgaggtccgctacgtaaatccctttgcggcggctgccactggtgacatgccaacttaccagatccgagctcctactgctgctttgccacagggagtggtgatggctgcatcgcccggaagtttgcacagtccccagcagctggcagaagaagcaacacgcaaacgagagctgaggctaatgaaaaacagggaagctgccaaagaatgtcgacgtcgaaagaaagaatatgtaaaatgtctggagagccgagttgcagtgctggaagtccagaacaagaagcttatagaggaacttgaaaccttgaaagacatttgttctcccaaaacagattactagaaatatttaactatgaactgaaggcagcatgtatagttgcttttgaaggaatacaatatatagctggcaagaatggtggcttcttttctttgtatcattcatcttcttctttaatcacttaacattcctaaaatgcttcactgtacgtagttaagtcgtagctataacttcaaattttttaaaagagacaaactgtaaaaaatgtgtgtattcttaaaatgcaatatttgtaaggcttgttccaatgccacatacttgcagctcccattctatgtgtcatcaatagtgtcctatgcaataaaattatttgcaggtctttaaa

SEQ ID NO: 94533 - protein, 710 aa, Artificial Sequence
  derived and/or modified sequence
MHNIRGNKQAQGTGHEPPGEDSPQSGEPQREEQPLASDASTPGREPEDSPKPAPKPSLTISFAQKAKRQNNTFPFFSEGITRNRTAQEKVAALEQQVLMLTKELKSQKELVKILHKALEAAQQEKRASSAYLAAAEDKDRLELVRHKVRQIAELGRRVEALEQERESLAHTASLREQQVQELQQHVQLLMDKNHAKQQVICKLSEKVTQDFTHPPDQSPLRPDAANRDFLSQQGKIEHLKDDMEAYRTQNCFLNSEIHQVTKIWRKVAEKEKALLTKCAYLQARNCQVESKYLAGLRRLQEALGDEASECSELLRQLVQEALQWEAGEASSDSIELSPISKYDEYGFLTVPDYEVEDLKLLAKIQALESRSHHLLGLEAVDRPLRERWAALGDLVPSAELKQLLRAGVPREHRPRVWRWLVHLRVQHLHTPGCYQELLSRGQAREHPAARQIELDLNRTFPNNKHFTCPTSSFPDKLRRVLLAFSWQNPTIGYCQGLNRLAAIALLVLEEEESAFWCLVAIVETIMPADYYCNTLTASQVDQRVLQDLLSEKLPRLMAHLGQHHVDLSLVTFNWFLVVFADSLISNILLRVWDAFLYEGTKVVFRYALAIFKYNEKEILRLQNGLEIYQYLRFFTKTISNSRKLMNIAFNDMNPFRMKQLRQLRMVHRERLEAELRELEQLKAEYLERRASRRRAVSEGCASEDEVEGEA

SEQ ID NO: 94534 - protein, 468 aa, Artificial Sequence
  derived and/or modified sequence
MEAYRTQNCFLNSEIHQVTKIWRKVAEKEKALLTKCAYLQARNCQVESKYLAGLRRLQEALGDEASECSELLRQLVQEALQWEAGEASSDSIELSPISKYDEYGFLTVPDYEVEDLKLLAKIQALESRSHHLLGLEAVDRPLRERWAALGDLVPSAELKQLLRAGVPREHRPRVWRWLVHLRVQHLHTPGCYQELLSRGQAREHPAARQIELDLNRTFPNNKHFTCPTSSFPDKLRRVLLAFSWQNPTIGYCQGLNRLAAIALLVLEEEESAFWCLVAIVETIMPADYYCNTLTASQVDQRVLQDLLSEKLPRLMAHLGQHHVDLSLVTFNWFLVVFADSLISNILLRVWDAFLYEGTKVVFRYALAIFKYNEKEILRLQNGLEIYQYLRFFTKTISNSRKLMNIAFNDMNPFRMKQLRQLRMVHRERLEAELRELEQLKAEYLERRASRRRAVSEGCASEDEVEGEA

SEQ ID NO: 94535 - protein, 860 aa, Artificial Sequence
  derived and/or modified sequence
MEGAGENAPESSSSAPGSEESARDPQVPPPEEESGDCARSLEAVPKKLCGYLSKFGGKGPIRGWKSRWFFYDERKCQLYYSRTAQDANPLDSIDLSSAVFDCKADAEEGIFEIKTPSRVITLKAATKQAMLYWLQQLQMKRWEFHNSPPAPPATPDAALAGNGPVLHLELGQEEAELEEFLCPVKTPPGLVGVAAALQPFPALQNISLKHLGTEIQNTMHNIRGNKQAQGTGHEPPGEDSPQSGEPQREEQPLASDASTPGREPEDSPKPAPKPSLTISFAQKAKRQNNTFPFFSEGITRNRTAQEKVAALEQQVLMLTKELKSQKELVKILHKALEAAQQEKRASSAYLAAAEDKDRLELVRHKVRQIAELGRRVEALEQERESLAHTASLREQQVQELQQHVQLLMDKNHAKQQVICKLSEKVTQDFTHPPDQSPLRPDAANRDFLSQQGKIEHLKDDMEAYRTQNCFLNSEIHQVTKIWRKVAEKEKALLTKCAYLQARNCQVESKYLAGLRRLQEALGDEASECSELLRQLVQEALQWEAGEASSDSIELSPISKYDEYGFLTVPDYEVEDLKLLAKIQALESRSHHLLGLEAVDRPLRERWAALGDLVPSAELKQLLRAGVPREHRPRVWRWLVHLRVQHLHTPGCYQELLSRGQAREHPAARQIELDLNRTFPNNKHFTCPTSSFPDKLRRVLLAFSWQNPTIGYCQGLNRLAAIALLVLEEEESAFWCLVAIVETIMPADYYCNTLTASQVDQRVLQDLLSEKLPRLMAHLGQHHVDLSLVTFNWFLVVFADSLISNILLRVWDAFLYEGTKVVFRYALAIFKYNEKEILRLQNGLEIYQYLRFFTKTISNSR

SEQ ID NO: 94536 - DNA, 2133 bp, Artificial Sequence
  derived and/or modified sequence
atgcacaacatcagaggcaacaagcaggcccagggcaccggccacgagccccccggcgaggacagcccccagagcggcgagccccagagagaggagcagcccctggccagcgacgccagcacccccggcagagagcccgaggacagccccaagcccgcccccaagcccagcctgaccatcagcttcgcccagaaggccaagagacagaacaacaccttccccttcttcagcgagggcatcaccagaaacagaaccgcccaggagaaggtggccgccctggagcagcaggtgctgatgctgaccaaggagctgaagagccagaaggagctggtgaagatcctgcacaaggccctggaggccgcccagcaggagaagagagccagcagcgcctacctggccgccgccgaggacaaggacagactggagctggtgagacacaaggtgagacagatcgccgagctgggcagaagagtggaggccctggagcaggagagagagagcctggcccacaccgccagcctgagagagcagcaggtgcaggagctgcagcagcacgtgcagctgctgatggacaagaaccacgccaagcagcaggtgatctgcaagctgagcgagaaggtgacccaggacttcacccacccccccgaccagagccccctgagacccgacgccgccaacagagacttcctgagccagcagggcaagatcgagcacctgaaggacgacatggaggcctacagaacccagaactgcttcctgaacagcgagatccaccaggtgaccaagatctggagaaaggtggccgagaaggagaaggccctgctgaccaagtgcgcctacctgcaggccagaaactgccaggtggagagcaagtacctggccggcctgagaagactgcaggaggccctgggcgacgaggccagcgagtgcagcgagctgctgagacagctggtgcaggaggccctgcagtgggaggccggcgaggccagcagcgacagcatcgagctgagccccatcagcaagtacgacgagtacggcttcctgaccgtgcccgactacgaggtggaggacctgaagctgctggccaagatccaggccctggagagcagaagccaccacctgctgggcctggaggccgtggacagacccctgagagagagatgggccgccctgggcgacctggtgcccagcgccgagctgaagcagctgctgagagccggcgtgcccagagagcacagacccagagtgtggagatggctggtgcacctgagagtgcagcacctgcacacccccggctgctaccaggagctgctgagcagaggccaggccagagagcaccccgccgccagacagatcgagctggacctgaacagaaccttccccaacaacaagcacttcacctgccccaccagcagcttccccgacaagctgagaagagtgctgctggccttcagctggcagaaccccaccatcggctactgccagggcctgaacagactggccgccatcgccctgctggtgctggaggaggaggagagcgccttctggtgcctggtggccatcgtggagaccatcatgcccgccgactactactgcaacaccctgaccgccagccaggtggaccagagagtgctgcaggacctgctgagcgagaagctgcccagactgatggcccacctgggccagcaccacgtggacctgagcctggtgaccttcaactggttcctggtggtgttcgccgacagcctgatcagcaacatcctgctgagagtgtgggacgccttcctgtacgagggcaccaaggtggtgttcagatacgccctggccatcttcaagtacaacgagaaggagatcctgagactgcagaacggcctggagatctaccagtacctgagattcttcaccaagaccatcagcaacagcagaaagctgatgaacatcgccttcaacgacatgaaccccttcagaatgaagcagctgagacagctgagaatggtgcacagagagagactggaggccgagctgagagagctggagcagctgaaggccgagtacctggagagaagagccagcagaagaagagccgtgagcgagggctgcgccagcgaggacgaggtggagggcgaggcctag

SEQ ID NO: 94537 - DNA, 2583 bp, Artificial Sequence
  derived and/or modified sequence
atggagggcgccggcgagaacgcccccgagagcagcagcagcgcccccggcagcgaggagagcgccagagacccccaggtgcccccccccgaggaggagagcggcgactgcgccagaagcctggaggccgtgcccaagaagctgtgcggctacctgagcaagttcggcggcaagggccccatcagaggctggaagagcagatggttcttctacgacgagagaaagtgccagctgtactacagcagaaccgcccaggacgccaaccccctggacagcatcgacctgagcagcgccgtgttcgactgcaaggccgacgccgaggagggcatcttcgagatcaagacccccagcagagtgatcaccctgaaggccgccaccaagcaggccatgctgtactggctgcagcagctgcagatgaagagatgggagttccacaacagcccccccgccccccccgccacccccgacgccgccctggccggcaacggccccgtgctgcacctggagctgggccaggaggaggccgagctggaggagttcctgtgccccgtgaagaccccccccggcctggtgggcgtggccgccgccctgcagcccttccccgccctgcagaacatcagcctgaagcacctgggcaccgagatccagaacaccatgcacaacatcagaggcaacaagcaggcccagggcaccggccacgagccccccggcgaggacagcccccagagcggcgagccccagagagaggagcagcccctggccagcgacgccagcacccccggcagagagcccgaggacagccccaagcccgcccccaagcccagcctgaccatcagcttcgcccagaaggccaagagacagaacaacaccttccccttcttcagcgagggcatcaccagaaacagaaccgcccaggagaaggtggccgccctggagcagcaggtgctgatgctgaccaaggagctgaagagccagaaggagctggtgaagatcctgcacaaggccctggaggccgcccagcaggagaagagagccagcagcgcctacctggccgccgccgaggacaaggacagactggagctggtgagacacaaggtgagacagatcgccgagctgggcagaagagtggaggccctggagcaggagagagagagcctggcccacaccgccagcctgagagagcagcaggtgcaggagctgcagcagcacgtgcagctgctgatggacaagaaccacgccaagcagcaggtgatctgcaagctgagcgagaaggtgacccaggacttcacccacccccccgaccagagccccctgagacccgacgccgccaacagagacttcctgagccagcagggcaagatcgagcacctgaaggacgacatggaggcctacagaacccagaactgcttcctgaacagcgagatccaccaggtgaccaagatctggagaaaggtggccgagaaggagaaggccctgctgaccaagtgcgcctacctgcaggccagaaactgccaggtggagagcaagtacctggccggcctgagaagactgcaggaggccctgggcgacgaggccagcgagtgcagcgagctgctgagacagctggtgcaggaggccctgcagtgggaggccggcgaggccagcagcgacagcatcgagctgagccccatcagcaagtacgacgagtacggcttcctgaccgtgcccgactacgaggtggaggacctgaagctgctggccaagatccaggccctggagagcagaagccaccacctgctgggcctggaggccgtggacagacccctgagagagagatgggccgccctgggcgacctggtgcccagcgccgagctgaagcagctgctgagagccggcgtgcccagagagcacagacccagagtgtggagatggctggtgcacctgagagtgcagcacctgcacacccccggctgctaccaggagctgctgagcagaggccaggccagagagcaccccgccgccagacagatcgagctggacctgaacagaaccttccccaacaacaagcacttcacctgccccaccagcagcttccccgacaagctgagaagagtgctgctggccttcagctggcagaaccccaccatcggctactgccagggcctgaacagactggccgccatcgccctgctggtgctggaggaggaggagagcgccttctggtgcctggtggccatcgtggagaccatcatgcccgccgactactactgcaacaccctgaccgccagccaggtggaccagagagtgctgcaggacctgctgagcgagaagctgcccagactgatggcccacctgggccagcaccacgtggacctgagcctggtgaccttcaactggttcctggtggtgttcgccgacagcctgatcagcaacatcctgctgagagtgtgggacgccttcctgtacgagggcaccaaggtggtgttcagatacgccctggccatcttcaagtacaacgagaaggagatcctgagactgcagaacggcctggagatctaccagtacctgagattcttcaccaagaccatcagcaacagcagatag

SEQ ID NO: 94538 - DNA, 2133 bp, Artificial Sequence
  derived and/or modified sequence
atgcacaatatcaggggcaataagcaggcgcaggggacgggtcacgaaccgccaggagaggacagtcctcaaagtggagagccgcagcgggaggagcagccactcgcaagcgacgcttccacaccagggagggaacccgaggacagcccaaagcccgccccgaaacccagcttaacgatcagcttcgctcaaaaggcgaaaaggcagaacaatacatttcccttcttcagcgaaggaattaccaggaacaggactgcacaggagaaggtggcagctcttgagcagcaagtgcttatgttgacaaaagagctaaaatcccagaaagaactggttaagatactacacaaggccttagaagcagcgcagcaggagaaacgcgcctccagcgcctacctggccgcggcagaagataaggaccgtttagaactggtgcggcacaaagtccggcagatcgccgagctcggtaggagggtggaggccctcgaacaggaaagggaaagtctagcacacacggctagcctgcgggaacagcaggttcaggagttgcaacaacacgtgcaactactgatggataagaatcatgcaaaacagcaggtaatttgtaagctttccgaaaaggtgacacaggatttcacccatccgcccgatcagagtcctttacgtcccgatgccgcaaaccgggactttctgagccagcagggcaagatcgaacacctgaaagacgatatggaggcatacaggactcagaattgcttcctgaactcggaaatccatcaggtgactaagatatggcgaaaagtggctgagaaagaaaaagctctgctgactaagtgtgcatacttgcaggcaaggaattgtcaggtggagagtaagtatctggccggtttacggcgcctccaggaggctcttggagatgaggcttctgaatgcagtgagctcctgaggcaactggtccaggaagctctccagtgggaggcaggcgaagcttcaagcgacagtattgaactaagtcctatcagtaaatacgacgaatacgggtttctgactgtacctgactatgaggtggaggatctgaagttgcttgcaaagattcaggcattggaatcacgaagccatcatttactcggactggaggccgtagatcgaccactgcgtgagagatgggctgctctgggcgatctggtcccttccgccgagctcaaacagctgctgagagcaggggttcctcgagagcacagaccccgggtttggcggtggctagttcacctgcgtgtgcaacacttacatactccaggatgctaccaggaactcttatccaggggacaagctagagagcacccagctgctagacagatagagctggacttgaataggaccttccccaacaacaaacactttacttgtcccacctcctcttttcccgataagcttagacgagtcctactggctttctcctggcagaaccctacaatcggctactgccaagggctgaataggctcgccgcaattgccctcctagttctggaggaagaagagagtgccttctggtgcctggtagctatcgtggagactatcatgcccgccgactattattgcaataccctaacggcatcacaggttgatcaacgggtcctgcaggacctgctctccgagaagcttcctcggttgatggctcacctgggccagcaccatgttgacctgtccctggttaccttcaactggttcctagtcgtcttcgccgactctctgattagcaatattctcctccgggtgtgggatgcttttttatacgagggcacaaaggtcgtgtttcgttacgccttggcgatattcaaatataatgagaaggagattctcaggctacaaaacggtctagaaatttatcagtacctcaggttttttactaagactatcagtaattctcggaagctgatgaacattgcgtttaacgacatgaaccccttcaggatgaaacagctgaggcagctgagaatggtacatagagagcgcctggaggccgagttacgagagttggagcagctgaaagccgaatatctggaacgtcgcgcgtcccgcagacgggctgtctctgaaggctgcgctagcgaggatgaggtcgagggagaagcctag

SEQ ID NO: 94539 - DNA, 2583 bp, Artificial Sequence
  derived and/or modified sequence
atggaaggggcgggagaaaatgcacccgaatcgtcatcaagcgcccccggctcagaagagagcgctcgtgacccgcaggttcctccaccggaggaggagtccggcgattgtgcacggagtctcgaagccgtgccaaaaaaattgtgcggttatctctccaaattcggtggaaaaggcccaatccgggggtggaagtcaagatggttcttctacgacgaaaggaaatgtcaactgtattattcaagaactgctcaggatgctaatccacttgattctatcgatttgagctcggcagtcttcgactgtaaggccgacgccgaagaaggcatctttgaaatcaagactccttcacgagttattacgctgaaagcagccacgaaacaggcaatgctgtactggctccaacagctccagatgaagcggtgggaattccataacagcccccctgccccacccgccacgccagatgccgccctggccggcaacggtcctgtgctgcatctggagctgggccaggaggaagcagagctggaagaattcctctgtcccgtcaagacccctccaggactggtgggagttgcagccgctttgcagccttttccagccttacagaacattagcttgaagcatctgggtacggaaatacagaacacgatgcacaacatccggggcaataaacaagctcaaggcactggacacgaacctccgggagaggacagcccccaatcaggggagccccagcgagaggagcaacccctggcatcagacgcttctaccccagggcgggagccagaagattcccctaaacctgcccccaagccgtcactgacaatatcctttgcccagaaggccaagcgtcagaataatacattcccctttttctctgaggggattacgaggaatagaaccgcccaggaaaaggtagccgctctggagcagcaggtgttgatgctgactaaggagctcaagagtcagaaggaactcgtcaaaattctccacaaggctctggaagccgctcagcaggaaaagcgcgcttcctctgcataccttgctgccgcagaggataaggacagactggaattggtccgacataaagttcggcagatagctgaactgggcagaagggttgaagcactggagcaagagcgcgagtcgcttgcacatacagcttccctgcgggagcagcaggtccaggagctccagcagcacgtgcagctgctcatggacaaaaaccacgcgaagcagcaggtgatctgcaaattgtcagaaaaagtaacgcaagacttcactcatcctcccgaccagtcaccattgaggcctgatgctgccaacagagattttctgtctcagcagggaaagatcgagcacttaaaagatgatatggaagcctataggactcagaattgctttcttaattctgaaatccaccaggtgaccaaaatctggcgcaaagtggctgagaaggagaaagcactcctgacaaagtgcgcctacctgcaggcccggaactgtcaggttgagagcaaatatcttgcaggcttgaggagactgcaagaggctctgggcgacgaagcctcagaatgctctgagctgttgcgacaactagttcaggaagccctgcagtgggaagccggagaggcaagctccgactccatcgaactcagcccaatctcaaagtacgacgagtacggctttctaaccgtgccggattatgaagtggaagatttaaagctgctagctaagatccaggctcttgagtcacgatcacaccatctgctcggcctggaagctgtagatcggcctctgcgagaaagatgggctgctctgggtgatctggtacctagcgcagaattaaagcaactgcttagggccggtgtccctcgcgaacacaggccgcgtgtttggaggtggctggttcacctcagagtccagcatttgcacaccccgggatgctaccaggaactattgtcccgggggcaggccagagaacatcccgcagcccgtcagatcgaattggatctcaataggacattccctaataacaagcactttacctgtcctacgtcaagtttccccgataaacttagaagagtgctgctggccttttcgtggcagaatcctaccattggatattgtcagggattgaatagactggccgccatagctcttctcgtgctggaagaggaggagagtgccttctggtgtcttgtggctattgtggaaacaatcatgcccgccgattattattgcaacacactgacagcctctcaggtggaccagagggtcctccaagacctgctttccgagaagctgccacggctgatggctcacctgggccaacaccacgttgacctctctttggttactttcaactggttcctcgtggtgttcgcagactcccttatcagtaatattcttctgcgagtttgggatgccttcctatatgaaggtacaaaggtagtatttcggtacgctctagcaatcttcaagtacaacgaaaaggagattttgagattgcaaaatggcctcgaaatctatcagtatctccgcttcttcacaaagaccatcagtaatagccgctag

SEQ ID NO: 94540 - DNA, 2133 bp, Artificial Sequence
  derived and/or modified sequence
atgcacaacatccggggcaacaagcaggcccagggcactggacatgagcccccaggagaggacagcccccagagcggggagccccagcgggaggagcagcccctggccagtgatgccagcaccccaggccgggagcctgaggacagccccaagccagcccccaagcccagcctgaccatcagctttgcccagaaggccaagaggcagaacaacaccttccccttcttcagcgagggcatcaccaggaacagaacagcccaggagaaggtggccgccctggagcagcaggtgctgatgctgaccaaggagctgaagagccagaaggagctggtgaagatcctgcacaaggccctggaggccgcccagcaggagaagagggccagcagcgcctacctggccgctgctgaggacaaggaccggctggagctggtgcgccacaaggtgcggcagattgctgagctgggccggcgggtggaggccctggagcaggagcgggagagcctggcccacacagccagcctgcgggagcagcaggtgcaggagctgcagcagcacgtgcagctgctgatggacaagaaccacgccaagcagcaggtgatctgcaagctgtctgagaaggtgacccaggacttcacccaccccccagaccagagccccctgcggccagatgctgccaacagagacttcctgagccagcagggcaagattgagcacctgaaggatgacatggaggcctaccgcacccagaactgcttcctgaacagcgagatccaccaggtgaccaagatctggaggaaggtggccgagaaggagaaggccctgctgaccaagtgtgcctacctgcaggccaggaactgccaggtggagagcaagtacctggccggcctgcggcggctgcaggaggccctgggagatgaggcctctgaatgttctgagctgctgcggcagctggtgcaggaggccctgcagtgggaggccggggaggccagcagtgacagcattgagctgagccccatcagcaaatatgatgaatatggcttcctgactgtgcctgactatgaggtggaggacctgaagctgctggccaagatccaggccctggagagccgcagccaccacctgctgggcctggaggccgtggaccggcccctgcgggagcgctgggccgccctgggggacctggtgcccagcgctgagctgaagcagctgctgcgggccggcgtgccccgggagcaccggccccgggtgtggcgctggctggtgcacctgcgggtgcagcacctgcacaccccaggctgctaccaggagctgctgagccggggccaggcccgggagcaccctgctgcccggcagatcgagctggacctgaacagaaccttccccaacaacaagcacttcacctgccccaccagcagcttcccagacaagctgcggcgggtgctgctggccttctcctggcagaaccccaccatcggctactgccagggcctgaaccggctggccgccatcgccctgctggtgctggaggaggaggagagcgccttctggtgcctggtggccatcgtggagaccatcatgcctgctgactactactgcaacaccctgacagccagccaggtggaccagagggtgctgcaggacctgctgtctgagaagctgccccggctgatggcccacctgggccagcaccacgtggacctgagcctggtgaccttcaactggttcctggtggtgtttgctgacagcctcatcagcaacatcctgctgcgggtgtgggatgccttcctgtatgagggcaccaaggtggtgttccgctatgccctggccatcttcaagtacaatgagaaggagatcctgcggctgcagaatggcctggagatctaccagtacctgcgcttcttcaccaagaccatcagcaacagcaggaagctgatgaacatcgccttcaatgacatgaaccccttcaggatgaagcagctgcggcagctgaggatggtgcaccgggagcggctggaggccgagctgcgggagctggagcagctgaaggccgagtacctggagcggcgggccagcagaagaagagctgtgtctgagggctgtgcctctgaagatgaggtggagggggaggcctag

SEQ ID NO: 94541 - DNA, 2583 bp, Artificial Sequence
  derived and/or modified sequence
atggagggcgctggggagaatgcccctgagagcagcagcagcgcccctggcagcgaggagagcgcccgggacccccaggtgcccccacctgaggaggagagcggggactgtgcccggagcctggaggccgtgcccaagaagctgtgtggctacctgagcaagtttggaggcaagggccccatccggggctggaagagccgctggttcttctatgatgagaggaagtgccagctgtactacagcaggacagcccaggatgccaaccccctggacagcattgacctgagcagcgctgtgtttgactgcaaggcagatgctgaggagggcatctttgagatcaagacccccagcagggtcatcaccctgaaggccgccaccaagcaggccatgctgtactggctgcagcagctgcagatgaagcgctgggagttccacaacagccccccagcccccccagccaccccagatgctgccctggccggaaatggacctgtgctgcacctggagctgggccaggaggaggccgagctggaggagttcctgtgccctgtgaagaccccacctggcctggtgggcgtggccgccgccctgcagcccttccctgccctgcagaacatcagcctgaagcacctgggcacagagatccagaacaccatgcacaacatccggggcaacaagcaggcccagggcactggacatgagcccccaggagaggacagcccccagagcggggagccccagcgggaggagcagcccctggccagtgatgccagcaccccaggccgggagcctgaggacagccccaagccagcccccaagcccagcctgaccatcagctttgcccagaaggccaagaggcagaacaacaccttccccttcttcagcgagggcatcaccaggaacagaacagcccaggagaaggtggccgccctggagcagcaggtgctgatgctgaccaaggagctgaagagccagaaggagctggtgaagatcctgcacaaggccctggaggccgcccagcaggagaagagggccagcagcgcctacctggccgctgctgaggacaaggaccggctggagctggtgcgccacaaggtgcggcagattgctgagctgggccggcgggtggaggccctggagcaggagcgggagagcctggcccacacagccagcctgcgggagcagcaggtgcaggagctgcagcagcacgtgcagctgctgatggacaagaaccacgccaagcagcaggtgatctgcaagctgtctgagaaggtgacccaggacttcacccaccccccagaccagagccccctgcggccagatgctgccaacagagacttcctgagccagcagggcaagattgagcacctgaaggatgacatggaggcctaccgcacccagaactgcttcctgaacagcgagatccaccaggtgaccaagatctggaggaaggtggccgagaaggagaaggccctgctgaccaagtgtgcctacctgcaggccaggaactgccaggtggagagcaagtacctggccggcctgcggcggctgcaggaggccctgggagatgaggcctctgaatgttctgagctgctgcggcagctggtgcaggaggccctgcagtgggaggccggggaggccagcagtgacagcattgagctgagccccatcagcaaatatgatgaatatggcttcctgactgtgcctgactatgaggtggaggacctgaagctgctggccaagatccaggccctggagagccgcagccaccacctgctgggcctggaggccgtggaccggcccctgcgggagcgctgggccgccctgggggacctggtgcccagcgctgagctgaagcagctgctgcgggccggcgtgccccgggagcaccggccccgggtgtggcgctggctggtgcacctgcgggtgcagcacctgcacaccccaggctgctaccaggagctgctgagccggggccaggcccgggagcaccctgctgcccggcagatcgagctggacctgaacagaaccttccccaacaacaagcacttcacctgccccaccagcagcttcccagacaagctgcggcgggtgctgctggccttctcctggcagaaccccaccatcggctactgccagggcctgaaccggctggccgccatcgccctgctggtgctggaggaggaggagagcgccttctggtgcctggtggccatcgtggagaccatcatgcctgctgactactactgcaacaccctgacagccagccaggtggaccagagggtgctgcaggacctgctgtctgagaagctgccccggctgatggcccacctgggccagcaccacgtggacctgagcctggtgaccttcaactggttcctggtggtgtttgctgacagcctcatcagcaacatcctgctgcgggtgtgggatgccttcctgtatgagggcaccaaggtggtgttccgctatgccctggccatcttcaagtacaatgagaaggagatcctgcggctgcagaatggcctggagatctaccagtacctgcgcttcttcaccaagaccatcagcaacagcaggtag

SEQ ID NO: 94542 - DNA, 2133 bp, Artificial Sequence
  derived and/or modified sequence
atgcacaacatccggggcaacaagcaggcccagggcaccggccacgaacctccaggagaagattctccccaatccggggaaccccagcgggaagaacagccattggcttccgatgcaagtaccccaggaagggagcccgaggactcacctaaacctgcaccaaagcccagccttactatatcctttgcgcagaaggccaagcgacagaacaacaccttcccattcttctccgaaggtatcacacgtaatagaactgctcaggaaaaggtagcggcccttgagcagcaggttttaatgctgaccaaggagctaaaaagtcaaaaagaactggtgaagatactgcacaaagcgttggaagcagcccagcaggaaaagagagcctcttcagcataccttgctgcagccgaggataaagatcgcctcgagctggtccggcataaggtgagacaaatagccgaactgggaaggcgggttgaggctctggaacaagaacgtgaaagcctggcccatacagcaagtctcagagaacagcaggtgcaggaacttcagcaacatgtgcagttactgatggacaagaaccatgccaaacagcaggtgatctgcaaactatctgagaaagtaacccaggacttcacccaccctcccgatcagtctccactgcgccccgatgcagcaaaccgagatttcttatcccagcagggcaagatcgaacacttgaaagacgacatggaggcatacaggacacaaaattgtttcctgaattcagagatccaccaggtgacaaaaatctggcgcaaggtggctgagaaggaaaaggctctcttgaccaaatgtgcatatcttcaggcccggaactgccaggtggagtcgaagtatctggccggactccgccgtttgcaagaagccctgggagatgaggcatcagaatgttcagagctgttgcgccagttagtgcaggaagcattacagtgggaagccggcgaagcctcatccgacagcatcgagttgtcccccatcagtaagtatgacgagtacgggtttctgacagtccctgactatgaggttgaagaccttaaactcctggccaaaatacaggcccttgagagccggtcacatcacttgttgggactggaggccgttgatagacctctgagggaaagatgggctgccctcggcgacctcgttccgtctgccgagctgaagcagcttctgagggccggagttcctcgggagcaccggccccgtgtatggcgctggctagttcatcttcgcgtacaacacttacacactcctggctgctatcaggagctgttaagccgtggacaggcaagggagcatccagccgcacgccagatcgagttagatctgaataggacgttcccaaataacaagcatttcacttgtccgacatcctccttccctgacaagctgcgacgggtgctgttggccttctcctggcagaaccccacaattggatactgtcaaggtctgaatcggctggccgcgatcgcactgctggtgctcgaagaggaagaatctgcattctggtgtttggtcgcgatcgtggaaacaatcatgcctgctgattactactgtaatacgttgacagcctcccaggtcgaccaaagagtgctgcaagacctcctgtcagaaaagctgcctagacttatggcccacctggggcagcaccatgtcgacttgagtctggttaccttcaactggttcttggtcgtgtttgcagattctcttatttcaaacatcctactacgggtgtgggacgccttcttatacgaaggaaccaaggtagtgtttcggtacgccctggccatctttaaatacaacgagaaagagatcttaaggctgcagaatggcctagaaatctatcagtacctgcgcttcttcactaaaacaatttctaacagtagaaagctcatgaatatcgccttcaatgatatgaatccatttcggatgaagcagcttagacagctgcgaatggtccacagggaacgtttggaagcggagctgcgcgaactcgagcagctaaaggcggaatatttggagcgcagggcctcacgcagacgcgccgtgtccgaaggatgtgcttccgaggatgaagtcgaaggagaggcatag

SEQ ID NO: 94543 - DNA, 2583 bp, Artificial Sequence
  derived and/or modified sequence
atggagggcgccggcgagaacgcccccgagagcagcagcagcgcccccggcagcgaggagtctgcccgtgacccccaagtgccacccccggaagaggaaagcggggactgcgcccgtagccttgaggccgtgcctaagaaactctgcggttacctgagcaaattcggcgggaaggggcctattcgggggtggaagagtagatggttcttctacgatgaaagaaagtgccagctgtactattcacggactgcacaggatgccaatcccttggactcaattgacttgtctagcgccgtattcgactgcaaggcagacgcggaggagggcatattcgagattaaaacccccagcagggtcatcacactcaaagccgccactaagcaagcgatgctgtactggttgcaacagttacagatgaaaagatgggagttccataactctccaccagctcctccagcgacacctgacgccgcactcgctgggaacgggcccgtgctgcatctggaacttggtcaagaagaagcggagctggaggagttcctatgtccagtgaaaaccccgccgggccttgtgggcgtggctgctgccttacaaccattcccagctctacaaaacatctccctgaagcatctagggacagagatacagaataccatgcataacattagaggaaacaagcaagctcaaggcaccgggcacgaacccccaggggaggactcgcctcagtcaggagagccacagagggaggagcagcctctcgcttccgatgcgtccaccccaggccgggagccagaagactccccaaagcctgctccaaaaccaagtctcacaatctcctttgcccaaaaagccaagcgccagaacaacactttccccttcttttccgaaggcatcacccgtaaccggactgcgcaggaaaaggtggcggccctagagcagcaggtgctgatgctgaccaaagaattgaagagccagaaagaactggtcaaaatcctgcataaggcattagaggccgcccagcaggagaaaagagcctccagtgcctatcttgcagccgcagaagacaaggaccggctggagctggttagacacaaggtccggcaaatcgccgaactggggagacgagttgaggccttagagcaggagagggagagcttggcgcacacggccagcctcagggagcagcaagttcaggagctccagcagcatgttcagctgttgatggataagaaccacgctaagcagcaggtgatctgcaagctgtcagagaaagtgacacaagactttacccacccgccagatcagtcacccctccggccggatgcagctaacagagactttttaagccagcagggtaagatcgagcacctgaaggatgatatggaagcctaccgtactcagaattgctttctcaacagcgaaatccatcaagtgacaaagatttggagaaaagtggccgaaaaagagaaagccctcttgaccaaatgcgcttatctacaggcacggaattgccaggtggagtctaagtacctcgccggtctccggagacttcaagaggccctgggcgatgaagcttctgagtgtagcgaactgctacggcagcttgtacaggaagccttgcaatgggaagcaggggaagctagcagcgattccattgagctgtctcccattagtaagtacgacgagtacgggttcttgacagtcccagattacgaggtggaggacttaaagctactggccaaaatccaggcacttgaatcacgatcacaccacttgctgggcttagaagctgtcgacagacccctgcgcgaaaggtgggctgccctgggcgatttagttccatctgccgagttaaagcagctgctgagagccggggtaccgagggaacaccgcccgcgggtctggcgctggctggtgcatttgcgggtgcagcacctgcacacgcccgggtgctaccaggagctgttgagcaggggccaggccagagaacacccagccgctagacaaatcgaattagacttgaacagaacgtttccaaacaacaagcactttacatgccctaccagttcatttcccgataagctgaggcgtgttttactcgccttttcttggcagaaccccaccattggctattgccaggggctgaataggctagccgcgatagccctgctggtgctcgaggaggaggagagcgcattctggtgcttagtggctatcgtagagacaatcatgccagctgactattactgcaatacactgactgctagccaggtcgatcagcgggtcctgcaggacttgctctcagagaagttgccccgtttaatggcgcatctaggacaacatcatgtggaccttagcctcgtgacatttaactggttcctggttgtgttcgcggatagtctgattagcaacatcctgttacgggtatgggatgccttcctgtacgagggtaccaaggtcgtctttagatatgcactggccatcttcaagtataatgagaaagaaatcctgcggctgcagaacggtctggagatttaccaatatctgcgcttctttactaaaaccatctccaactcaaggtag

SEQ ID NO: 94544 - DNA, 2133 bp, Artificial Sequence
  derived and/or modified sequence
atgcacaacatacggggtaataagcaggctcagggcaccggccacgagcctcccggagaggactccccccagagcggcgaaccacagcgcgaagagcagccgctcgcatctgatgcaagtacccccggaagagagcccgaggattcccctaaacctgcccctaaaccttccctgacaatcagctttgctcagaaagctaaaaggcagaacaacaccttccccttcttttcagagggcataacgcgcaaccgcacagcccaggagaaggttgccgcactggaacagcaagttctaatgcttacaaaggagctcaagagtcagaaggagctcgttaaaattctgcataaggcactggaagccgctcagcaggagaagagggcttcgtccgcgtatcttgcagcagccgaagacaaggaccgtttggagctggtgcggcacaaagtgcggcagatagccgagctggggagaagggtggaggcccttgaacaggaacgggagtcgctggctcatactgcgagcttgagagagcagcaggtccaggaactgcaacagcatgtccaactgttgatggacaaaaatcatgcaaagcaacaggttatatgcaagcttagtgagaaggtcacacaggattttacacatccgcctgatcaatcaccactgagacccgatgctgctaacagggatttcctctcccaacaaggcaaaatcgagcacttaaaggatgacatggaagcctaccgaacacagaattgcttcctgaactcagagatccaccaggtgaccaagatttggcggaaggtggccgagaaggagaaagccttattgaccaagtgcgcgtacctacaagctaggaactgccaggtggaatccaagtaccttgctggcctcaggcgcctacaagaggcactgggagacgaggcatctgagtgttccgaactgctccggcagctcgtacaagaagctctgcagtgggaggcgggtgaagcgagttctgacagcattgagttgtcgccaatcagcaagtatgatgagtacggttttctgacagttcccgattatgaggtcgaagatcttaagctgctggccaagattcaggcgttggagtctagaagtcaccacctcctggggttggaagcggttgatcgtcctctgagggagaggtgggcggctctcggcgacctggtcccttcagcagaattaaaacagcttctgagggctggagtgccacgtgaacataggcctcgtgtgtggcgatggttggtgcacctcagagtgcagcaccttcacacgccaggctgttatcaagagctactatcaaggggccaggcacgcgaacatcccgcagccagacaaattgagcttgacttaaataggacatttcccaataataagcacttcacttgcccgacaagtagcttccctgacaagctacgtcgcgttttattggccttttcctggcagaatccaacaatcgggtactgccaagggctgaacaggctggctgcaattgctttactcgtgctggaggaggaagagtcggcattttggtgcctggtggccattgtggagaccatcatgccggctgactattattgcaacactctcacggcatcccaggttgaccagcgagttttacaggacttactgtctgagaagttgcccagacttatggctcatttaggccagcaccatgtggacttgtcactggtgacatttaactggttcttagtcgtattcgctgactctcttatcagcaacatcctgctgcgtgtgtgggatgccttcttgtacgaaggaaccaaggtggtattcaggtacgccctcgcgatttttaaatataatgagaaggagatcctgcgcctacagaacggactcgagatttaccaatatctaagattcttcaccaagactatctcaaattcgcggaaactgatgaatatcgcattcaacgatatgaacccttttcgcatgaagcagctgcgccaactgcgtatggtacatcgcgaacggctggaagccgaactgagagagttggaacagcttaaagcagagtacctagaacgtcgggcatcccggaggcgagctgtttccgagggatgtgcctcggaagacgaagtcgaaggcgaagcgtag

SEQ ID NO: 94545 - DNA, 2583 bp, Artificial Sequence
  derived and/or modified sequence
atggaaggagctggagaaaacgccccagaaagctcttcttcagctcccggatctgaagagagcgccagagatcctcaggtccctccacccgaggaggagtccggagattgcgcaagatcacttgaagccgtcccaaagaaactttgcgggtacctttctaagttcgggggaaaaggccctattagaggctggaagtcgcgctggttcttttatgacgaaagaaaatgtcagctatattactcaagaactgcccaggacgcgaacccactggattccattgaccttagcagcgccgtgtttgattgtaaagcagatgcagaggaaggaatttttgagatcaagactcctagccgcgtgattaccctgaaggccgcaacgaaacaggctatgctttactggctgcagcagcttcaaatgaagcgatgggaattccataactcccctcctgctcccccagctactccagatgccgcactcgccggtaatggacccgtcctgcatctagagctgggacaggaggaagccgagctggaagaatttctttgccccgtgaagacgccaccaggcctcgtcggggtcgccgcagctctgcagcctttcccggcactccagaatatatcccttaaacatctgggaaccgagatccaaaatactatgcacaacatcaggggtaacaagcaggcacaaggaactggccacgagccgcctggagaggacagcccacagagcggggagccgcagcgagaagagcagcccctggcctctgacgcaagtaccccgggacgcgagcccgaggactctccaaagcctgccccaaaaccatctctgactatttcttttgcccagaaagctaagagacagaataacacatttccattcttcagcgagggtattacccggaacaggacagcacaggagaaggttgccgctctggagcagcaggtgcttatgctgactaaggaactgaaatctcagaaagaactggtgaaaatacttcacaaggcccttgaggccgcacagcaagaaaaacgggcaagcagtgcatacctggcagctgcggaggataaggatagactggagctggttcggcataaggtgagacagatagctgaattaggacggagagtcgaggcacttgagcaagagcgggagagccttgcccacaccgcaagtctgcgcgagcagcaggtgcaggaactgcagcagcatgttcagttgttaatggacaaaaatcacgccaaacagcaggtcatctgcaaactgagcgagaaagttacacaggactttacccacccgcctgaccagagccccctgcgccctgacgccgctaaccgggacttcctgtctcagcagggtaagatcgagcaccttaaggacgacatggaggcctatcgtacacaaaactgttttttgaacagcgagatccaccaggtgacaaagatctggagaaaagtcgccgagaaagagaaggcgcttttgactaagtgcgcttatctgcaggctcggaactgtcaggtggagagcaagtatcttgctggtttgcgtcgacttcaagaggcactgggcgacgaagcttccgaatgctctgagttgctgcgtcagttagtacaagaagccctgcagtgggaagcgggagaggcctccagcgattccattgagctgtctcccatctcgaagtacgacgagtacggatttctgacagtccctgactatgaggtggaggatctgaaactgctggcgaagatccaggccctggagtcccggtcccaccatctgcttggattggaggctgtggaccgtccgcttcgagaaagatgggcagccctcggagatctggtgccatccgctgaactgaagcagctgctgagggctggcgttcctagggaacaccggcctcgcgtgtggaggtggctggttcacctgagggttcagcatctgcacacaccgggttgttaccaggagctgctctcccgcggtcaggcccgagagcatcctgctgccaggcagatcgaactggacctgaatagaaccttccccaataacaagcactttacctgtccaacttcaagctttccagataagctgcgcagggttctactcgccttcagctggcagaatccaaccattggctactgtcaggggctgaatcgtctggccgctatagccctgctggttctggaggaggaagagtctgctttttggtgccttgttgcgatcgttgaaacgattatgcccgcagattactattgcaatacccttacagccagccaggttgatcagagggtactgcaagatttactttctgagaaattaccccgactcatggctcacctcggccagcaccatgtcgatctgtctctcgttactttcaattggttcctcgtggtgtttgcagattccttgatctccaatatactgctgcgagtctgggatgcgtttctgtatgaggggactaaggtcgtgtttcggtatgccctcgcaatcttcaagtataatgaaaaagaaatcctaaggctccagaacgggttggagatctatcagtatttgcgtttttttacaaagacgatcagtaattctagatag

SEQ ID NO: 94546 - DNA, 3046 bp, Artificial Sequence
  derived and/or modified sequence
tggtggtcccgcggacccctcgtccctccgcagtctccggctggcagcgatggagggcgctggggagaacgccccggagtccagctcctctgcccctgggtccgaagagtctgccagggatccacaggtgccgcctccggaggaagaatcgggggactgcgcccggtccctggaggcggtccccaagaaactctgtgggtatttaagtaagttcggcggcaaagggcccatccggggctggaaatcccgctggttcttctacgacgaaaggaaatgtcagctgtattactcgcggaccgctcaggatgccaatcccttggacagcatcgacctctccagtgcagtgtttgactgtaaggcggacgctgaggaggggatcttcgaaatcaagactcccagccgggttattaccctgaagggcaagaagaggcagagctggaggagttcctgtgccctgtgaaaacaccccctgggctagtgggcgtggcagctgccttgcagcccttccctgcccttcagaatatttccctcaagcacctggggactgaaatacagaacacaatgcacaacatccgtggcaacaagcaggcccagggaacaggccatgaacctccaggggaagattctccacagagtggggagcctcagagggaggagcagcccttggcctctgacgccagcaccccagggagagagccagaggattctccaaagcctgcacccaagccttctctgaccatcagtttcgctcagaaagccaagcgccagaacaacaccttcccattcttttctgaaggaatcacacggaaccgaactgcccaggagaaagtggcagccttggagcaacaggttctgatgctcaccaaggagttaaagtctcagaaggagctagtgaagatcctgcacaaggcactggaggccgcccagcaggagaagcgggcgtccagcgcatacctggcggcggctgaggacaaggaccggctggagctggtgcggcacaaagtgcggcagatcgcggagctgggccggcgggtggaggccctggagcaggagcgggagagcctggcgcacacagcgagcctgcgggagcagcaggtgcaggagctacagcagcacgtgcagctgcttatggacaagaaccacgccaagcagcaggtcatctgcaagctctctgagaaggtcacccaggacttcacgcacccccctgaccagtctcctttgcgccccgacgctgccaacagggacttcctgagccagcaggggaagatagagcacctgaaggatgacatggaagcttaccggacccagaactgcttcctcaactccgagatccaccaggtcacaaagatctggagaaaggtggctgagaaggagaaggcccttctgacgaagtgcgcctacctccaagccagaaactgccaggtggaaagcaagtacctggccggtctgagaaggctgcaggaggccctgggggacgaagccagcgagtgctcagagctgctgaggcagcttgtccaggaggcactgcagtgggaagctggggaggcctcatctgacagcatcgagctgagccccatcagtaagtatgatgagtacggcttcctgacggtgcccgactatgaggtggaagacctgaagctgctggccaagatccaggcattggagtcacgatcccaccacctgctgggcctcgaggctgtggatcggccgctgagggagcgctgggctgccctgggcgatcttgtgccctcagccgagctcaagcagctactgcgggcaggagtaccccgtgaacaccggcctcgtgtctggaggtggctggtccacctccgtgtccagcacctgcacactccaggctgctaccaggaactgctgagccggggccaggcccgcgagcaccctgctgcccgccagattgagctggacctgaaccggaccttccccaacaacaaacacttcacctgccccacctccagcttccccgacaagctccgccgggtgctgctggccttctcctggcagaaccccaccatcggctactgccagggcctgaacaggctggcggccattgccctgctggtcctagaggaggaggagagcgccttctggtgcctggtggccattgtggagaccatcatgcccgctgattactactgcaacacgctgacggcatcccaggtggaccagcgggtgctccaggacctgctctcggagaagctgcccaggctgatggcccatctggggcagcaccacgtggatctctccctcgtcaccttcaactggttcctcgtggtctttgcggacagtctcattagcaacatcctccttcgggtctgggatgccttcctgtacgaggggacgaaggtggtgtttcgctatgccttggccattttcaagtacaacgagaaggagatcttgaggctacagaatggcctggaaatctaccagtacctgcgcttcttcaccaagaccatctccaacagccggaagctgatgaacatcgccttcaatgacatgaaccccttccgcatgaaacagctgcggcagctgcgcatggtccaccgggagcggctggaggctgagctgcgggagctggagcagcttaaggcagagtacctggagaggcgggcatcccggcgcagagctgtgtccgagggctgtgccagcgaggacgaggtggagggggaagcctgacttggccacctcccctccccacagccttcctcacccttggctggcagacccactggaggtcaggcacggaccagtggcccagccctgggtgtcccatcaccatgtgaccttggacatgtcccttcccctctctggccctcagtttccccactgggacattgtgtgctgcaaagccattggttgggctacttcttcataggcacttacttacccagggatgccaccctttcgtcacctcttccacagagcactttggcatgtaaacaagcaagagcactgcctctatagggtaacctggaacattctctaggttatatcaatataaaacaatgtaaatggtggaaatcattca

SEQ ID NO: 94547 - DNA, 3174 bp, Artificial Sequence
  derived and/or modified sequence
gcggacccctcgtccctccgcagtctccggctggcagcgatggagggcgctggggagaacgccccggagtccagctcctctgcccctgggtccgaagagtctgccagggatccacaggtgccgcctccggaggaagaatcgggggactgcgcccggtccctggaggcggtccccaagaaactctgtgggtatttaagtaagttcggcggcaaagggcccatccggggctggaaatcccgctggttcttctacgacgaaaggaaatgtcagctgtattactcgcggaccgctcaggatgccaatcccttggacagcatcgacctctccagtgcagtgtttgactgtaaggcggacgctgaggaggggatcttcgaaatcaagactcccagccgggttattaccctgaaggccgccaccaagcaagcgatgctgtactggctgcagcagctgcagatgaagcgctgggaattccacaacagcccgccggcacctcctgccacccctgatgccgccctggctgggaatgggcccgtcctgcacctcgagctagggcaagaagaggcagagctggaggagttcctgtgccctgtgaaaacaccccctgggctagtgggcgtggcagctgccttgcagcccttccctgcccttcagaatatttccctcaagcacctggggactgaaatacagaacacaatgcacaacatccgtggcaacaagcaggcccagggaacaggccatgaacctccaggggaagattctccacagagtggggagcctcagagggaggagcagcccttggcctctgacgccagcaccccagggagagagccagaggattctccaaagcctgcacccaagccttctctgaccatcagtttcgctcagaaagccaagcgccagaacaacaccttcccattcttttctgaaggaatcacacggaaccgaactgcccaggagaaagtggcagccttggagcaacaggttctgatgctcaccaaggagttaaagtctcagaaggagctagtgaagatcctgcacaaggcactggaggccgcccagcaggagaagcgggcgtccagcgcatacctggcggcggctgaggacaaggaccggctggagctggtgcggcacaaagtgcggcagatcgcggagctgggccggcgggtggaggccctggagcaggagcgggagagcctggcgcacacagcgagcctgcgggagcagcaggtgcaggagctacagcagcacgtgcagctgcttatggacaagaaccacgccaagcagcaggtcatctgcaagctctctgagaaggtcacccaggacttcacgcacccccctgaccagtctcctttgcgccccgacgctgccaacagggacttcctgagccagcaggggaagatagagcacctgaaggatgacatggaagcttaccggacccagaactgcttcctcaactccgagatccaccaggtcacaaagatctggagaaaggtggctgagaaggagaaggcccttctgacgaagtgcgcctacctccaagccagaaactgccaggtggaaagcaagtacctggccggtctgagaaggctgcaggaggccctgggggacgaagccagcgagtgctcagagctgctgaggcagcttgtccaggaggcactgcagtgggaagctggggaggcctcatctgacagcatcgagctgagccccatcagtaagtatgatgagtacggcttcctgacggtgcccgactatgaggtggaagacctgaagctgctggccaagatccaggcattggagtcacgatcccaccacctgctgggcctcgaggctgtggatcggccgctgagggagcgctgggctgccctgggcgatcttgtgccctcagccgagctcaagcagctactgcgggcaggagtaccccgtgaacaccggcctcgtgtctggaggtggctggtccacctccgtgtccagcacctgcacactccaggctgctaccaggaactgctgagccggggccaggcccgcgagcaccctgctgcccgccagattgagctggacctgaaccggaccttccccaacaacaaacacttcacctgccccacctccagcttccccgacaagctccgccgggtgctgctggccttctcctggcagaaccccaccatcggctactgccagggcctgaacaggctggcggccattgccctgctggtcctagaggaggaggagagcgccttctggtgcctggtggccattgtggagaccatcatgcccgctgattactactgcaacacgctgacggcatcccaggtggaccagcgggtgctccaggacctgctctcggagaagctgcccaggctgatggcccatctggggcagcaccacgtggatctctccctcgtcaccttcaactggttcctcgtggtctttgcggacagtctcattagcaacatcctccttcgggtctgggatgccttcctgtacgaggggacgaaggtggtgtttcgctatgccttggccattttcaagtacaacgagaaggagatcttgaggctacagaatggcctggaaatctaccagtacctgcgcttcttcaccaagaccatctccaacagccgctgatgaacatcgccttcaatgacatgaaccccttccgcatgaaacagctgcggcagctgcgcatggtccaccgggagcggctggaggctgagctgcgggagctggagcagcttaaggcagagtacctggagaggcgggcatcccggcgcagagctgtgtccgagggctgtgccagcgaggacgaggtggagggggaagcctgacttggccacctcccctccccacagccttcctcacccttggctggcagacccactggaggtcaggcacggaccagtggcccagccctgggtgtcccatcaccatgtgaccttggacatgtcccttcccctctctggccctcagtttccccactgggacattgtgtgctgcaaagccattggttgggctacttcttcataggcacttacttacccagggatgccaccctttcgtcacctcttccacagagcactttggcatgtaaacaagcaagagcactgcctctatagggtaacctggaacattctctaggttatatcaatataaaacaatgtaaatggtggaaatcattca

SEQ ID NO: 94548 - DNA, 1407 bp, Artificial Sequence
  derived and/or modified sequence
atggaggcctacagaacccagaactgcttcctgaacagcgagatccaccaggtgaccaagatctggagaaaggtggccgagaaggagaaggccctgctgaccaagtgcgcctacctgcaggccagaaactgccaggtggagagcaagtacctggccggcctgagaagactgcaggaggccctgggcgacgaggccagcgagtgcagcgagctgctgagacagctggtgcaggaggccctgcagtgggaggccggcgaggccagcagcgacagcatcgagctgagccccatcagcaagtacgacgagtacggcttcctgaccgtgcccgactacgaggtggaggacctgaagctgctggccaagatccaggccctggagagcagaagccaccacctgctgggcctggaggccgtggacagacccctgagagagagatgggccgccctgggcgacctggtgcccagcgccgagctgaagcagctgctgagagccggcgtgcccagagagcacagacccagagtgtggagatggctggtgcacctgagagtgcagcacctgcacacccccggctgctaccaggagctgctgagcagaggccaggccagagagcaccccgccgccagacagatcgagctggacctgaacagaaccttccccaacaacaagcacttcacctgccccaccagcagcttccccgacaagctgagaagagtgctgctggccttcagctggcagaaccccaccatcggctactgccagggcctgaacagactggccgccatcgccctgctggtgctggaggaggaggagagcgccttctggtgcctggtggccatcgtggagaccatcatgcccgccgactactactgcaacaccctgaccgccagccaggtggaccagagagtgctgcaggacctgctgagcgagaagctgcccagactgatggcccacctgggccagcaccacgtggacctgagcctggtgaccttcaactggttcctggtggtgttcgccgacagcctgatcagcaacatcctgctgagagtgtgggacgccttcctgtacgagggcaccaaggtggtgttcagatacgccctggccatcttcaagtacaacgagaaggagatcctgagactgcagaacggcctggagatctaccagtacctgagattcttcaccaagaccatcagcaacagcagaaagctgatgaacatcgccttcaacgacatgaaccccttcagaatgaagcagctgagacagctgagaatggtgcacagagagagactggaggccgagctgagagagctggagcagctgaaggccgagtacctggagagaagagccagcagaagaagagccgtgagcgagggctgcgccagcgaggacgaggtggagggcgaggcctag

SEQ ID NO: 94549 - DNA, 1407 bp, Artificial Sequence
  derived and/or modified sequence
atggaggcctaccgcacccaaaattgcttcctgaattcggaaattcatcaggttactaaaatttggcgaaaagtagctgagaaagagaaggctcttcttaccaaatgcgcatacctgcaggctaggaattgccaggtggagtcaaaatatctcgccgggctgcggagactacaggaagcgctgggagacgaggcttccgagtgcagtgaactgcttaggcagctggtgcaggaggctctgcagtgggaagccggcgaagctagcagcgattctatcgaactttcccccatcagcaaatatgacgaatatgggtttcttacagtgcccgactatgaagtcgaagatttgaagttgttagccaaaattcaggccctggagtcacggtctcaccatctattgggtttggaggctgttgacagacccctcagggagcgttgggcggcgctgggcgacctcgtccccagcgctgaattgaagcaactgcttcgcgccggggtgccccgggaacaccggccccgcgtgtggcgttggcttgtgcatcttagagtgcagcatctccatacgcctggatgctaccaagaactgctgagcagaggccaggctcgggaacatccggccgcacgtcaaattgaactggatctcaatcgaacttttcccaataataaacatttcacttgtcccactagttctttccccgataaactcagacgagtactgctggcattctcatggcagaaccctaccatcggatactgtcagggcctgaatcggcttgctgcaatagccctgcttgttcttgaagaggaagagagcgctttttggtgccttgtcgccattgtggaaactatcatgccggcagactactactgcaacacattaactgcttcccaagttgatcagcgcgttttacaggatctgctttcagagaaactgccaagattgatggcccaccttggccagcatcatgtagacctgtctctggtgaccttcaactggttcctagtagtttttgccgattctctgatctcaaatatcttactgcgcgtgtgggacgccttcctctatgagggcacaaaagtggtctttagatacgcactggcgatattcaagtataatgagaaagagattttacggctgcagaatgggctggaaatctatcagtacctccggttttttacaaaaaccatctctaattcgcggaagctgatgaacattgccttcaatgacatgaatccctttagaatgaagcaactgagacaattacggatggtgcacagagaacgccttgaagctgaactgcgggaactcgagcagctgaaggcagagtacctggagcggcgggcaagccggcggcgcgcagtctccgagggctgtgcctctgaggatgaagtggaaggcgaggcctag

SEQ ID NO: 94550 - DNA, 1407 bp, Artificial Sequence
  derived and/or modified sequence
atggaggcctaccgcacccagaactgcttcctgaacagcgagatccaccaggtgaccaagatctggaggaaggtggccgagaaggagaaggccctgctgaccaagtgtgcctacctgcaggccaggaactgccaggtggagagcaagtacctggccggcctgcggcggctgcaggaggccctgggagatgaggcctctgaatgttctgagctgctgcggcagctggtgcaggaggccctgcagtgggaggccggggaggccagcagtgacagcattgagctgagccccatcagcaaatatgatgaatatggcttcctgactgtgcctgactatgaggtggaggacctgaagctgctggccaagatccaggccctggagagccgcagccaccacctgctgggcctggaggccgtggaccggcccctgcgggagcgctgggccgccctgggggacctggtgcccagcgctgagctgaagcagctgctgcgggccggcgtgccccgggagcaccggccccgggtgtggcgctggctggtgcacctgcgggtgcagcacctgcacaccccaggctgctaccaggagctgctgagccggggccaggcccgggagcaccctgctgcccggcagatcgagctggacctgaacagaaccttccccaacaacaagcacttcacctgccccaccagcagcttcccagacaagctgcggcgggtgctgctggccttctcctggcagaaccccaccatcggctactgccagggcctgaaccggctggccgccatcgccctgctggtgctggaggaggaggagagcgccttctggtgcctggtggccatcgtggagaccatcatgcctgctgactactactgcaacaccctgacagccagccaggtggaccagagggtgctgcaggacctgctgtctgagaagctgccccggctgatggcccacctgggccagcaccacgtggacctgagcctggtgaccttcaactggttcctggtggtgtttgctgacagcctcatcagcaacatcctgctgcgggtgtgggatgccttcctgtatgagggcaccaaggtggtgttccgctatgccctggccatcttcaagtacaatgagaaggagatcctgcggctgcagaatggcctggagatctaccagtacctgcgcttcttcaccaagaccatcagcaacagcaggaagctgatgaacatcgccttcaatgacatgaaccccttcaggatgaagcagctgcggcagctgaggatggtgcaccgggagcggctggaggccgagctgcgggagctggagcagctgaaggccgagtacctggagcggcgggccagcagaagaagagctgtgtctgagggctgtgcctctgaagatgaggtggagggggaggcctag

SEQ ID NO: 94551 - DNA, 1407 bp, Artificial Sequence
  derived and/or modified sequence
atggaggcctaccggacccagaactgcttcctgaacagcgagatccatcaggtcacgaagatctggagaaaagtagctgagaaggagaaagcccttctgacaaagtgcgcttacctgcaggcacgcaattgtcaggttgagagcaagtaccttgccggattgcgaaggctgcaggaagcattgggagacgaggcttctgaatgttccgaattacttcgccagcttgtacaggaagctctgcagtgggaggctggggaagcatcttcagactccattgagttgtcacccataagcaaatatgatgaatacggatttcttaccgttcctgactacgaggtggaagatcttaagctgctggccaaaatccaagcactcgagtcaaggtcacatcatctgctgggtctcgaggccgtggataggccacttagggagagatgggccgccctgggtgacctggtgccatctgccgagctgaagcagttgctccgcgccggcgtgcctcgggaacaccgtccccgggtgtggaggtggctcgtccaccttcgggtgcagcacttgcataccccagggtgttatcaagagttgctgagtcgcggccaggctcgggagcatccagccgcccgccagatcgagctcgacctgaacagaacctttccgaacaataagcacttcacatgcccgaccagctcatttccggacaaattgcgtcgggttttgctcgcctttagttggcagaatcctacaattgggtactgtcaaggcctcaacaggctggccgctatagctctgttggtccttgaagaggaggaatctgctttctggtgccttgtggcgattgtggaaactattatgccggccgattactattgtaacacacttacagcctctcaggtggatcaaagagtactgcaggaccttctgtccgaaaagctcccccggcttatggcacatctgggtcagcaccatgttgacttgtccttggttacttttaactggttcctggtggtgttcgctgactctctaatttcgaacatccttttgcgcgtttgggatgccttcctctatgagggtaccaaggtcgtcttccgttatgcactagccattttcaaatacaacgagaaagagatcctgagattgcaaaatgggctggagatttaccagtatctccggtttttcacgaaaaccattagtaactcacgaaagctgatgaacatagcattcaatgacatgaatccgttcaggatgaagcagcttcgccagttacgaatggtgcatagggagcgcctagaagccgaactacgggagttagagcaactcaaagcagagtatcttgagcgccgggccagtcgcaggagagcagtatctgaaggttgcgcctccgaggatgaggttgagggagaggcttag

SEQ ID NO: 94552 - DNA, 1407 bp, Artificial Sequence
  derived and/or modified sequence
atggaggcttacagaacgcaaaattgttttctgaacagcgagatacaccaggtcaccaaaatttggcggaaggttgccgagaaggaaaaggctctgctgacgaaatgcgcctacctccaagccaggaattgccaggtggaatcgaagtatctcgccggtctgagaaggcttcaggaagcactgggggatgaggcatcagagtgtagtgagctgctgagacagctagtgcaggaagccttacagtgggaggcaggcgaggcaagcagcgactctatcgagttgtcgcctatctctaagtacgatgaatacggttttcttacggtaccggactacgaagtcgaagacctaaagctattggccaaaatacaggcactggagtcgcgcagtcaccacttgcttggactcgaggccgtggacagaccgctccgtgagagatgggccgcactgggggacctcgtgccttccgcagaactgaagcagcttctgcgagccggagtgcccagggagcataggcctcgagtctggcgatggctagtgcacctgagagtgcaacacttgcatacgccagggtgctatcaggagctgttgtcccgcggacaggctcgagagcatccagcggctagacagattgaactggacctgaaccgaactttcccaaataataagcactttacatgccccaccagctcttttccagataagctgagacgggtgcttctggcattttcttggcaaaaccccaccatcgggtactgtcagggactcaatagactcgcagccatcgcactgctggtcctggaagaagaggaaagcgcattctggtgcttggtggccatcgtggaaacaataatgcccgctgattactattgcaacactctgacggcgtctcaggtcgaccagagggtcctgcaagacctgctgtcggaaaaattgcctaggcttatggcccatctcgggcaacaccacgtggacctgtcactggtaacttttaattggttcttggtcgtgttcgctgactccctgatctcaaacatcctactgagggtctgggatgcattcctctacgagggcacgaaggttgtcttcagatatgccttggccattttcaaatataatgaaaaagaaattctgcgactgcagaacggattagagatttatcagtacctcagattttttactaaaaccatttctaattcacggaaactgatgaacatagcctttaatgacatgaacccctttagaatgaagcagctgaggcagctgcggatggtgcaccgggaacgcctggaggccgaactccgcgagctggaacagctcaaagcagaatacctcgaaaggagagctagccgacgtagagccgtttccgaggggtgcgcatccgaagatgaggtggaaggggaagcatag

SEQ ID NO: 94553 - DNA, 2097 bp, Artificial Sequence
  derived and/or modified sequence
aactgcccagtaggttagttggtatttgccccttttacagatgaggaaacagagggtcagagtggttcagtggcctgcctgaggccttccagccagaacatcagccaggacttaaattcagacctactggtccctttaccacatcatgctgacatcaagaatagagaagggtgctatgagtattttatttttctttcagacttcctcttctgttgccattattggaaatttctaaggaaaagaagctttgggggctcatttgagggtgtgactccccaggaccagggagatgtttatgtccaactgataacatattttactctcttctccaggatgacatggaagcttaccggacccagaactgcttcctcaactccgagatccaccaggtcacaaagatctggagaaaggtggctgagaaggagaaggcccttctgacgaagtgcgcctacctccaagccagaaactgccaggtggaaagcaagtacctggccggtctgagaaggctgcaggaggccctgggggacgaagccagcgagtgctcagagctgctgaggcagcttgtccaggaggcactgcagtgggaagctggggaggcctcatctgacagcatcgagctgagccccatcagtaagtatgatgagtacggcttcctgacggtgcccgactatgaggtggaagacctgaagctgctggccaagatccaggcattggagtcacgatcccaccacctgctgggcctcgaggctgtggatcggccgctgagggagcgctgggctgccctgggcgatcttgtgccctcagccgagctcaagcagctactgcgggcaggagtaccccgtgaacaccggcctcgtgtctggaggtggctggtccacctccgtgtccagcacctgcacactccaggctgctaccaggaactgctgagccggggccaggcccgcgagcaccctgctgcccgccagattgagctggacctgaaccggaccttccccaacaacaaacacttcacctgccccacctccagcttccccgacaagctccgccgggtgctgctggccttctcctggcagaaccccaccatcggctactgccagggcctgaacaggctggcggccattgccctgctggtcctagaggaggaggagagcgccttctggtgcctggtggccattgtggagaccatcatgcccgctgattactactgcaacacgctgacggcatcccaggtggaccagcgggtgctccaggacctgctctcggagaagctgcccaggctgatggcccatctggggcagcaccacgtggatctctccctcgtcaccttcaactggttcctcgtggtctttgcggacagtctcattagcaacatcctccttcgggtctgggatgccttcctgtacgaggggacgaaggtggtgtttcgctatgccttggccattttcaagtacaacgagaaggagatcttgaggctacagaatggcctggaaatctaccagtacctgcgcttcttcaccaagaccatctccaacagccggaagctgatgaacatcgccttcaatgacatgaaccccttccgcatgaaacagctgcggcagctgcgcatggtccaccgggagcggctggaggctgagctgcgggagctggagcagcttaaggcagagtacctggagaggcgggcatcccggcgcagagctgtgtccgagggctgtgccagcgaggacgaggtggagggggaagcctgacttggccacctcccctccccacagccttcctcacccttggctggcagacccactggaggtcaggcacggaccagtggcccagccctgggtgtcccatcaccatgtgaccttggacatgtcccttcccctctctggccctcagtttccccactgggacattgtgtgctgcaaagccattggttgggctacttcttcataggcacttacttacccagggatgccaccctttcgtcacctcttccacagagcactttggcatgtaaacaagcaagagcactgcctctatagggtaacctggaacattctctaggttatatcaatataaaacaatgtaaatggtggaaatcattca

SEQ ID NO: 94554 - protein, 913 aa, Artificial Sequence
  derived and/or modified sequence
MSRFFTTGSDSESESSLSGEELVTKPVGGNYGKQPLLLSEDEEDTKRVVRSAKDKRFEELTNLIRTIRNAMKIRDVTKCLEEFELLGKAYGKAKSIVDKEGVPRFYIRILADLEDYLNELWEDKEGKKKMNKNNAKALSTLRQKIRKYNRDFESHITSYKQNPEQSADEDAEKNEEDSEGSSDEDEDEDGVSAATFLKKKSEAPSGESRKFLKKMDDEDEDSEDSEDDEDWDTGSTSSDSDSEEEEGKQTALASRFLKKAPTTDEDKKAAEKKREDKAKKKHDRKSKRLDEEEEDNEGGEWERVRGGVPLVKEKPKMFAKGTEITHAVVIKKLNEILQARGKKGTDRAAQIELLQLLVQIAAENNLGEGVIVKIKFNIIASLYDYNPNLATYMKPEMWGKCLDCINELMDILFANPNIFVGENILEESENLHNADQPLRVRGCILTLVERMDEEFTKIMQNTDPHSQEYVEHLKDEAQVCAIIERVQRYLEEKGTTEEVCRIYLLRILHTYYKFDYKAHQRQLTPPEGSSKSEQDQAENEGEDSAVLMERLCKYIYAKDRTDRIRTCAILCHIYHHALHSRWYQARDLMLMSHLQDNIQHADPPVQILYNRTMVQLGICAFRQGLTKDAHNALLDIQSSGRAKELLGQGLLLRSLQERNQEQEKVERRRQVPFHLHINLELLECVYLVSAMLLEIPYMAAHESDARRRMISKQFHHQLRVGERQPLLGPPESMREHVVAASKAMKMGDWKTCHSFIINEKMNGKVWDLFPEADKVRTMLVRKIQEESLRTYLFTYSSVYDSISMETLSDMFELDLPTVHSIISKMIINEELMASLDQPTQTVVMHRTEPTAQQNLALQLAEKLGSLVENNERVFDHKQGTYGGYFRDQKDGYRKNEGYMRRGGYRQQQSQTAY

SEQ ID NO: 94555 - protein, 898 aa, Artificial Sequence
  derived and/or modified sequence
MSRFFTTGSDSESESSLSGEELVTKPVGGNYGKQPLLLSEDEEDTKRVVRSAKDKRFEELTNLIRTIRNAMKIRDVTKCLEEFELLGKAYGKAKSIVDKEGVPRFYIRILADLEDYLNELWEDKEGKKKIRKYNRDFESHITSYKQNPEQSADEDAEKNEEDSEGSSDEDEDEDGVSAATFLKKKSEAPSGESRKFLKKMDDEDEDSEDSEDDEDWDTGSTSSDSDSEEEEGKQTALASRFLKKAPTTDEDKKAAEKKREDKAKKKHDRKSKRLDEEEEDNEGGEWERVRGGVPLVKEKPKMFAKGTEITHAVVIKKLNEILQARGKKGTDRAAQIELLQLLVQIAAENNLGEGVIVKIKFNIIASLYDYNPNLATYMKPEMWGKCLDCINELMDILFANPNIFVGENILEESENLHNADQPLRVRGCILTLVERMDEEFTKIMQNTDPHSQEYVEHLKDEAQVCAIIERVQRYLEEKGTTEEVCRIYLLRILHTYYKFDYKAHQRQLTPPEGSSKSEQDQAENEGEDSAVLMERLCKYIYAKDRTDRIRTCAILCHIYHHALHSRWYQARDLMLMSHLQDNIQHADPPVQILYNRTMVQLGICAFRQGLTKDAHNALLDIQSSGRAKELLGQGLLLRSLQERNQEQEKVERRRQVPFHLHINLELLECVYLVSAMLLEIPYMAAHESDARRRMISKQFHHQLRVGERQPLLGPPESMREHVVAASKAMKMGDWKTCHSFIINEKMNGKVWDLFPEADKVRTMLVRKIQEESLRTYLFTYSSVYDSISMETLSDMFELDLPTVHSIISKMIINEELMASLDQPTQTVVMHRTEPTAQQNLALQLAEKLGSLVENNERVFDHKQGTYGGYFRDQKDGYRKNEGYMRRGGYRQQQSQTAY

SEQ ID NO: 94556 - DNA, 3128 bp, Artificial Sequence
  derived and/or modified sequence
gtggcaggcagccctgcaccggacacacagtggcattcaacttcctgcctgccagccccagtgtgtggttcccagcctgacaaccttggcaccccagcaccccagcaggaggggtttctgcttgtggtcccctggccaccagcctcggccagctggttgtggaccagccgtgacctggggcaacccagccaacctcaccgtccaatgggctgcagccacctctctccagtgaggtctgagacccagccttaacgaggctacccccttccaggtccggccgtagcacctccgcgccgtcgccatgtcgcggtttttcaccaccggttcggacagcgagtccgagtcgtccttgtccggggaggagctcgtcaccaaacctgtcggaggcaactatggcaaacagccattgttgctgagcgaggatgaagaagataccaagagagttgtccgcagtgccaaggacaagaggtttgaggagctgaccaaccttatccggaccatccgtaatgccatgaagattcgtgatgtcaccaagtgcctggaagagtttgagctcctgggaaaagcatatgggaaggccaaaagcattgtggacaaagaaggtgtcccccggttctatatccgcatcctggctgacctagaggactatcttaatgagctttgggaagataaggaagggaagaagaagatgaacaagaacaatgccaaggctctgagcaccttgcgtcagaagatccgaaaatacaaccgtgatttcgagtcccatatcacaagctacaagcagaaccccgagcagtctgcggatgaagatgctgagaaaaatgaggaggattcagaaggctcttcagatgaggatgaggatgaggacggagtcagtgctgcaactttcttgaagaagaaatcagaagctccttctggggagagtcgcaagttcctcaaaaagatggatgatgaagatgaggactcagaagattccgaagatgatgaagactgggacacaggttccacatcttccgattccgactcagaggaggaagaagggaaacaaaccgcgctggcctcaagatttcttaaaaaggcacccaccacagatgaggacaagaaggcagccgagaagaaacgggaggacaaagctaagaagaagcacgacaggaaatccaagcgcctggatgaggaggaggaggacaatgaaggcggggagtgggaaagggtccggggcggagtgccgttggttaaggagaagccaaaaatgtttgccaagggaactgagatcacccatgctgttgttatcaagaaactgaatgagatcctacaggcacgaggcaagaagggaactgatcgtgctgcccagattgagctgctgcaactgctggttcagattgcagcggaaaacaacctgggagagggcgtcattgtcaagatcaagttcaatatcatcgcctctctctatgactacaaccccaacctggcaacctacatgaagccagagatgtgggggaagtgcctggactgcatcaatgagctgatggatatcctgtttgcaaatcccaacatttttgttggagagaatattctggaagagagtgagaacctgcacaacgctgaccagccactgcgtgtccgtggctgcatcctaactctggtggaacgaatggatgaagaatttaccaaaataatgcaaaatactgaccctcactcccaagagtacgtggagcacttgaaggatgaggcccaggtgtgtgccatcatcgagcgtgtgcagcgctacctggaggagaagggcactaccgaggaggtctgccgcatctacctgctgcgcatcctgcacacctactacaagtttgattacaaggcccatcagcgacagctgaccccgcctgagggctcctcaaagtctgagcaagaccaggcagaaaatgagggcgaggactcggctgtgttgatggagagactgtgcaagtacatctacgccaaggaccgcacagaccggatccgcacatgtgccatcctctgccacatctaccaccatgctctgcactcgcgctggtaccaggcccgcgacctcatgctcatgagccacttgcaggacaacattcagcatgcagacccgccagtgcagatcctttacaaccgcaccatggtgcagctgggcatctgtgccttccgccaaggcctgaccaaggacgcacacaacgccctgctggacatccagtcgagtggccgagccaaggagcttctgggccagggcctgctgctgcgcagcctgcaggagcgcaaccaggagcaggagaaggtggagcggcgccgtcaggtccccttccacctgcacatcaacctggagctgctggagtgtgtctacctggtgtctgccatgctcctggagatcccctacatggccgcccatgagagcgatgcccgccgacgcatgatcagcaagcagttccaccaccagctgcgcgtgggcgagcgacagcccctgctgggtccccctgagtccatgcgggaacatgtggtcgctgcctccaaggccatgaagatgggtgactggaagacctgtcacagttttatcatcaatgagaagatgaatgggaaagtgtgggaccttttccccgaggctgacaaagtccgcaccatgctggttaggaagatccaggaagagtcactgaggacctacctcttcacctacagcagtgtctatgactccatcagcatggagacgctgtcagacatgtttgagctggatctgcccactgtgcactccatcatcagcaaaatgatcattaatgaggagctgatggcctccctggaccagccaacacagacagtggtgatgcaccgcactgagcccactgcccagcagaacctggctctgcagctggccgagaagctgggcagcctggtggagaacaacgaacgggtgtttgaccacaagcagggcacctacgggggctacttccgagaccagaaggacggctaccgcaaaaacgagggctacatgcgccgcggtggctaccgccagcagcagtctcagacggcctactgagctctccactctgtttcccgcctgggccatccaaccttgaagtcctaaaccacacctcagtcactaaaggtctgtttaaagttgt

SEQ ID NO: 94557 - DNA, 3045 bp, Artificial Sequence
  derived and/or modified sequence
tctctctcggcgtttccgctgtcagggccctgcggtgtgactcgcgggctcagctggtccggccgtagcacctccgcgccgtcgccatgtcgcggtttttcaccaccggttcggacagcgagtccgagtcgtccttgtccggggaggagctcgtcaccaaacctgtcggaggcaactatggcaaacagccattgttgctgagcgaggatgaagaagataccaagagagttgtccgcagtgccaaggacaagaggtttgaggagctgaccaaccttatccggaccatccgtaatgccatgaagattcgtgatgtcaccaagtgcctggaagagtttgagctcctgggaaaagcatatgggaaggccaaaagcattgtggacaaagaaggtgtcccccggttctatatccgcatcctggctgacctagaggactatcttaatgagctttgggaagataaggaagggaagaagaagatgaacaagaacaatgccaaggctctgagcaccttgcgtcagaagatccgaaaatacaaccgtgatttcgagtcccatatcacaagctacaagcagaaccccgagcagtctgcggatgaagatgctgagaaaaatgaggaggattcagaaggctcttcagatgaggatgaggatgaggacggagtcagtgctgcaactttcttgaagaagaaatcagaagctccttctggggagagtcgcaagttcctcaaaaagatggatgatgaagatgaggactcagaagattccgaagatgatgaagactgggacacaggttccacatcttccgattccgactcagaggaggaagaagggaaacaaaccgcgctggcctcaagatttcttaaaaaggcacccaccacagatgaggacaagaaggcagccgagaagaaacgggaggacaaagctaagaagaagcacgacaggaaatccaagcgcctggatgaggaggaggaggacaatgaaggcggggagtgggaaagggtccggggcggagtgccgttggttaaggagaagccaaaaatgtttgccaagggaactgagatcacccatgctgttgttatcaagaaactgaatgagatcctacaggcacgaggcaagaagggaactgatcgtgctgcccagattgagctgctgcaactgctggttcagattgcagcggaaaacaacctgggagagggcgtcattgtcaagatcaagttcaatatcatcgcctctctctatgactacaaccccaacctggcaacctacatgaagccagagatgtgggggaagtgcctggactgcatcaatgagctgatggatatcctgtttgcaaatcccaacatttttgttggagagaatattctggaagagagtgagaacctgcacaacgctgaccagccactgcgtgtccgtggctgcatcctaactctggtggaacgaatggatgaagaatttaccaaaataatgcaaaatactgaccctcactcccaagagtacgtggagcacttgaaggatgaggcccaggtgtgtgccatcatcgagcgtgtgcagcgctacctggaggagaagggcactaccgaggaggtctgccgcatctacctgctgcgcatcctgcacacctactacaagtttgattacaaggcccatcagcgacagctgaccccgcctgagggctcctcaaagtctgagcaagaccaggcagaaaatgagggcgaggactcggctgtgttgatggagagactgtgcaagtacatctacgccaaggaccgcacagaccggatccgcacatgtgccatcctctgccacatctaccaccatgctctgcactcgcgctggtaccaggcccgcgacctcatgctcatgagccacttgcaggacaacattcagcatgcagacccgccagtgcagatcctttacaaccgcaccatggtgcagctgggcatctgtgccttccgccaaggcctgaccaaggacgcacacaacgccctgctggacatccagtcgagtggccgagccaaggagcttctgggccagggcctgctgctgcgcagcctgcaggagcgcaaccaggagcaggagaaggtggagcggcgccgtcaggtccccttccacctgcacatcaacctggagctgctggagtgtgtctacctggtgtctgccatgctcctggagatcccctacatggccgcccatgagagcgatgcccgccgacgcatgatcagcaagcagttccaccaccagctgcgcgtgggcgagcgacagcccctgctgggtccccctgagtccatgcgggaacatgtggtcgctgcctccaaggccatgaagatgggtgactggaagacctgtcacagttttatcatcaatgagaagatgaatgggaaagtgtgggaccttttccccgaggctgacaaagtccgcaccatgctggttaggaagatccaggaagagtcactgaggacctacctcttcacctacagcagtgtctatgactccatcagcatggagacgctgtcagacatgtttgagctggatctgcccactgtgcactccatcatcagcaaaatgatcattaatgaggagctgatggcctccctggaccagccaacacagacagtggtgatgcaccgcactgagcccactgcccagcagaacctggctctgcagctggccgagaagctgggcagcctggtggagaacaacgaacgggtgtttgaccacaagcagggcacctacgggggctacttccgagaccagaaggacggctaccgcaaaaacgagggctacatgcgccgcggtggctaccgccagcagcagtctcagacggcctactgagctctccactctgtttcccgcctgggccatccaaccttgaagtcctaaaccacacctcagtcactaaaggtctgtttaaagttgttctggttgattgcttgttgccacaaaggtgtgttgagcccattcatttgctgattatatttctgagctgctaccacatgacagacacaaggctcagatgaagaggtgaattgaacacgttcctgacctcaaa

SEQ ID NO: 94558 - DNA, 3093 bp, Artificial Sequence
  derived and/or modified sequence
cttctctctcggcgtttccgctgtcagggccctgcggtgtgactcgcgggctcagctggttggtattttttgggcctcgtgcttcgtggtgggagacccaggtcgaggtccggccgtagcacctccgcgccgtcgccatgtcgcggtttttcaccaccggttcggacagcgagtccgagtcgtccttgtccggggaggagctcgtcaccaaacctgtcggaggcaactatggcaaacagccattgttgctgagcgaggatgaagaagataccaagagagttgtccgcagtgccaaggacaagaggtttgaggagctgaccaaccttatccggaccatccgtaatgccatgaagattcgtgatgtcaccaagtgcctggaagagtttgagctcctgggaaaagcatatgggaaggccaaaagcattgtggacaaagaaggtgtcccccggttctatatccgcatcctggctgacctagaggactatcttaatgagctttgggaagataaggaagggaagaagaagatgaacaagaacaatgccaaggctctgagcaccttgcgtcagaagatccgaaaatacaaccgtgatttcgagtcccatatcacaagctacaagcagaaccccgagcagtctgcggatgaagatgctgagaaaaatgaggaggattcagaaggctcttcagatgaggatgaggatgaggacggagtcagtgctgcaactttcttgaagaagaaatcagaagctccttctggggagagtcgcaagttcctcaaaaagatggatgatgaagatgaggactcagaagattccgaagatgatgaagactgggacacaggttccacatcttccgattccgactcagaggaggaagaagggaaacaaaccgcgctggcctcaagatttcttaaaaaggcacccaccacagatgaggacaagaaggcagccgagaagaaacgggaggacaaagctaagaagaagcacgacaggaaatccaagcgcctggatgaggaggaggaggacaatgaaggcggggagtgggaaagggtccggggcggagtgccgttggttaaggagaagccaaaaatgtttgccaagggaactgagatcacccatgctgttgttatcaagaaactgaatgagatcctacaggcacgaggcaagaagggaactgatcgtgctgcccagattgagctgctgcaactgctggttcagattgcagcggaaaacaacctgggagagggcgtcattgtcaagatcaagttcaatatcatcgcctctctctatgactacaaccccaacctggcaacctacatgaagccagagatgtgggggaagtgcctggactgcatcaatgagctgatggatatcctgtttgcaaatcccaacatttttgttggagagaatattctggaagagagtgagaacctgcacaacgctgaccagccactgcgtgtccgtggctgcatcctaactctggtggaacgaatggatgaagaatttaccaaaataatgcaaaatactgaccctcactcccaagagtacgtggagcacttgaaggatgaggcccaggtgtgtgccatcatcgagcgtgtgcagcgctacctggaggagaagggcactaccgaggaggtctgccgcatctacctgctgcgcatcctgcacacctactacaagtttgattacaaggcccatcagcgacagctgaccccgcctgagggctcctcaaagtctgagcaagaccaggcagaaaatgagggcgaggactcggctgtgttgatggagagactgtgcaagtacatctacgccaaggaccgcacagaccggatccgcacatgtgccatcctctgccacatctaccaccatgctctgcactcgcgctggtaccaggcccgcgacctcatgctcatgagccacttgcaggacaacattcagcatgcagacccgccagtgcagatcctttacaaccgcaccatggtgcagctgggcatctgtgccttccgccaaggcctgaccaaggacgcacacaacgccctgctggacatccagtcgagtggccgagccaaggagcttctgggccagggcctgctgctgcgcagcctgcaggagcgcaaccaggagcaggagaaggtggagcggcgccgtcaggtccccttccacctgcacatcaacctggagctgctggagtgtgtctacctggtgtctgccatgctcctggagatcccctacatggccgcccatgagagcgatgcccgccgacgcatgatcagcaagcagttccaccaccagctgcgcgtgggcgagcgacagcccctgctgggtccccctgagtccatgcgggaacatgtggtcgctgcctccaaggccatgaagatgggtgactggaagacctgtcacagttttatcatcaatgagaagatgaatgggaaagtgtgggaccttttccccgaggctgacaaagtccgcaccatgctggttaggaagatccaggaagagtcactgaggacctacctcttcacctacagcagtgtctatgactccatcagcatggagacgctgtcagacatgtttgagctggatctgcccactgtgcactccatcatcagcaaaatgatcattaatgaggagctgatggcctccctggaccagccaacacagacagtggtgatgcaccgcactgagcccactgcccagcagaacctggctctgcagctggccgagaagctgggcagcctggtggagaacaacgaacgggtgtttgaccacaagcagggcacctacgggggctacttccgagaccagaaggacggctaccgcaaaaacgagggctacatgcgccgcggtggctaccgccagcagcagtctcagacggcctactgagctctccactctgtttcccgcctgggccatccaaccttgaagtcctaaaccacacctcagtcactaaaggtctgtttaaagttgttctggttgattgcttgttgccacaaaggtgtgttgagcccattcatttgctgattatatttctgagctgctaccacatgacagacacaaggctcagatgaagaggtgaattgaacacgttcctgacctc

SEQ ID NO: 94559 - DNA, 2865 bp, Artificial Sequence
  derived and/or modified sequence
ctctctcggcgtttccgctgtcagggccctgcggtgtgactcgcgggctcagctggtccggccgtagcacctccgcgccgtcgccatgtcgcggtttttcaccaccggttcggacagcgagtccgagtcgtccttgtccggggaggagctcgtcaccaaacctgtcggaggcaactatggcaaacagccattgttgctgagcgaggatgaagaagataccaagagagttgtccgcagtgccaaggacaagaggtttgaggagctgaccaaccttatccggaccatccgtaatgccatgaagattcgtgatgtcaccaagtgcctggaagagtttgagctcctgggaaaagcatatgggaaggccaaaagcattgtggacaaagaaggtgtcccccggttctatatccgcatcctggctgacctagaggactatcttaatgagctttgggaagataaggaagggaagaagaagatccgaaaatacaaccgtgatttcgagtcccatatcacaagctacaagcagaaccccgagcagtctgcggatgaagatgctgagaaaaatgaggaggattcagaaggctcttcagatgaggatgaggatgaggacggagtcagtgctgcaactttcttgaagaagaaatcagaagctccttctggggagagtcgcaagttcctcaaaaagatggatgatgaagatgaggactcagaagattccgaagatgatgaagactgggacacaggttccacatcttccgattccgactcagaggaggaagaagggaaacaaaccgcgctggcctcaagatttcttaaaaaggcacccaccacagatgaggacaagaaggcagccgagaagaaacgggaggacaaagctaagaagaagcacgacaggaaatccaagcgcctggatgaggaggaggaggacaatgaaggcggggagtgggaaagggtccggggcggagtgccgttggttaaggagaagccaaaaatgtttgccaagggaactgagatcacccatgctgttgttatcaagaaactgaatgagatcctacaggcacgaggcaagaagggaactgatcgtgctgcccagattgagctgctgcaactgctggttcagattgcagcggaaaacaacctgggagagggcgtcattgtcaagatcaagttcaatatcatcgcctctctctatgactacaaccccaacctggcaacctacatgaagccagagatgtgggggaagtgcctggactgcatcaatgagctgatggatatcctgtttgcaaatcccaacatttttgttggagagaatattctggaagagagtgagaacctgcacaacgctgaccagccactgcgtgtccgtggctgcatcctaactctggtggaacgaatggatgaagaatttaccaaaataatgcaaaatactgaccctcactcccaagagtacgtggagcacttgaaggatgaggcccaggtgtgtgccatcatcgagcgtgtgcagcgctacctggaggagaagggcactaccgaggaggtctgccgcatctacctgctgcgcatcctgcacacctactacaagtttgattacaaggcccatcagcgacagctgaccccgcctgagggctcctcaaagtctgagcaagaccaggcagaaaatgagggcgaggactcggctgtgttgatggagagactgtgcaagtacatctacgccaaggaccgcacagaccggatccgcacatgtgccatcctctgccacatctaccaccatgctctgcactcgcgctggtaccaggcccgcgacctcatgctcatgagccacttgcaggacaacattcagcatgcagacccgccagtgcagatcctttacaaccgcaccatggtgcagctgggcatctgtgccttccgccaaggcctgaccaaggacgcacacaacgccctgctggacatccagtcgagtggccgagccaaggagcttctgggccagggcctgctgctgcgcagcctgcaggagcgcaaccaggagcaggagaaggtggagcggcgccgtcaggtccccttccacctgcacatcaacctggagctgctggagtgtgtctacctggtgtctgccatgctcctggagatcccctacatggccgcccatgagagcgatgcccgccgacgcatgatcagcaagcagttccaccaccagctgcgcgtgggcgagcgacagcccctgctgggtccccctgagtccatgcgggaacatgtggtcgctgcctccaaggccatgaagatgggtgactggaagacctgtcacagttttatcatcaatgagaagatgaatgggaaagtgtgggaccttttccccgaggctgacaaagtccgcaccatgctggttaggaagatccaggaagagtcactgaggacctacctcttcacctacagcagtgtctatgactccatcagcatggagacgctgtcagacatgtttgagctggatctgcccactgtgcactccatcatcagcaaaatgatcattaatgaggagctgatggcctccctggaccagccaacacagacagtggtgatgcaccgcactgagcccactgcccagcagaacctggctctgcagctggccgagaagctgggcagcctggtggagaacaacgaacgggtgtttgaccacaagcagggcacctacgggggctacttccgagaccagaaggacggctaccgcaaaaacgagggctacatgcgccgcggtggctaccgccagcagcagtctcagacggcctactgagctctccactctgtttcccgcctgggccatccaaccttgaagtcctaaaccacacctcagtcactaaaggtctgtttaaagtt

SEQ ID NO: 94560 - DNA, 2742 bp, Artificial Sequence
  derived and/or modified sequence
atgagccgcttctttaccaccggctctgactctgaaagtgaatctagtttgtcaggggaggaactggttacaaagccggtaggcggcaactatggcaagcagccactgctcctgagcgaggacgaggaggatacaaaacgcgttgtcaggagtgcaaaggacaagagatttgaagagctcacaaacctgattagaactatccgtaacgccatgaagattcgtgatgtgacaaaatgtttggaagaatttgagctactgggaaaggcctatggaaaggcaaaatccattgtcgacaaggagggggtccctagattttacattaggatcctggctgatctggaagactatttgaacgagttgtgggaagataaggaaggaaagaaaaaaatgaacaaaaataacgcaaaggcactgagtacattgaggcagaaaatcagaaagtataacagggacttcgaatcccacatcacgagttacaagcaaaatccggagcaaagcgccgacgaggatgccgaaaagaacgaggaggattccgagggatccagcgatgaagatgaggatgaagatggcgttagtgctgcaacctttctgaaaaagaaaagtgaggctccatccggggagtctcgcaagttcctgaaaaagatggacgacgaggatgaggacagcgaagacagtgaggatgacgaagattgggacaccggcagtactagcagtgactctgattctgaggaagaggaggggaagcagaccgccctggcaagccggttcttaaagaaagctccaaccacagacgaagacaaaaaggccgcggagaagaaacgcgaggacaaagccaagaaaaagcatgaccggaaatccaaaaggctggatgaggaggaagaggacaacgagggtggggagtgggagcgggttcgaggaggggtccctctggtcaaagagaagcccaaaatgttcgccaaaggcacagaaatcacacacgcggtggtcattaaaaagctcaatgagatcttacaggccaggggaaagaaggggacagatagggccgcccagatcgagctgcttcagctactggttcagatcgccgctgagaacaatctgggtgagggcgtaatagtaaagattaaatttaatattatcgctagcctgtatgactataacccaaatctcgcaacctacatgaagccggaaatgtggggaaaatgcctggattgcatcaatgagctgatggatatcctgtttgccaaccctaatatcttcgtcggcgagaacattttggaagaaagcgaaaacctgcacaacgcggaccagccactgagagtgcgcggatgtatccttactctcgttgagcgtatggatgaagaatttacgaaaatcatgcagaacacagacccacattcacaggaatacgttgagcacctgaaagacgaagcacaggtctgtgccataattgagagggtacaacggtatttggaggagaagggcaccaccgaggaagtgtgtcgtatctatctgttgagaatactgcatacctattataaattcgattacaaagcccaccagcgccagttaactcctccagaaggatcatccaagtccgagcaggaccaggccgagaacgaaggggaggactccgcagtgttgatggaacggctatgcaaatacatatacgcgaaagatagaacggaccggattagaacctgcgccatactgtgtcatatctatcaccacgctttgcattctcggtggtaccaggccagggacctaatgttgatgtctcatctgcaggataacattcagcatgccgaccctcccgttcagatcttgtacaatagaaccatggtccagttgggcatctgtgcattcaggcagggtttaaccaaggatgctcataatgctctgttggacattcagagctcggggcgggcaaaagagttgctgggacaggggctgcttttgcgttccttgcaggagcgtaatcaggagcaggagaaagtggaacggcggcgtcaggtacccttccacttacatatcaatctggagcttcttgagtgcgtttacctggtctctgcaatgctgttggagatcccatatatggcagcacatgagtctgacgctcggcggaggatgatttccaaacagtttcaccaccaacttcgagtgggggagagacaaccactgttaggcccacctgagagtatgcgggagcatgtggtggccgcctcgaaagctatgaaaatgggtgattggaaaacttgtcactcctttatcatcaacgaaaagatgaacgggaaggtctgggacctcttcccagaggcagacaaggtgaggacaatgctggtacgaaaaattcaggaggagtcgctgaggacctatctcttcacttattcttcggtgtacgattccatctctatggagacactctcggatatgtttgaactggacctgcccaccgttcacagcattattagcaaaatgatcatcaacgaggaactgatggccagcttagatcagcccacacagaccgtggttatgcatcggactgaacctacagctcagcagaatcttgccctgcaattggcagagaagctcggttcactcgtcgagaacaacgaaagagtctttgatcataaacagggcacatacggcggctattttcgagaccaaaaggatggatatagaaagaacgaggggtacatgagacggggtggctacaggcaacagcaatcacaaactgcatattag

SEQ ID NO: 94561 - DNA, 2742 bp, Artificial Sequence
  derived and/or modified sequence
atgtccaggttctttacgactggctccgactctgaatcagagagttcccttagtggcgaggagctcgtgactaaacctgtaggcggcaactacggtaagcagccacttttactcagcgaagacgaagaggacaccaaaagagtcgttcggagcgcaaaggataaaaggtttgaggagctcaccaacctgatcaggacaattagaaacgcgatgaaaattcgggatgttactaagtgtctagaagagttcgaactcctaggtaaggcttacggcaaagccaagagtatcgtcgataaggaaggtgtcccaagattttatataaggatccttgctgacctggaggactacctcaacgagctttgggaggacaaggaaggcaagaagaagatgaacaagaacaacgccaaagccctttctactcttcgccagaaaatcaggaagtacaacagggactttgagagccacataacttcatacaagcagaaccccgagcagtctgccgatgaagacgctgaaaagaatgaagaggattctgaaggatctagtgatgaagatgaagatgaggatggagtgagcgccgctacattcctgaaaaagaagtccgaagccccgagtggcgaatctcgaaagttcctgaaaaagatggacgacgaggacgaagattcggaggacagcgaggacgatgaggattgggatactgggagtacttctagcgattccgatagtgaagaagaagagggtaagcagacagcactcgctagccgctttctgaagaaggcccccacaacggatgaagataaaaaagccgccgagaagaagcgggaggataaggctaagaaaaagcatgatcggaagagcaagcgcctggatgaagaagaggaagacaacgagggtggcgagtgggaacgggtgcgcggaggagtaccactggtgaaggagaagccaaaaatgtttgcaaaaggcaccgagatcacccacgccgttgtaattaagaagctgaacgaaatcctgcaagcgagggggaagaaaggcaccgaccgagcagctcagattgagttgctgcagctgctggtgcaaattgccgccgagaataacctgggggagggggtgatcgttaaaatcaagttcaatatcattgcttcactttatgactacaacccaaatctggccacctatatgaagccagagatgtggggtaagtgcctcgactgtatcaatgagctgatggacattttgttcgccaatcccaatatttttgtcggtgagaatattctggaagagtccgaaaacctgcacaacgctgatcagccacttagagtgcgagggtgtatccttactctcgtggagcgcatggatgaagagttcaccaagatcatgcagaatacagatccccactcccaagaatacgtcgaacacctgaaggatgaggcacaagtgtgcgccatcattgaacgcgtgcagcgctacctagaagagaagggaaccaccgaagaagtgtgtaggatttatcttctgcggatcctgcacacctattacaaatttgactacaaggcccaccagaggcagctgaccccgcctgaaggctcatcaaaatccgagcaggaccaggctgaaaacgaaggggaagacagcgccgtgctgatggagaggctgtgcaagtacatttacgccaaggaccgaaccgacagaatacgcacctgtgccatcctgtgtcacatatatcaccacgccctccacagccgctggtaccaggcccgggaccttatgctcatgtcccatctccaggacaacatccagcacgctgatccacccgtgcagatcttgtataaccggacaatggttcaactcgggatttgtgcctttcggcaaggtctaacgaaggatgcccacaacgccttactagatattcaatcaagtggccgcgctaaggagctgttaggacagggtctgctgttgcgctctttgcaagaacgaaatcaagagcaggaaaaggttgagcggcgcagacaggttccattccatctgcatatcaacctcgaactgctggagtgcgtctacctggtgtccgccatgttactcgagataccatacatggcggcccacgaatcggacgcgcgccgccgaatgatatccaaacaatttcaccaccagttgcgcgtgggcgagcgccagcccctgctcggcccgcctgagtccatgagggagcacgtggtggcggcatcaaaagccatgaagatgggagactggaagacatgccacagtttcattatcaatgagaagatgaatgggaaggtgtgggaccttttccccgaggctgacaaggtgaggaccatgcttgttcgaaaaatccaagaagagtcactgcgcacctatctgttcacctactcatctgtgtatgatagcattagtatggaaacccttagcgacatgtttgaactcgacctacctactgtgcattctatcattagcaaaatgatcatcaacgaagagctgatggcatccctggaccagccaacccagacggtagtcatgcatcgcacagagcccactgcacagcaaaatctcgcgctgcaattggcggaaaaactggggagcctggtcgagaacaatgaaagggtctttgaccataagcagggaacatatggcggctactttcgcgaccagaaggatggttatcgaaaaaatgaaggatatatgcgccggggcggatacaggcagcaacaaagccagactgcctactag

SEQ ID NO: 94562 - DNA, 2742 bp, Artificial Sequence
  derived and/or modified sequence
atgtcccgattcttcaccaccggaagtgacagcgaatctgagtcttcactgtccggcgaagaattggtgacaaaacctgttggcgggaactacggcaaacagcccctgttactctccgaagacgaagaggataccaagagggtggtgaggagcgcgaaagacaaaaggtttgaagagttgaccaatctaatccgcaccatccggaacgcgatgaagatccgggacgtgaccaagtgtctcgaggagtttgaactgctgggaaaagcatatggtaaagctaaatctatcgtggacaaggagggcgtgccacgcttctatatacgcatcctggccgatctggaggattacttaaacgagctgtgggaggacaaggaaggaaaaaaaaaaatgaacaaaaataatgctaaagccctcagcacactgagacaaaagatccgaaagtacaatcgggactttgagtcgcacatcacctcttataagcagaacccggagcagtctgccgatgaggatgcagaaaagaatgaggaggacagtgagggcagcagcgatgaggacgaggacgaggacggggtgtcagctgcaacctttttaaaaaagaagtctgaggccccatcaggggagagccgaaaattccttaagaagatggatgatgaagacgaagattccgaagacagcgaggacgatgaggactgggacaccgggtcaactagcagtgactcagattctgaggaggaagagggcaaacagaccgccttagcatctcgatttctcaagaaagcccctaccactgacgaagacaaaaaggcagctgaaaagaaaagggaggacaaagctaaaaagaagcatgatcggaagagtaaaagacttgacgaagaggaagaggataatgaggggggcgagtgggagcgcgtgcgggggggcgtaccattagtgaaggaaaagccaaagatgtttgcaaaggggaccgagatcacccatgcagtagtcattaaaaaactgaatgagattcttcaggcgcgcggcaaaaagggcacggatcgcgccgcacagatcgaacttctgcagttgctggtgcaaattgctgctgaaaataatctaggcgaaggggttatcgtgaagattaaattcaatatcattgcgagtctgtacgactacaatccaaacttggctacgtacatgaaacccgaaatgtggggcaagtgcctggactgtattaatgaactcatggatatcctcttcgcgaatcctaacatatttgtcggtgagaatatcttagaagaatccgaaaatcttcacaatgccgatcagccactcagagtcaggggttgtatactgacacttgtggaacggatggatgaagagtttaccaagatcatgcagaatacagacccgcactctcaagagtatgtagaacatcttaaggatgaggctcaggtctgtgcgattattgagagagtgcagcggtatctggaagagaaaggcaccacggaggaggtgtgtagaatttacttgctcagaattctgcacacatattacaaatttgattataaagcgcaccagcgtcagttgactccgccagaggggagttcaaagtccgaacaggatcaggccgaaaacgagggggaggatagcgccgtgctaatggaaagactgtgcaaatatatttacgctaaggacagaaccgataggattcggacatgtgcaattctgtgccacatctaccatcatgctctgcacagcaggtggtaccaggcccgagacctaatgctcatgtcacatctgcaggacaatatccagcacgccgatcccccagtccagatcctctataataggaccatggttcaactggggatctgtgcattccgccaagggctgaccaaggatgctcataatgcactgctggatatacagtcctcaggtcgtgctaaagaactgctagggcagggcctcctccttaggtctctgcaggaaaggaatcaagagcaggaaaaggtggagcgaaggcggcaggtgccatttcacctccatattaaccttgaactgctggagtgcgtgtatctggtatccgcaatgctgcttgagatcccatatatggctgctcacgagtcagacgcccgccgccggatgatctctaaacagtttcaccaccagctgagggttggagaacgccagcccctgctcggccctccagagtccatgcgcgagcacgtggtcgcagcctctaaggctatgaaaatgggagattggaagacctgccattctttcatcatcaacgagaaaatgaatggtaaggtgtgggatttatttccagaggcggacaaggtgaggacgatgctggtcaggaagattcaggaagagagtctgcgtacctatctgtttacatactcatctgtttatgactctatctctatggagacccttagcgacatgtttgaactggacttgcccacggtccacagcattatttccaaaatgatcataaatgaggagctcatggcctctcttgaccagccaacacagaccgtcgtaatgcatcggactgaacctaccgcccaacagaatctcgcgctgcagctggccgagaagctggggagtctggtcgagaacaatgaacgggtttttgaccacaagcagggaacttacggaggctactttcgcgaccaaaaggatggctaccggaagaacgaggggtatatgcgccgcgggggttatcgccaacagcaaagtcagaccgcctactag

SEQ ID NO: 94563 - DNA, 2697 bp, Artificial Sequence
  derived and/or modified sequence
atgagcaggtttttcacaaccggtagcgattcagagtccgagagctcactctcgggtgaagagcttgtaacgaaacctgtgggtggaaactacggtaaacagcctcttctgctgagcgaagatgaggaagatactaagagagtcgtaagaagcgccaaggacaaacggttcgaggaacttacaaatctgatccgaacaattcgaaacgccatgaagatccgtgacgtcaccaagtgcctggaggagttcgagcttctcggaaaggcgtacgggaaggccaagtcgattgtggataaagagggagtaccacgtttctacattcgtattttggccgacctcgaggattacctcaatgaactctgggaggataaggagggaaagaagaagatccgtaagtataatcgcgatttcgagtcccacatcaccagctacaagcaaaaccccgagcaaagcgcggacgaagatgcagagaagaacgaagaagatagcgaaggatcctccgacgaggatgaagacgaggatggcgtaagtgctgccacttttctcaagaaaaagagcgaagcccccagcggggaatccaggaagtttctaaaaaagatggatgacgaggacgaagattccgaggatagcgaagacgatgaggactgggatacaggaagcaccagctcagacagtgatagcgaagaggaggaaggaaaacagaccgccctggcgtcacgttttcttaagaaggctcccactaccgacgaggacaagaaagctgctgagaaaaagcgagaagacaaggccaagaagaagcatgatcgaaagtccaaaaggctggatgaggaggaggaagataatgagggaggggaatgggagcgcgtccgcggtggcgttcccttggtcaaagaaaaaccaaagatgttcgcgaaaggaaccgaaatcacccacgctgtcgtgattaaaaaattaaacgaaattctgcaagctagggggaagaaggggacagacagagctgcccagatcgaattgctgcagctgctggttcagatagctgctgaaaataacctgggcgaaggtgtcattgtgaagatcaagtttaatattatagccagtctgtacgactataatccaaacctcgccacctatatgaagcctgagatgtggggcaagtgtctggactgcattaatgagttgatggacattctctttgccaacccaaacatcttcgtaggagagaatattctggaggagtccgaaaacctgcacaatgcagatcagccactgcgcgtgcgcggatgtattctgactctcgttgaacgcatggacgaggagttcacaaagatcatgcagaatactgatcctcattcccaggagtacgttgagcacctgaaggatgaagcccaggtgtgcgccataattgaaagggtgcaacgttatctcgaggagaagggtacaaccgaggaggtctgcagaatttatctcttgcgcatactgcatacctattataagtttgactataaagcccatcagaggcaactgacgcctcccgagggatcatcgaagtcagagcaggatcaggcagagaacgagggcgaggactctgcggtcctgatggaacggctgtgtaaatacatatatgccaaagacagaaccgatcgcatccgtacttgcgccatcctgtgccacatatatcaccacgccctccatagcaggtggtatcaagctcgcgatcttatgttgatgtcacacctccaggacaatattcagcatgcggatcccccagtgcagatcctttataaccggacaatggtgcagcttggaatatgtgcatttcggcagggcctcacgaaggatgcgcacaacgcgctgctcgacattcagagtagcgggagagccaaggaactccttggccaaggtctgctcctccggagccttcaggagcggaatcaggaacaggagaaagtcgagcggcggaggcaggtgccatttcatctgcacatcaacctagaattacttgagtgtgtttacctggtcagcgcaatgttgctcgagatcccttatatggctgcgcatgagtctgacgctaggagaagaatgatttctaaacagttccaccaccagcttagggtgggagaacggcagcctcttctgggcccaccggagtctatgcgggaacacgtggttgcagctagtaaagccatgaagatgggagattggaaaacctgccattcatttattatcaacgaaaaaatgaatgggaaggtttgggacctgttcccagaagcagataaagtgcggacaatgttggtgcggaagatacaggaggagagcttgcgcacatatctcttcacgtatagctccgtgtacgactccattagtatggagacactgtccgatatgttcgagctagatttacctacggtgcattctataatctctaaaatgattatcaacgaggaactaatggcaagtctggatcagccgacacagacggtggtgatgcacaggacagagcctaccgctcaacagaacctggcactgcagctcgcggagaaattgggctccttagtggaaaacaacgaaagggttttcgaccacaagcagggcacctacggaggatacttccgcgaccaaaaggatggctaccggaagaatgaggggtacatgcggcggggtggctatcgccaacagcagtcgcagaccgcgtattag

SEQ ID NO: 94564 - DNA, 2742 bp, Artificial Sequence
  derived and/or modified sequence
atgagccgcttcttcaccactggaagtgacagcgagagcgagagcagcctgagcggggaggagctggtgaccaagcctgtgggcggcaactacggcaagcagcccctgctgctgtctgaagatgaggaggacaccaagagggtggtgcgcagcgccaaggacaagagatttgaggagctgaccaacctgatccgcaccatcagaaatgccatgaagatcagagatgtgaccaagtgcctggaggagtttgagctgctgggcaaggcctacggcaaggccaagagcatcgtggacaaggagggcgtgccccgcttctacatccgcatcctggccgacctggaggactacctgaatgagctgtgggaggacaaggagggcaagaagaagatgaacaagaacaatgccaaggccctgagcaccctgcggcagaagatcaggaagtacaacagagactttgagagccacatcaccagctacaagcagaaccctgagcagagcgcagatgaagatgctgagaagaatgaggaggacagcgagggcagcagtgatgaagatgaagatgaagatggagtgtctgctgccaccttcctgaagaagaagtctgaggcccccagcggggagagcaggaagttcctgaagaagatggatgatgaagatgaggacagtgaagattctgaagatgatgaggactgggacaccggcagcaccagcagtgacagcgacagcgaggaggaggagggcaagcagacagccctggccagccgcttcctgaagaaggcccccaccacagatgaggacaagaaggctgctgagaagaagcgggaggacaaggccaagaagaagcatgacaggaagagcaagaggctggatgaggaggaggaggacaatgaaggaggagagtgggagcgggtgcggggcggcgtgcccctggtgaaggagaagcccaagatgtttgccaagggcacagagatcacccatgctgtggtgatcaagaagctgaatgagatcctgcaggcccggggcaagaagggcacagaccgggccgcccagatcgagctgctgcagctgctggtgcagattgctgctgagaacaacctgggggagggcgtgattgtgaagatcaagttcaacatcatcgccagcctgtatgactacaaccccaacctggccacctacatgaagccagagatgtggggcaagtgcctggactgcatcaatgagctgatggacatcctgtttgccaaccccaacatctttgtgggggagaacatcctggaggagagcgagaacctgcacaatgctgaccagcccctgcgggtgcggggctgcatcctgaccctggtggagaggatggatgaggagttcaccaagatcatgcagaacacagacccccacagccaggagtatgtggagcacctgaaggatgaggcccaggtgtgtgccatcatcgagcgggtgcagcgctacctggaggagaagggcaccacagaggaggtgtgccgcatctacctgctgcgcatcctgcacacctactacaagtttgactacaaggcccaccagaggcagctgaccccacctgagggcagcagcaagtctgagcaggaccaggccgagaatgaaggagaggacagcgctgtgctgatggagcggctgtgcaagtacatctatgccaaggacagaacagaccgcatccgcacctgtgccatcctgtgccacatctaccaccacgccctgcacagccgctggtaccaggcccgggacctgatgctgatgagccacctgcaggacaacatccagcacgccgacccccctgtgcagatcctgtacaacagaaccatggtgcagctgggcatctgtgccttccggcagggcctgaccaaggatgcccacaatgccctgctggacatccagagcagcggccgggccaaggagctgctgggccagggcctgctgctgcggagcctgcaggagaggaaccaggagcaggagaaggtggagcggcggcggcaggtgcccttccacctgcacatcaacctggagctgctggagtgtgtgtacctggtgtctgccatgctgctggagatcccctacatggccgcccatgaaagtgatgcccggcggaggatgatcagcaagcagttccaccaccagctgcgggtgggggagcggcagcccctgctgggccccccagagagcatgagggagcacgtggtggccgccagcaaggccatgaagatgggagactggaagacctgccacagcttcatcatcaatgagaagatgaatggcaaggtgtgggacctcttccctgaggccgacaaggtgaggaccatgctggtgaggaagatccaggaggagagcctgcggacctacctgttcacctacagctctgtgtatgacagcatctccatggagaccctgagtgacatgtttgagctggacctgcccaccgtgcacagcatcatcagcaagatgatcatcaatgaggagctgatggccagcctggaccagcccacccagacagtggtgatgcacaggacagagcccacagcccagcagaacctggccctgcagctggccgagaagctgggcagcctggtggagaacaatgaaagagtgtttgaccacaagcagggcacctatggaggctacttccgggaccagaaggatggctacaggaagaatgaaggctacatgaggcggggcggctaccggcagcagcagagccagacagcctactag

SEQ ID NO: 94565 - DNA, 2697 bp, Artificial Sequence
  derived and/or modified sequence
atgagccgcttcttcaccactggaagtgacagcgagagcgagagcagcctgagcggggaggagctggtgaccaagcctgtgggcggcaactacggcaagcagcccctgctgctgtctgaagatgaggaggacaccaagagggtggtgcgcagcgccaaggacaagagatttgaggagctgaccaacctgatccgcaccatcagaaatgccatgaagatcagagatgtgaccaagtgcctggaggagtttgagctgctgggcaaggcctacggcaaggccaagagcatcgtggacaaggagggcgtgccccgcttctacatccgcatcctggccgacctggaggactacctgaatgagctgtgggaggacaaggagggcaagaagaagatcaggaagtacaacagagactttgagagccacatcaccagctacaagcagaaccctgagcagagcgcagatgaagatgctgagaagaatgaagaagattctgagggcagcagtgatgaagatgaagatgaagatggagtgtctgctgccaccttcctgaagaagaagtctgaggcccccagcggggagagcaggaagttcctgaagaagatggatgatgaagatgaagattctgaggacagtgaagatgatgaggactgggacaccggcagcaccagcagtgacagcgacagcgaggaggaggagggcaagcagacagccctggccagccgcttcctgaagaaggcccccaccacagatgaggacaagaaggctgctgagaagaagcgggaggacaaggccaagaagaagcatgacaggaagagcaagaggctggatgaggaggaggaggacaatgaaggaggagagtgggagcgggtgcggggcggcgtgcccctggtgaaggagaagcccaagatgtttgccaagggcacagagatcacccatgctgtggtgatcaagaagctgaatgagatcctgcaggcccggggcaagaagggcacagacagagctgcccagatcgagctgctgcagctgctggtgcagattgctgctgagaacaacctgggggagggcgtcatcgtgaagatcaagttcaacatcatcgccagcctgtatgactacaaccccaacctggccacctacatgaagccagagatgtggggcaagtgcctggactgcatcaatgagctgatggacatcctgtttgccaaccccaacatctttgtgggggagaacatcctggaggagagcgagaacctgcacaatgctgaccagcccctgcgggtgcggggctgcatcctgaccctggtggagaggatggatgaggagttcaccaagatcatgcagaacacagacccccacagccaggagtatgtggagcacctgaaggatgaggcccaggtgtgtgccatcatcgagcgggtgcagcgctacctggaggagaagggcaccacagaggaggtgtgccgcatctacctgctgcgcatcctgcacacctactacaagtttgactacaaggcccaccagaggcagctgaccccacctgagggcagcagcaagtctgagcaggaccaggctgaaaatgaaggagaagattctgctgtgctgatggagcggctgtgcaagtacatctatgccaaggacagaacagaccgcatccgcacctgtgccatcctgtgccacatctaccaccacgccctgcacagccgctggtaccaggcccgggacctgatgctgatgagccacctgcaggacaacatccagcacgccgacccccctgtgcagatcctgtacaacagaaccatggtgcagctgggcatctgtgccttccggcagggcctgaccaaggatgcccacaatgccctgctggacatccagagcagcggccgggccaaggagctgctgggccagggcctgctgctgcggagcctgcaggagaggaaccaggagcaggagaaggtggagcggcggcggcaggtgcccttccacctgcacatcaacctggagctgctggagtgtgtgtacctggtgtctgccatgctgctggagatcccctacatggccgcccacgagagtgatgcccggcggaggatgatcagcaagcagttccaccaccagctgcgggtgggggagcggcagcccctgctgggccccccagagagcatgagggagcacgtggtggccgccagcaaggccatgaagatgggagactggaagacctgccacagcttcatcatcaatgagaagatgaatggcaaggtgtgggacctcttccctgaggccgacaaggtgaggaccatgctggtgaggaagatccaggaggagagcctgcggacctacctgttcacctacagctctgtgtatgacagcatctccatggagaccctgagtgacatgtttgagctggacctgcccaccgtgcacagcatcatcagcaagatgatcatcaatgaggagctgatggccagcctggaccagcccacccagacagtggtgatgcacaggacagagcccacagcccagcagaacctggccctgcagctggccgagaagctgggcagcctggtggagaacaatgaaagagtgtttgaccacaagcagggcacctacggcggctacttccgggaccagaaggatggctacaggaagaatgaaggctacatgagaagaggaggctaccggcagcagcagagccagacagcctactag

SEQ ID NO: 94566 - DNA, 2742 bp, Artificial Sequence
  derived and/or modified sequence
atgagccggttcttcaccaccggcagcgacagcgagagcgagagctccctgtctggtgaagagctcgttacgaagcccgttggcggaaattatggcaagcaacctttgctcctttcggaggatgaagaggataccaaaagagtggtgagatctgcgaaggataagagatttgaggaactcaccaatctgattaggacaattcggaacgccatgaagatccgcgatgtcacaaaatgcctcgaggagttcgaactactcggtaaggcatacggcaaagctaagagcatcgtagataaagagggtgtgccacgcttctatattcggatcctggccgacctggaggactacttgaatgagctgtgggaagacaaggagggtaagaagaaaatgaataagaacaacgccaaggccctatccactcttaggcaaaaaattcgaaaatacaacagggactttgaatcgcacattacaagctacaaacagaacccagagcaaagcgctgatgaggatgccgaaaagaatgaggaggattccgagggatccagtgatgaggatgaagacgaggacggtgtatccgctgccaccttccttaaaaagaaatccgaggcacccagcggggagagtaggaaatttttgaagaaaatggatgatgaggatgaggatagcgaggattctgaggatgacgaagattgggataccggctccacgtctagcgactcagactccgaggaagaagaaggaaaacaaacggccttggcaagcaggtttttgaaaaaagcaccaaccaccgatgaagacaagaaggctgccgaaaaaaagcgtgaagataaggctaagaaaaaacacgacagaaagtctaagaggctagacgaagaagaagaggacaatgaggggggggagtgggagagagtgagaggaggggtcccgctggtgaaggagaagcctaagatgttcgccaaaggcacagagattacacatgcggtcgtgataaagaagttgaatgagattctgcaggcccgcgggaaaaaggggacggaccgagcagcgcagatcgagttgctacagttacttgtgcaaatcgcagccgaaaataaccttggtgagggtgttattgtcaaaatcaaattcaacatcattgccagcctctacgattacaatcccaatctagctacttacatgaagccggagatgtgggggaaatgtctcgattgcattaatgaattgatggacattctatttgcaaatccgaacatctttgtgggcgagaacatcctggaggaaagcgaaaatctgcataacgccgaccagcccctgcgggtgagaggatgcatcctgacgttggtggagaggatggacgaggaattcaccaagatcatgcaaaataccgatccccactcccaggagtacgtcgagcatctcaaagacgaagcccaggtatgcgcaataattgagcgcgtgcaacgatacctggaggagaaaggcacaacagaggaggtgtgtcggatttatctcttgagaatactgcacacttactacaagtttgattacaaagcccaccagcgacaactgacaccaccagaggggtcttccaagtccgaacaggatcaggctgagaacgagggagaggacagtgcagtgttgatggagagattgtgcaaatatatctatgctaaggatcgcactgaccgaatcagaacctgcgcgatcttgtgtcacatctatcaccacgcactgcacagtagatggtatcaagcccgtgatttaatgctcatgtctcacctccaggacaatatccaacatgccgacccacctgtccagatcctctataacagaacaatggtgcaacttggaatctgtgcctttcgtcagggtctgactaaagatgctcataacgccctgttggatatccagtcatctggaagggcaaaggaactcttaggccaaggcctactgcttcggtcactgcaggagcgcaatcaggagcaggagaaagtagaaagacgccgccaagtgccttttcatctgcatataaatctggagttactagaatgcgtatatttggtgtcagccatgctcctggagattccctatatggccgcccatgagtccgacgctaggagacgtatgattagtaagcaattccaccaccagctgcgtgtgggcgaacggcagccactgctcgggccgcctgagtctatgagagagcacgttgtggccgcgtctaaggccatgaaaatgggagactggaaaacctgccactcgtttatcattaacgagaagatgaacggcaaggtgtgggatctcttccctgaggcggacaaggttcgtaccatgctggtcaggaaaattcaagaagagtctcttcggacctatttgttcacatactcttctgtatacgattcaattagtatggaaaccttgagtgacatgtttgaactcgacttaccgacggtgcactcaataatctctaaaatgataatcaacgaagagctcatggcatcattagatcaacccactcagacagtggtcatgcacagaactgaacccacagctcagcagaatctggcgctacagctggctgagaaactgggctctttggtggagaacaacgagcgtgtattcgatcacaagcaggggacttacgggggatatttccgggatcaaaaagatggatacagaaagaacgaagggtatatgcgtaggggagggtacagacaacagcagagccagacagcatattag

SEQ ID NO: 94567 - DNA, 2742 bp, Artificial Sequence
  derived and/or modified sequence
atgagccggttcttcaccaccggcagcgacagcgagagcgagagctccctgagcggggaggaactcgtgacaaagccggtgggcgggaattatggtaagcaacctctgttgttatctgaggacgaagaggacacaaaacgcgtggtccgctccgcaaaggacaagcgttttgaggaactgaccaatctgataagaactattcgtaacgctatgaaaattcgcgatgtgactaagtgcctcgaggaattcgagctactggggaaggcctacggtaaggctaagagcatcgttgataaggagggagtcccaaggttttatattcgcattctcgccgaccttgaggactatctcaatgaactttgggaggataaggagggaaagaagaaaatgaataaaaataacgccaaagccctttccaccctcaggcaaaagattcgtaaatataatcgcgactttgagagtcatatcacgagttataagcagaatcccgagcagtctgcagacgaggacgccgagaaaaacgaggaggacagcgagggcagctcagacgaggacgaggatgaagatggagtcagcgccgctactttccttaaaaagaagtctgaggcgccttccggcgagtcccggaagttcctaaaaaagatggacgatgaggacgaagatagtgaagactctgaggatgatgaggactgggacaccgggtcaacgtccagcgattctgactccgaggaagaagaggggaagcagacagcactagctagtcggtttttgaagaaggctcccaccacagatgaagataagaaggccgccgagaagaagcgggaggataaggcaaagaagaaacatgatagaaagagcaagcgcctggacgaggaagaggaggacaatgagggcggagaatgggagagggtgcgggggggtgtgcccctggtaaaagaaaagcccaaaatgtttgctaagggcactgaaatcactcatgcagtggtcatcaaaaagctgaatgaaattttacaagcccggggaaagaagggtactgaccgggcagcccagattgaattattacagctccttgtccagattgctgccgaaaataatttgggcgagggcgtaatagttaagattaagtttaatattattgcctccctttacgattacaatcccaatttggctacctatatgaaacctgagatgtgggggaaatgtctcgactgtatcaatgagcttatggacatactatttgctaacccaaatattttcgtcggcgaaaacatcctggaagagtctgagaatcttcacaacgcagaccagccactgcgggtgcgcggctgcatacttacactcgttgagagaatggatgaggaattcacaaaaataatgcagaatacggacccccactcacaggaatatgtagaacacctgaaagatgaagcccaggtctgtgctattattgaaagggtccagcggtacctggaagagaaagggaccactgaagaagtttgcaggatatacctcctgcgtatcctacatacatattacaagttcgactataaggcgcaccagcggcagctgacccctccagaaggtagctctaaatctgagcaggatcaggctgagaacgagggagaggacagcgctgtacttatggaacgtctctgcaaatacatctacgcaaaggatcggaccgatagaataaggacatgtgccatcctttgtcatatttatcaccacgcccttcatagccgctggtatcaggctcgagacctgatgctaatgtcacacttacaagacaatatccagcacgccgatcctcccgtccagattctgtacaataggacgatggttcagcttggcatatgcgcttttcggcagggtctaacaaaggacgcccacaacgcattgttggacatacagtctagtggcagagccaaggaactgctggggcaaggactcctcctgcgctccctgcaagagaggaaccaagaacaggagaaggtagaaagaaggcgccaggtgcctttccatttacacatcaacctcgagctcctggagtgcgtatatcttgtgtcagctatgctgcttgaaattccgtatatggccgcgcacgaaagcgacgccagacgtcgaatgatcagcaagcagttccatcaccagcttagggtgggggagaggcaaccccttcttggcccaccggagagcatgcgggagcatgtcgtcgcagcctctaaggcaatgaagatgggcgactggaagacttgtcattccttcattatcaatgagaaaatgaacggaaaagtctgggatttgttccctgaagccgacaaggtaagaacaatgttagtgcggaaaattcaggaagagtcactccggacctatctgttcacgtactcgtctgtgtacgactctatcagtatggagacattatcagatatgtttgagttggacctgcctacggtgcatagcatcataagtaagatgattatcaacgaagagctgatggcgtccctcgatcaaccaacccaaacggtggtaatgcataggaccgaacctactgcacagcagaatctcgcgctgcaacttgctgagaagctggggagcctggtcgagaacaacgagcgggtctttgaccacaaacagggcacatacgggggatacttcagggaccagaaggacggataccgaaaaaacgagggatatatgaggagagggggttaccggcagcagcagtcacagaccgcatattag

SEQ ID NO: 94568 - DNA, 2742 bp, Artificial Sequence
  derived and/or modified sequence
atgagccggttcttcaccaccggcagcgacagcgagagcgagagcagtctaagtggcgaggaactcgtgaccaagcctgtaggggggaattacgggaagcagcctttacttctctcagaagacgaggaggacaccaagcgtgtggtgcgttctgcaaaggacaagaggtttgaggaactgacgaatctgattcgaactatacgtaacgctatgaagatccgcgacgtaaccaagtgcctcgaggaatttgagcttttgggtaaagcctatggcaaagcaaagtcaattgtcgataaggaaggagtgccacgcttctacattagaattcttgctgatctcgaagactacttaaatgaactctgggaagataaggaggggaaaaaaaagatgaataagaacaacgcaaaagccctgagcacgctccgtcagaagatccgtaaatataacagagatttcgaatcccatatcacctcttacaagcagaaccctgagcagtccgccgatgaggacgccgaaaagaatgaagaagacagtgaggggagctccgatgaggatgaagacgaggatggtgtatccgcagcaacgtttctgaaaaagaaaagcgaggctccatccggagaatccagaaaatttcttaaaaagatggatgacgaagacgaagacagcgaggacagtgaggatgatgaggattgggatactgggtccacctcttcagattccgattccgaagaggaggaaggaaaacaaaccgccctcgcttccagattcctgaaaaaagcacctacaacggatgaggacaaaaaggctgcagaaaagaagagggaagacaaagcgaagaaaaagcatgaccggaaatctaaaaggctcgacgaggaagaagaagataacgagggcggcgaatgggaaagagtgagaggtggggtaccccttgtgaaagaaaagcctaagatgtttgccaaaggaaccgaaatcacacacgccgtggtaatcaagaaactcaacgagatcctacaggctcgtggaaagaagggtaccgatcgcgcagcgcagatcgaactgctacaacttctggtgcaaatcgccgccgaaaataatttaggtgagggggtcatcgtgaaaatcaaattcaacataatcgcttcattgtatgattataaccccaaccttgccacatacatgaagccagagatgtggggcaagtgtttggattgcatcaacgagttaatggatatcctgttcgcaaatccaaatatctttgtcggcgagaacatcctggaggaaagcgaaaatctgcacaatgccgaccaacccctgcgggtacgcggttgtatcttgacactggttgagcgaatggacgaggagttcacgaagattatgcagaatacagatccccattcacaagaatatgtggaacacttaaaggacgaagcccaggtatgcgcaataatcgagagggttcaacggtacctcgaagagaagggtactactgaagaggtctgcagaatttatttactgaggatactacacacgtattacaagttcgactacaaggctcaccagcgacaattgaccccaccggaggggtcatctaagtcagaacaggatcaggcggagaatgagggcgaagacagtgcagtactgatggagcggctatgtaagtacatttacgccaaggaccggaccgataggatcagaacttgcgctattttgtgccacatttaccatcatgctcttcactcacgatggtatcaggcacgcgacctgatgctaatgtctcacctccaggacaacatccagcacgccgatccgcctgttcagattctctataatcggacgatggtgcaactgggtatctgcgccttccgacagggacttaccaaagacgcgcacaacgcccttctcgatattcaatccagcggtagagccaaggaattgctcggccagggcttactgcttcggtccctacaagagcgtaaccaggagcaggagaaggtggaacggcggcgtcaggtaccattccacctgcacatcaaccttgagctcctagagtgcgtgtatctggtctctgcaatgctcctggagattccatacatggcagcccatgaatcagacgcgaggcgccgtatgatttctaagcagttccaccatcaactgcgcgtgggggagaggcaaccgctgctcggcccgccagagtccatgcgagagcatgtggttgctgctagtaaagccatgaaaatgggcgactggaagacctgccattcctttatcataaatgagaaaatgaacggtaaggtctgggacctgtttcccgaagcggataaagtgagaacaatgctggttcgtaaaatccaggaagagtcacttagaacctaccttttcacatactcttcggtatacgactcaatttccatggagactttgtctgacatgtttgaactagatctccccacagtgcactccattattagcaagatgatcataaacgaggaacttatggctagcttggaccagccaactcagactgtagtgatgcatagaacagagcctaccgcccagcagaacctggccctccagctggcggaaaaattggggtctttagtggagaacaatgagagagtctttgatcacaaacaggggacttacggtggctattttcgggaccagaaggacgggtatcgtaaaaacgaagggtacatgcgaagaggtggatacagacagcagcagagccagaccgcctactag

SEQ ID NO: 94569 - DNA, 2697 bp, Artificial Sequence
  derived and/or modified sequence
atgagccggttcttcaccaccggcagcgacagcgagagcgagagctcactgtccggagaggaattagtaactaaaccagtgggcggaaactatgggaaacagcctttgctcttatcagaggacgaggaggacaccaagcgggtggtgcggagcgctaaagataagcgcttcgaagagctcaccaacctgataaggacaatcaggaacgctatgaagatccgggatgtgaccaaatgcctcgaggagtttgagctcttgggcaaggcgtacggcaaggccaaatccattgtggacaaagaaggagtccccaggttctacattcggattcttgctgacctggaggattatttgaacgaactctgggaggataaagaaggaaagaaaaagattcggaaatataaccgggactttgaatctcatattacctcgtacaagcaaaaccccgagcaatcggccgacgaggacgccgaaaaaaacgaagaagactcagaaggatcttctgatgaagacgaggacgaggatggcgtatctgccgctacattcctaaaaaaaaagagcgaggctccaagcggggaatctcgtaagttcttaaagaagatggacgatgaggatgaggatagcgaggatagtgaggatgacgaggactgggacaccggttcaacaagctcagattcagactctgaagaggaagagggcaaacagacagcccttgcgagccgattcctcaagaaggctcccaccaccgatgaggataaaaaagcagctgagaagaaaagagaagacaaggcaaagaagaagcatgatcggaagagcaagcgtttagacgaggaggaagaagataacgaagggggggaatgggaaagagtacgcggaggtgtcccactcgtcaaggagaagcctaaaatgttcgccaaaggaaccgagattacacacgccgtcgtgattaagaagctcaacgagattcttcaggcccgggggaagaaaggcaccgatcgcgcggcacagatcgaactactccagctgctggtgcaaatcgcagccgaaaataacctcggcgaaggagttatcgtgaagataaaattcaatattatagccagtctctacgactataacccaaatttggcaacgtacatgaaaccggaaatgtgggggaaatgtctggattgtattaacgaattgatggacatcctgttcgccaacccgaatatatttgtcggagagaacatactggaagaatctgagaaccttcacaatgcagatcaaccattacgagtacggggctgcatcttgaccctggtcgaacggatggatgaagagttcacaaaaattatgcaaaatacagatcctcactctcaggagtatgtcgagcacctcaaggacgaggcccaagtctgtgcaatcatagagagggtccagaggtatttggaggaaaagggaacaacagaggaggtttgccggatctacttgctgagaattctccacacttattacaaattcgactacaaagcccatcaacgccagttgacccccccagaggggtcctccaagagcgagcaggaccaagcagagaatgagggagaggactccgccgtgctaatggagagactgtgcaaatacatttacgctaaggatagaaccgacagaatacgaacctgtgctatactgtgccacatctaccatcacgccttgcattctagatggtaccaagccagagacctgatgctgatgagccacctacaggataatattcagcacgccgaccccccagtacagatcctatataatcggacaatggtgcaattgggtatttgtgcctttcggcaggggcttaccaaggatgcccataacgccttactcgacattcagtcctcgggtcgggcaaaggagctgctcggccaagggttgcttctcaggtcattgcaggagcgcaatcaggaacaggagaaggtggagcggcgcagacaggtgcccttccacctacacatcaatctcgagctgctggaatgtgtgtacctggtgtccgccatgctgttggaaataccatatatggctgcacacgaaagcgatgcaaggcggcgaatgatatctaagcaatttcaccatcagctccgagtaggggagcggcaacctctactgggacctcctgagtccatgagagagcacgtggtcgcagcctctaaggctatgaagatgggagactggaagacatgccacagtttcatcatcaatgagaaaatgaacggcaaggtatgggacttgttccctgaagctgacaaggtgcggactatgttggtacggaagattcaggaagaaagtcttcgaacttacctgttcacgtacagttccgtatacgatagtatctctatggagacgctctctgatatgttcgagctggacttaccaaccgtccactcaattatttctaagatgataataaacgaagagctgatggcctctctggatcaacccacacagacagtggttatgcatcggaccgagcccacggcacagcagaaccttgctttacaactcgcagagaagctggggtccctggtggaaaataacgagcgcgtatttgatcataagcaggggacttacgggggttattttcgggaccagaaagatggctacagaaaaaatgaggggtacatgaggcggggaggataccgccaacagcagagccagaccgcttactag

SEQ ID NO: 94570 - DNA, 2742 bp, Artificial Sequence
  derived and/or modified sequence
atgagcagattctttactacgggcagcgattccgagagtgagtcgtccctgagcggcgaagagttggtcaccaaacctgtcggcggaaactatggtaagcagccccttctgctcagtgaggacgaagaagacactaaaagagttgttagatcagctaaggacaagcggttcgaggaacttaccaacctgatcagaaccattaggaacgccatgaagatcagagacgtaacgaagtgcctcgaagagttcgaactgctcggaaaagcctacgggaaggccaaaagcatagtggacaaagaaggggttccaaggttctacatcaggattctggcagacttagaagactatctgaacgagttatgggaggataaggagggcaaaaagaaaatgaataagaataacgcaaaggcattaagtacacttcggcagaagatccgcaagtataacagggactttgaatcacacattactagctacaaacagaatcctgagcagagtgccgatgaggatgccgaaaaaaatgaagaggactcagaaggcagctccgacgaagacgaggatgaggatggggtgtcggctgcaacttttcttaaaaaaaaatcggaggctccctctggcgaatcccgaaagttccttaagaaaatggatgatgaggacgaagactccgaggatagcgaagatgacgaggattgggataccggctcaacatctagcgacagcgactcagaggaagaagagggcaagcagaccgccctcgcttcaaggttcctgaaaaaagctcccacgactgacgaggataagaaggccgctgaaaaaaaaagggaggataaggcaaaaaagaagcacgaccgcaagtctaaaagactggatgaggaggaggaggacaatgagggcggtgagtgggaaagagtgcgtgggggtgtgcccctcgtgaaggagaagcccaaaatgtttgctaaggggacggaaatcacccacgcagtggtgatcaaaaagctgaatgagattttacaggcccgaggcaagaagggtactgaccgcgctgctcaaatcgaattgctgcagctccttgtgcagattgccgctgagaacaatctgggcgaaggagtgattgttaaaatcaagtttaacatcatcgccagtctgtacgactataatcctaatctggccacgtatatgaagccggaaatgtggggcaagtgtctggattgcataaacgagctcatggatatcctcttcgccaaccccaacatctttgtgggcgagaacattttggaagagagtgagaatctgcataatgcagatcagcctctcagggtgagaggctgtatccttacactcgtagaaagaatggacgaggagtttacaaaaatcatgcagaacaccgatcctcatagccaggagtacgtggaacaccttaaagatgaggcccaagtttgcgccatcatcgagcgcgtgcagcgttatcttgaagagaaaggaactacggaagaagtgtgccgcatttacttgctgagaattctgcatacttattacaaattcgactataaggcccatcagagacagttaacgcccccagaggggtcttcgaaatctgagcaggaccaagcagagaatgagggagaggatagcgcagtgctaatggaacgcttgtgtaagtacatctacgctaaggataggacggataggatacggacatgtgcaatcttgtgccatatttatcaccacgctcttcatagccggtggtatcaagcaagggatcttatgttgatgtctcaccttcaggacaacattcagcacgcagacccacctgtgcagatactttataaccgaaccatggttcagctgggcatctgcgcattcagacaaggactcacaaaggacgctcataacgcactcttagacattcagagtagcggacgggcaaaagaactgctgggtcaagggctgttgttgagatcacttcaggaacgcaatcaggagcaagaaaaggtggagagacgacggcaggtgccatttcacctgcatataaacttagaattgctggagtgtgtgtaccttgtgagcgccatgctgctggagatcccctacatggctgcccatgagtctgatgcgaggcgtcgtatgatatcaaaacagttccaccatcagctgagggtcggagaacgccaacctctgctcggaccacccgaatcaatgagagaacatgttgtagccgcatctaaagctatgaagatgggggactggaaaacctgccattcctttattatcaatgaaaagatgaacggcaaggtgtgggatctatttcccgaagctgacaaagttcgcaccatgctggtgcggaaaatacaggaagagtcactgagaacttatctgtttacatattccagcgtctatgacagcatatcaatggagactctgagcgacatgttcgaactagacctccccacggtgcactccataattagtaagatgataattaacgaggagctgatggccagcttggaccagcccactcagaccgtcgtgatgcaccgcactgagcctacagcccagcaaaacctggccttgcagctagcagagaaattgggaagtttggtggaaaacaatgagagagtcttcgatcataagcagggcacgtacggcggatatttcagagatcagaaggatggatacagaaagaatgaggggtacatgaggagggggggttataggcagcagcaaagccagaccgcgtattag

SEQ ID NO: 94571 - DNA, 2742 bp, Artificial Sequence
  derived and/or modified sequence
atgagcaggttcttcacgactgggtcggattcagagagtgagagctcactgtctggggaagagctggtaaccaaacctgtgggaggtaactatgggaaacagccactcttgttgtcagaggatgaagaagatacaaaacgggtcgttcgaagcgctaaagataagaggtttgaggaactaactaaccttattcgcaccatcagaaacgctatgaagatacgcgacgtcaccaagtgcctggaagaatttgagctcttgggaaaggcgtatgggaaagccaaaagcattgttgataaagagggagtgccacgcttctacatacggattttggccgacctggaagactacctgaacgagctgtgggaagacaaggagggcaaaaagaaaatgaacaagaacaacgctaaggccctaagtaccttgcggcagaagatacggaagtacaaccgagattttgaaagtcatattacgtcttataagcaaaaccctgaacagtccgctgatgaggacgcagagaagaacgaggaagactcagaagggtcatccgacgaggacgaggatgaggacggagtttctgcggcaacattcttgaaaaagaaatctgaagccccatccggggagtcccgcaaattcctcaagaagatggatgacgaggacgaggactcagaagattccgaggacgatgaagactgggacactggaagtacatcctcggacagcgattcagaggaagaagaagggaaacagaccgccctcgccagtcgatttctgaaaaaggcccctactacagatgaagataaaaaggccgcagaaaagaagagagaggataaggcgaaaaagaagcatgataggaagagtaaacggctggacgaagaggaggaagacaacgaaggtggagagtgggagagagtgagaggcggtgtaccgctagtgaaagagaagccaaagatgtttgctaaggggactgaaattacccacgctgtcgtgattaaaaaacttaatgagattctccaggccagagggaagaagggaaccgacagggcagctcagattgaactgctgcagctgctcgtacagattgccgctgagaataatttaggagagggcgtgatcgtcaagataaagtttaacattatagccagtctgtatgattacaatcctaacttggctacatatatgaagcccgagatgtggggcaagtgcctggattgtattaacgaacttatggatattctgtttgccaaccccaacatatttgttggtgagaatattttggaagaatctgaaaacctgcacaacgctgaccagcctctccgtgtcagaggctgcatcctcaccctggttgagcggatggacgaggagttcactaagattatgcagaacacagatccccattctcaggagtatgtggagcatctcaaagacgaggctcaggtctgcgcgattatcgagcgcgtacagaggtatctggaagagaagggtacaactgaggaggtttgcagaatatatctgctccgcatcctgcatacatattataagttcgactataaggcccatcagaggcagctcacgccacccgagggatcctctaagagcgaacaggaccaggctgagaatgagggcgaggactctgctgtattaatggagaggctatgcaagtatatctacgccaaggacagaaccgacagaatcaggacctgtgcgattctatgtcatatataccaccatgccctccacagtaggtggtaccaagccagagatttgatgttgatgagccatctgcaagataacatccagcatgccgatccccctgtgcagatcctctacaaccgcaccatggttcagctgggaatatgcgccttccgccaaggactgaccaaggacgcgcataatgcattgcttgacattcaatccagcggtcgggcaaaggagctcctgggccaggggctcctcctgcgatcacttcaagaacgaaatcaagaacaggagaaggtggaaaggcgtcgtcaagtgccctttcacctgcacatcaacctcgaacttctagagtgcgtctatctggtgtcggcgatgctgctggaaatcccgtatatggcagcacacgaaagtgatgcgaggagacggatgatctccaagcagtttcatcaccagctacgggtgggcgagcgccagccgttactgggccctccagagagcatgcgggaacacgtagtcgccgcttctaaggcaatgaagatgggtgactggaagacatgccactccttcattattaacgagaaaatgaacggaaaggtctgggacttattcccggaagccgacaaggttagaacgatgttggtgcgaaagatccaagaagagagtctgcgcacttatctgtttacttattcatccgtttacgatagtattagcatggagaccctatcagatatgtttgaacttgacctgccaaccgtccactcaatcatcagtaagatgattataaacgaagagcttatggcctctctggaccagccgacacaaaccgtggtgatgcaccgaactgagcctaccgcccaacagaatctggcccttcagttggccgaaaagcttggcagcctggtggagaacaacgagagagtttttgatcataaacaggggacatacggcggttatttcagagaccaaaaagatggctatcggaagaatgaaggatatatgcgacgaggagggtatagacagcagcagtcgcaaactgcatattag

SEQ ID NO: 94572 - DNA, 2742 bp, Artificial Sequence
  derived and/or modified sequence
atgtctcgcttctttaccaccggttcagacagtgagtctgagtcatctctttcaggggaagagctggtgaccaagcctgttggcggaaactacggaaaacagccactgctcctgtctgaggacgaggaagatacgaagagagtagtacgttccgccaaggataaacgttttgaggaactaacaaatctgatccgcacaatacgaaacgccatgaaaattcgagatgtcacaaagtgtctggaagagtttgagctactgggaaaggcatacgggaaagcgaagagcatcgtggacaaagaaggtgtgcctcggttttacatccgcatcctggccgacttagaggattacctcaacgaattgtgggaagacaaggaaggtaagaaaaaaatgaataagaataacgcaaaagcattgtccacactcagacaaaaaattcggaagtacaatcgagattttgagtcacacattacctcctataagcagaatcctgagcaatcggccgacgaagacgctgagaagaatgaggaggattctgaaggaagctcagatgaggatgaggacgaggacggggtgagcgctgccacctttctgaagaaaaagtctgaggcaccaagtggggaaagccgcaagttcctgaagaagatggacgacgaggacgaagacagcgaggatagcgaagatgatgaggattgggacaccggcagcacttcttcagacagcgattccgaggaggaagagggcaagcagaccgctttagctagtcgttttttaaaaaaggcgccaacgacggacgaggacaaaaaagccgcagagaagaagcgggaagacaaggccaagaagaagcatgataggaaatcaaaaaggctggacgaggaagaagaagataacgagggtggggaatgggagcgggttagaggcggagtaccactggtgaaggagaaacccaagatgttcgctaaggggacggagatcacacatgcggtagtgattaagaagctgaacgaaatacttcaggctcgtggtaagaaaggtactgatcgggctgcacagatcgagctcttgcagcttctggtgcagattgccgctgaaaacaatctgggggaaggagtgatcgtgaaaataaaattcaacattatagcttccctatatgattacaaccccaacctggcgacctatatgaagcccgagatgtggggaaagtgcctggattgtattaacgaactcatggacattctcttcgcgaatcccaacatctttgtcggagaaaacattctcgaggagtcagaaaatctccataatgcagaccagccactgagggttagaggatgcatactgacgttagtggagcggatggacgaggaattcacgaaaattatgcagaacacggatcctcacagccaggaatacgtggaacatctcaaggacgaggcccaggtgtgcgccatcattgagcgagtgcagagatatctggaggaaaaaggtaccaccgaggaggtgtgtcgaatctacctgctcagaatccttcatacgtattacaaattcgactacaaggctcatcagcgacagttgacccctccggagggatcatctaagagtgagcaggaccaggccgagaatgagggagaagattcagctgtgctgatggagcggctttgtaagtacatctatgctaaagatcgaacagaccggatccgaacttgcgctattctgtgccatatttaccaccacgctctgcatagccggtggtaccaagctagggatctgatgctaatgtcccacctccaggacaatattcagcacgccgaccctccagttcagatcctgtacaatcggactatggtgcagctcggcatctgtgcctttcgccagggcctgacgaaagatgcccacaacgctctcctagacatccagtcctccggtcgggctaaggaactgcttggacagggcttactcctccgaagcctgcaagagaggaatcaggagcaggagaaagtggaaagacgcagacaggttccttttcatctgcacattaacctcgaactgctggaatgcgtgtatcttgtatcagccatgttactggagattccatacatggccgctcacgaatctgacgccagacgcaggatgatctccaaacagttccaccatcagctgagagtgggcgagcggcagccgctgctcggacctcccgagagcatgcgcgaacacgtggtggcggcaagcaaggctatgaagatgggtgactggaaaacttgtcattcttttataattaatgaaaagatgaacggcaaagtctgggatctgttcccagaagcagataaggtcaggactatgctcgttagaaagatccaggaggagagtctcaggacttatttgttcacctattcatctgtgtatgattcaattagcatggagacactgagcgacatgttcgaactggatctgccaactgtgcattcaatcatcagcaagatgatcatcaatgaggaactcatggcaagcctggaccagcctacacagacagttgtaatgcaccggacggaacctacagcacagcagaacctggctttgcaactcgcggagaaactagggagtctcgtggagaataatgagcgtgtcttcgaccacaaacagggtacctacgggggttactttcgagatcagaaagacggataccgcaagaacgaaggatatatgcgacgcggaggatacagacagcagcagagtcagactgcctattag

SEQ ID NO: 94573 - DNA, 2697 bp, Artificial Sequence
  derived and/or modified sequence
atgtcccggttttttactaccgggtcagacagcgagagcgaaagtagcctgtctggagaggagctggtgacgaagcctgtgggaggcaactatggcaagcaaccactattgttgtccgaggacgaagaggacacaaagcgagttgtcagatctgcgaaggataagagatttgaggagcttacaaatttgatcaggaccataagaaatgccatgaagattcgcgacgtgaccaagtgtctggaagaatttgagctcctggggaaggcatacggcaaggccaaatccatcgtggataaggaaggcgtgccaaggttttacatcaggatattggcagatctcgaggattatctcaatgaactttgggaagacaaagagggaaaaaagaagatccgcaaatacaaccgcgatttcgaatcccatatcaccagctacaaacagaatccagagcagagtgcagacgaggacgccgaaaagaatgaagaagactccgaagggtcttccgacgaggacgaggatgaggatggtgtaagcgccgctacattcttgaagaaaaaatccgaggcaccatctggtgagtccagaaagttcttaaagaagatggacgacgaagacgaggactccgaagactccgaggatgacgaggactgggacactggttctacctccagtgactcagactcagaggaggaggaagggaagcagactgccctcgcctctcggttcttgaaaaaagcgcctacaacagacgaggacaaaaaagcagctgaaaaaaagcgcgaggataaagctaagaaaaagcacgaccgaaagtcaaaaagacttgacgaggaagaggaagataacgaaggaggagagtgggagagggttcgcggaggggttcctttggtaaaggaaaaacctaaaatgttcgccaagggaacagagatcacacacgcagttgtgatcaagaagttgaacgagatacttcaggcccgtggaaagaagggcaccgatagagccgctcagatcgagttgctgcaacttctggtgcagattgcagccgagaacaatctgggcgaaggcgtgattgtcaagatcaagtttaatattattgcaagcctctacgattataaccctaatttggcaacttacatgaagccagaaatgtgggggaagtgtctggattgcatcaatgagctcatggatatcttgttcgccaaccctaatatcttcgtcggcgagaacattctggaagaaagcgaaaatttgcacaatgccgatcaaccattacgagttcgcggatgtattttgactcttgtggagaggatggatgaggagttcacaaagataatgcaaaacacagatccgcacagtcaagagtatgtcgagcaccttaaagacgaagcccaagtttgtgctattatcgagagagtgcagcggtacttggaggagaaaggcactactgaggaggtgtgtagaatctacttgctgcggattctccacacctactacaagtttgactataaggctcaccagagacagttgacgccccctgaaggatcttccaagtctgaacaggaccaagcagaaaacgagggcgaagactctgcagttctgatggaaagactgtgcaagtatatctacgcaaaagatagaaccgacagaatcaggacctgcgctatactttgccacatctatcaccatgctcttcactcccggtggtatcaggcaagggacctgatgctaatgagccatctgcaggataatattcagcacgctgatccaccagttcagatattgtataatcgcactatggtgcagctgggtatctgcgccttcaggcaagggctgacgaaggacgctcacaacgcactcttggacatccagagttcaggaagagccaaggagctgctcgggcaaggactgctcttgcgctctctgcaagaaagaaatcaggaacaggagaaggtcgaacggcgacgccaggtgccttttcacctgcatattaatttggaactgcttgagtgtgtgtaccttgtgagtgctatgctccttgagataccctacatggcggctcacgagagtgacgcacgcagacgcatgatctccaaacagttccaccatcagttgcgggtaggtgagaggcagcccctgctggggcctccagagtccatgcgcgaacacgtagtagctgcttctaaggcgatgaaaatgggtgattggaaaacatgtcatagcttcataatcaatgagaaaatgaacggaaaggtctgggacttgtttccagaggcagataaggtgagaactatgctggtccggaaaattcaagaagagtcccttcggacttacctgttcacatattctagtgtgtacgactccatttcaatggaaaccctgtctgatatgtttgaactcgatctgcccacagttcacagcattattagcaagatgatcataaatgaagagctgatggctagcctggaccaaccaacccaaacagtggttatgcatcgcaccgaacctaccgctcagcaaaacttggcccttcagctggccgaaaaactagggtcactggtagagaacaatgaacgcgttttcgatcacaagcagggaacgtatggaggatactttcgcgaccagaaggacggttaccgaaaaaacgagggatatatgcggaggggagggtatcgacagcagcagtcacagaccgcgtattag

SEQ ID NO: 94574 - DNA, 2742 bp, Artificial Sequence
  derived and/or modified sequence
atgagcagattcttcaccaccggcagcgacagcgagagcgagagcagcctgagcggcgaggagctggtgaccaagcccgtgggcggcaactacggcaagcagcccctgctgctgagcgaggacgaggaggacaccaagagagtggtgagaagcgccaaggacaagagattcgaggagctgaccaacctgatcagaaccatcagaaacgccatgaagatcagagacgtgaccaagtgcctggaggagttcgagctgctgggcaaggcctacggcaaggccaagagcatcgtggacaaggagggcgtgcccagattctacatcagaatcctggccgacctggaggactacctgaacgagctgtgggaggacaaggagggcaagaagaagatgaacaagaacaacgccaaggccctgagcaccctgagacagaagatcagaaagtacaacagagacttcgagagccacatcaccagctacaagcagaaccccgagcagagcgccgacgaggacgccgagaagaacgaggaggacagcgagggcagcagcgacgaggacgaggacgaggacggcgtgagcgccgccaccttcctgaagaagaagagcgaggcccccagcggcgagagcagaaagttcctgaagaagatggacgacgaggacgaggacagcgaggacagcgaggacgacgaggactgggacaccggcagcaccagcagcgacagcgacagcgaggaggaggagggcaagcagaccgccctggccagcagattcctgaagaaggcccccaccaccgacgaggacaagaaggccgccgagaagaagagagaggacaaggccaagaagaagcacgacagaaagagcaagagactggacgaggaggaggaggacaacgagggcggcgagtgggagagagtgagaggcggcgtgcccctggtgaaggagaagcccaagatgttcgccaagggcaccgagatcacccacgccgtggtgatcaagaagctgaacgagatcctgcaggccagaggcaagaagggcaccgacagagccgcccagatcgagctgctgcagctgctggtgcagatcgccgccgagaacaacctgggcgagggcgtgatcgtgaagatcaagttcaacatcatcgccagcctgtacgactacaaccccaacctggccacctacatgaagcccgagatgtggggcaagtgcctggactgcatcaacgagctgatggacatcctgttcgccaaccccaacatcttcgtgggcgagaacatcctggaggagagcgagaacctgcacaacgccgaccagcccctgagagtgagaggctgcatcctgaccctggtggagagaatggacgaggagttcaccaagatcatgcagaacaccgacccccacagccaggagtacgtggagcacctgaaggacgaggcccaggtgtgcgccatcatcgagagagtgcagagatacctggaggagaagggcaccaccgaggaggtgtgcagaatctacctgctgagaatcctgcacacctactacaagttcgactacaaggcccaccagagacagctgaccccccccgagggcagcagcaagagcgagcaggaccaggccgagaacgagggcgaggacagcgccgtgctgatggagagactgtgcaagtacatctacgccaaggacagaaccgacagaatcagaacctgcgccatcctgtgccacatctaccaccacgccctgcacagcagatggtaccaggccagagacctgatgctgatgagccacctgcaggacaacatccagcacgccgacccccccgtgcagatcctgtacaacagaaccatggtgcagctgggcatctgcgccttcagacagggcctgaccaaggacgcccacaacgccctgctggacatccagagcagcggcagagccaaggagctgctgggccagggcctgctgctgagaagcctgcaggagagaaaccaggagcaggagaaggtggagagaagaagacaggtgcccttccacctgcacatcaacctggagctgctggagtgcgtgtacctggtgagcgccatgctgctggagatcccctacatggccgcccacgagagcgacgccagaagaagaatgatcagcaagcagttccaccaccagctgagagtgggcgagagacagcccctgctgggcccccccgagagcatgagagagcacgtggtggccgccagcaaggccatgaagatgggcgactggaagacctgccacagcttcatcatcaacgagaagatgaacggcaaggtgtgggacctgttccccgaggccgacaaggtgagaaccatgctggtgagaaagatccaggaggagagcctgagaacctacctgttcacctacagcagcgtgtacgacagcatcagcatggagaccctgagcgacatgttcgagctggacctgcccaccgtgcacagcatcatcagcaagatgatcatcaacgaggagctgatggccagcctggaccagcccacccagaccgtggtgatgcacagaaccgagcccaccgcccagcagaacctggccctgcagctggccgagaagctgggcagcctggtggagaacaacgagagagtgttcgaccacaagcagggcacctacggcggctacttcagagaccagaaggacggctacagaaagaacgagggctacatgagaagaggcggctacagacagcagcagagccagaccgcctactag

SEQ ID NO: 94575 - DNA, 2697 bp, Artificial Sequence
  derived and/or modified sequence
atgagcagattcttcaccaccggcagcgacagcgagagcgagagcagcctgagcggcgaggagctggtgaccaagcccgtgggcggcaactacggcaagcagcccctgctgctgagcgaggacgaggaggacaccaagagagtggtgagaagcgccaaggacaagagattcgaggagctgaccaacctgatcagaaccatcagaaacgccatgaagatcagagacgtgaccaagtgcctggaggagttcgagctgctgggcaaggcctacggcaaggccaagagcatcgtggacaaggagggcgtgcccagattctacatcagaatcctggccgacctggaggactacctgaacgagctgtgggaggacaaggagggcaagaagaagatcagaaagtacaacagagacttcgagagccacatcaccagctacaagcagaaccccgagcagagcgccgacgaggacgccgagaagaacgaggaggacagcgagggcagcagcgacgaggacgaggacgaggacggcgtgagcgccgccaccttcctgaagaagaagagcgaggcccccagcggcgagagcagaaagttcctgaagaagatggacgacgaggacgaggacagcgaggacagcgaggacgacgaggactgggacaccggcagcaccagcagcgacagcgacagcgaggaggaggagggcaagcagaccgccctggccagcagattcctgaagaaggcccccaccaccgacgaggacaagaaggccgccgagaagaagagagaggacaaggccaagaagaagcacgacagaaagagcaagagactggacgaggaggaggaggacaacgagggcggcgagtgggagagagtgagaggcggcgtgcccctggtgaaggagaagcccaagatgttcgccaagggcaccgagatcacccacgccgtggtgatcaagaagctgaacgagatcctgcaggccagaggcaagaagggcaccgacagagccgcccagatcgagctgctgcagctgctggtgcagatcgccgccgagaacaacctgggcgagggcgtgatcgtgaagatcaagttcaacatcatcgccagcctgtacgactacaaccccaacctggccacctacatgaagcccgagatgtggggcaagtgcctggactgcatcaacgagctgatggacatcctgttcgccaaccccaacatcttcgtgggcgagaacatcctggaggagagcgagaacctgcacaacgccgaccagcccctgagagtgagaggctgcatcctgaccctggtggagagaatggacgaggagttcaccaagatcatgcagaacaccgacccccacagccaggagtacgtggagcacctgaaggacgaggcccaggtgtgcgccatcatcgagagagtgcagagatacctggaggagaagggcaccaccgaggaggtgtgcagaatctacctgctgagaatcctgcacacctactacaagttcgactacaaggcccaccagagacagctgaccccccccgagggcagcagcaagagcgagcaggaccaggccgagaacgagggcgaggacagcgccgtgctgatggagagactgtgcaagtacatctacgccaaggacagaaccgacagaatcagaacctgcgccatcctgtgccacatctaccaccacgccctgcacagcagatggtaccaggccagagacctgatgctgatgagccacctgcaggacaacatccagcacgccgacccccccgtgcagatcctgtacaacagaaccatggtgcagctgggcatctgcgccttcagacagggcctgaccaaggacgcccacaacgccctgctggacatccagagcagcggcagagccaaggagctgctgggccagggcctgctgctgagaagcctgcaggagagaaaccaggagcaggagaaggtggagagaagaagacaggtgcccttccacctgcacatcaacctggagctgctggagtgcgtgtacctggtgagcgccatgctgctggagatcccctacatggccgcccacgagagcgacgccagaagaagaatgatcagcaagcagttccaccaccagctgagagtgggcgagagacagcccctgctgggcccccccgagagcatgagagagcacgtggtggccgccagcaaggccatgaagatgggcgactggaagacctgccacagcttcatcatcaacgagaagatgaacggcaaggtgtgggacctgttccccgaggccgacaaggtgagaaccatgctggtgagaaagatccaggaggagagcctgagaacctacctgttcacctacagcagcgtgtacgacagcatcagcatggagaccctgagcgacatgttcgagctggacctgcccaccgtgcacagcatcatcagcaagatgatcatcaacgaggagctgatggccagcctggaccagcccacccagaccgtggtgatgcacagaaccgagcccaccgcccagcagaacctggccctgcagctggccgagaagctgggcagcctggtggagaacaacgagagagtgttcgaccacaagcagggcacctacggcggctacttcagagaccagaaggacggctacagaaagaacgagggctacatgagaagaggcggctacagacagcagcagagccagaccgcctactag

SEQ ID NO: 94576 - protein, 1118 aa, Artificial Sequence
  derived and/or modified sequence
MDLGPGDAAGGGPLAPRPRRRRSLRRLFSRFLLALGSRSRPGDSPPRPQPGHCDGDGEGGFACAPGPVPAAPGSPGEERPPGPQPQLQLPAGDGARPPGAQGLKNHGNTCFMNAVVQCLSNTDLLAEFLALGRYRAAPGRAEVTEQLAALVRALWTREYTPQLSAEFKNAVSKYGSQFQGNSQHDALEFLLWLLDRVHEDLEGSSRGPVSEKLPPEATKTSENCLSPSAQLPLGQSFVQSHFQAQYRSSLTCPHCLKQSNTFDPFLCVSLPIPLRQTRFLSVTLVFPSKSQRFLRVGLAVPILSTVAALRKMVAEEGGVPADEVILVELYPSGFQRSFFDEEDLNTIAEGDNVYAFQVPPSPSQGTLSAHPLGLSASPRLAAREGQRFSLSLHSESKVLILFCNLVGSGQQASRFGPPFLIREDRAVSWAQLQQSILSKVRHLMKSEAPVQNLGSLFSIRVVGLSVACSYLSPKDSRPLCHWAVDRVLHLRRPGGPPHVKLAVEWDSSVKERLFGSLQEERAQDADSVWQQQQAHQQHSCTLDECFQFYTKEEQLAQDDAWKCPHCQVLQQGMVKLSLWTLPDILIIHLKRFCQVGERRNKLSTLVKFPLSGLNMAPHVAQRSTSPEAGLGPWPSWKQPDCLPTSYPLDFLYDLYAVCNHHGNLQAYCRNSLDGQWYSYDDSTVEPLREDEVNTRGAYILFYQKRNSIPPWSASSSMRGSTSSSLSDHWLLRLGSHAGSTRGSLLSWSSAPCPSLPQVPDSPIFTNSLCNQEKGGLEPRRLVRGVKGRSISMKAPTTSRAKQGPFKTMPLRWSFGSKEKPPGASVELVEYLESRRRPRSTSQSIVSLLTGTAGEDEKSASPRSNVALPANSEDGGRAIERGPAGVPCPSAQPNHCLAPGNSDGPNTARKLKENAGQDIKLPRKFDLPLTVMPSVEHEKPARPEGQKAMNWKESFQMGSKSSPPSPYMGFSGNSKDSRRGTSELDRPLQGTLTLLRSVFRKKENRRNERAEVSPQVPPVSLVSGGLSPAMDGQAPGSPPALRIPEGLARGLGSRLERDVWSAPSSLRLPRKASRAPRGSALGMSQRTVPGEQASYGTFQRVKYHTLSLGRKKTLPESSF

SEQ ID NO: 94577 - DNA, 3357 bp, Artificial Sequence
  derived and/or modified sequence
atggacctgggccccggcgacgccgccggcggcggccccctggcccccagacccagaagaagaagaagcctgagaagactgttcagcagattcctgctggccctgggcagcagaagcagacccggcgacagcccccccagaccccagcccggccactgcgacggcgacggcgagggcggcttcgcctgcgcccccggccccgtgcccgccgcccccggcagccccggcgaggagagaccccccggcccccagccccagctgcagctgcccgccggcgacggcgccagaccccccggcgcccagggcctgaagaaccacggcaacacctgcttcatgaacgccgtggtgcagtgcctgagcaacaccgacctgctggccgagttcctggccctgggcagatacagagccgcccccggcagagccgaggtgaccgagcagctggccgccctggtgagagccctgtggaccagagagtacaccccccagctgagcgccgagttcaagaacgccgtgagcaagtacggcagccagttccagggcaacagccagcacgacgccctggagttcctgctgtggctgctggacagagtgcacgaggacctggagggcagcagcagaggccccgtgagcgagaagctgccccccgaggccaccaagaccagcgagaactgcctgagccccagcgcccagctgcccctgggccagagcttcgtgcagagccacttccaggcccagtacagaagcagcctgacctgcccccactgcctgaagcagagcaacaccttcgaccccttcctgtgcgtgagcctgcccatccccctgagacagaccagattcctgagcgtgaccctggtgttccccagcaagagccagagattcctgagagtgggcctggccgtgcccatcctgagcaccgtggccgccctgagaaagatggtggccgaggagggcggcgtgcccgccgacgaggtgatcctggtggagctgtaccccagcggcttccagagaagcttcttcgacgaggaggacctgaacaccatcgccgagggcgacaacgtgtacgccttccaggtgccccccagccccagccagggcaccctgagcgcccaccccctgggcctgagcgccagccccagactggccgccagagagggccagagattcagcctgagcctgcacagcgagagcaaggtgctgatcctgttctgcaacctggtgggcagcggccagcaggccagcagattcggcccccccttcctgatcagagaggacagagccgtgagctgggcccagctgcagcagagcatcctgagcaaggtgagacacctgatgaagagcgaggcccccgtgcagaacctgggcagcctgttcagcatcagagtggtgggcctgagcgtggcctgcagctacctgagccccaaggacagcagacccctgtgccactgggccgtggacagagtgctgcacctgagaagacccggcggccccccccacgtgaagctggccgtggagtgggacagcagcgtgaaggagagactgttcggcagcctgcaggaggagagagcccaggacgccgacagcgtgtggcagcagcagcaggcccaccagcagcacagctgcaccctggacgagtgcttccagttctacaccaaggaggagcagctggcccaggacgacgcctggaagtgcccccactgccaggtgctgcagcagggcatggtgaagctgagcctgtggaccctgcccgacatcctgatcatccacctgaagagattctgccaggtgggcgagagaagaaacaagctgagcaccctggtgaagttccccctgagcggcctgaacatggccccccacgtggcccagagaagcaccagccccgaggccggcctgggcccctggcccagctggaagcagcccgactgcctgcccaccagctaccccctggacttcctgtacgacctgtacgccgtgtgcaaccaccacggcaacctgcaggcctactgcagaaacagcctggacggccagtggtacagctacgacgacagcaccgtggagcccctgagagaggacgaggtgaacaccagaggcgcctacatcctgttctaccagaagagaaacagcatccccccctggagcgccagcagcagcatgagaggcagcaccagcagcagcctgagcgaccactggctgctgagactgggcagccacgccggcagcaccagaggcagcctgctgagctggagcagcgccccctgccccagcctgccccaggtgcccgacagccccatcttcaccaacagcctgtgcaaccaggagaagggcggcctggagcccagaagactggtgagaggcgtgaagggcagaagcatcagcatgaaggcccccaccaccagcagagccaagcagggccccttcaagaccatgcccctgagatggagcttcggcagcaaggagaagccccccggcgccagcgtggagctggtggagtacctggagagcagaagaagacccagaagcaccagccagagcatcgtgagcctgctgaccggcaccgccggcgaggacgagaagagcgccagccccagaagcaacgtggccctgcccgccaacagcgaggacggcggcagagccatcgagagaggccccgccggcgtgccctgccccagcgcccagcccaaccactgcctggcccccggcaacagcgacggccccaacaccgccagaaagctgaaggagaacgccggccaggacatcaagctgcccagaaagttcgacctgcccctgaccgtgatgcccagcgtggagcacgagaagcccgccagacccgagggccagaaggccatgaactggaaggagagcttccagatgggcagcaagagcagcccccccagcccctacatgggcttcagcggcaacagcaaggacagcagaagaggcaccagcgagctggacagacccctgcagggcaccctgaccctgctgagaagcgtgttcagaaagaaggagaacagaagaaacgagagagccgaggtgagcccccaggtgccccccgtgagcctggtgagcggcggcctgagccccgccatggacggccaggcccccggcagcccccccgccctgagaatccccgagggcctggccagaggcctgggcagcagactggagagagacgtgtggagcgcccccagcagcctgagactgcccagaaaggccagcagagcccccagaggcagcgccctgggcatgagccagagaaccgtgcccggcgagcaggccagctacggcaccttccagagagtgaagtaccacaccctgagcctgggcagaaagaagaccctgcccgagagcagcttctag

SEQ ID NO: 94578 - DNA, 3357 bp, Artificial Sequence
  derived and/or modified sequence
atggacttgggtccaggagatgccgccggaggaggtccattagcgccccgcccacggagacgccgatccctacggcgcctcttcagtaggttcctcctggcactgggaagtaggtctaggcccggtgactcgccgcctcgcccgcagcctggtcattgcgacggggacggcgagggggggtttgcttgtgccccgggcccagtgcctgccgcacccggaagccccggggaagagaggccccctgggccacaaccacaactccagctgcccgcaggcgacggggctagaccacccggtgcgcagggactgaagaaccacgggaatacgtgttttatgaatgcagttgtgcagtgcctgagtaacactgatctgttagctgagtttctcgctcttggccgttatagagcggcccccggtcgggctgaggtgacagagcagcttgccgccctcgtccgggccctctggactcgcgagtataccccccagctttcagcagaattcaagaatgctgtctcaaagtacggaagtcagtttcagggaaattcccagcatgatgccctggaatttcttctgtggttgctggatcgggtgcacgaagatctcgagggtagtagccggggacctgtttcagagaagttgccgccagaggcaacgaaaacgtcggagaactgcctatctccttcagcacagttgcctctggggcagagcttcgtgcagagtcatttccaggctcagtatcgaagcagtctcacgtgcccacattgcctgaaacagtccaacacttttgatcccttcctctgcgtgagcctgcccatcccactgagacagacccgcttcctctctgttactttggtgtttccaagtaagtcacagagatttctgcgggtaggccttgccgtgcctattctaagcacagttgccgccctgcggaaaatggtggcggaagaaggtggtgtaccggctgacgaagtgatcctggtggagctctatccatccgggtttcagaggtctttcttcgacgaggaagacctgaatacgattgccgaaggcgataacgtgtacgcattccaggtgcctccaagtccctcccaagggacactgagcgcccatcctttgggtttgtcagcctccccccggttggctgctcgggaaggtcagcgattctctctgtccttgcacagtgagtcaaaggtgcttattcttttctgcaacctggtgggcagtggacagcaggcctctagattcgggccaccattccttatcagagaggacagggccgtttcatgggctcagctgcagcaaagtatcctcagcaaggtgcgtcacctaatgaagtccgaggcaccagtgcagaacctggggtccctgttctctatacgggtcgtcggcctcagcgtagcctgttcctacctctctcctaaggacagccgacctctgtgccactgggcagtcgacagggttcttcacctacggcgtcccgggggacccccccacgtgaagcttgccgtcgagtgggacagcagcgtgaaagagcggctcttcggctctttgcaggaagagagagcgcaggatgccgactcagtttggcagcagcagcaggcccaccaacaacactcctgcaccttagacgaatgtttccaattttatacaaaagaggagcagctcgcccaggacgatgcgtggaaatgtccacattgtcaggtgttgcagcagggaatggtcaagttgtcactctggacactgcccgatattttgattattcacttgaaaaggttctgtcaggtcggcgagcggcggaataagctcagcacgctggtgaaattcccactgagtgggttgaacatggccccccacgtggcccagaggtcaacaagtcctgaagccggccttgggccgtggccttcttggaagcaacctgactgcctgcccacctcatatcccctcgactttctttacgatctgtacgccgtttgcaatcatcatggcaatttgcaggcctactgccgcaattcacttgatgggcagtggtatagctatgacgatagcactgtcgaaccactgcgcgaagacgaggtcaatactagaggagcatacatcctgttctaccaaaagcgcaattcaattccaccatggtcagcctcctcctccatgagaggatcaacctcatccagtctctcagaccattggctgcttagactgggaagccacgccgggtccacaaggggatccctcctgagctggtcatccgctccatgtccttctctgccccaggtacccgattcaccaatttttactaacagcctttgcaaccaagaaaaggggggattggaaccccgcagattggtcagaggcgtgaaaggccgcagtatctccatgaaggctccgacaacctcacgcgctaagcaaggccccttcaagactatgccgctcagatggtcatttggatcaaaggaaaagcctcccggcgcctcagtggaacttgtggaatacctcgagtcccggagaaggccccgttctacatctcagtcgatagtgagcctgctgacaggcactgcaggcgaggatgaaaaatctgccagccctcgctcgaatgtcgcattgcccgccaactccgaggacggcggtagagccatcgagcgcggaccagccggcgtcccctgtccaagtgcccagcctaaccactgcctcgcccctggcaacagcgacggacccaatacagctagaaaacttaaagagaatgcaggccaggatatcaagctgccaagaaagttcgatctgccgttaaccgtgatgccctcagtggagcacgagaaaccagctaggccagaaggccaaaaggccatgaattggaaagagagctttcagatgggctctaagtcgtcaccgcccagcccctacatggggttctccggaaatagcaaagattccagaaggggaacatctgaactggatcggcctcttcagggaaccttaacgctgctgcgttcagtcttcagaaaaaaggaaaatcgccgcaacgagcgcgcggaggtatctcctcaggtaccccctgtatcgctagtttcaggggggttatcgcccgccatggatggtcaggctccggggtctcctcccgcactccggatcccggaaggcctggccaggggcctgggatccagattggagcgggatgtgtggtctgccccaagcagcctgaggctgcctcgaaaggcgtcacgggcccccagagggagcgcactggggatgagtcagcgcaccgtgcccggcgagcaagcgtcatatggcacttttcagcgggtcaaatatcacaccctctctttggggaggaagaagacacttcctgaaagctccttctag

SEQ ID NO: 94579 - DNA, 3357 bp, Artificial Sequence
  derived and/or modified sequence
atggacctgggccctggagatgctgctgggggcggccccctggccccccggcccaggagaagaagaagcctgcggcggctcttcagccgcttcctgctggccctgggcagccgcagcaggcctggggacagccccccccggccccagcccggccactgtgatggagatggagagggcggctttgcctgtgcccctggccctgtgcctgctgcccctggcagccctggagaggagcggcccccaggcccccagccccagctgcagctgcctgctggagatggagcccggcccccaggggcccagggcctgaagaaccacggcaacacctgcttcatgaatgctgtggtgcagtgcctgagcaacacagacctgctggccgagttcctggccctgggccgctaccgggccgcccctggccgggcagaggtgacagagcagctggccgccctggtgcgggccctgtggacccgggagtacaccccccagctgtctgctgagttcaagaatgctgtgtccaaatatggcagccagttccagggcaacagccagcatgatgccctggagttcctgctgtggctgctggacagagtgcatgaggacctggagggcagcagccggggccctgtgtctgagaagctgcccccagaggccaccaagaccagcgagaactgcctgagccccagcgcccagctgcccctgggccagagctttgtgcagagccacttccaggcccagtaccgcagcagcctgacctgcccccactgcctgaagcagagcaacacctttgaccccttcctgtgtgtgtccctgcccatccccctgcggcagacccgcttcctgtctgtgaccctggtgttccccagcaagagccagcgcttcctgcgggtgggcctggccgtgcccatcctgagcacagtggccgccctgaggaagatggtggccgaggagggcggcgtgcctgcagatgaggtgatcctggtggagctgtaccccagcggcttccagaggagcttctttgatgaggaggacctgaacaccatcgccgagggggacaacgtgtatgccttccaggtgccccccagccccagccagggcaccctgagcgcccaccccctgggcctgagcgccagcccccggctggccgcccgggagggccagcgcttcagcctgagcctgcacagcgagagcaaggtgctgatcctcttctgcaacctggtgggcagcggccagcaggccagcagatttggaccacccttcctgatcagagaagatagagctgtgtcctgggcccagctgcagcagagcatcctgagcaaggtgcgccacctgatgaagtctgaggcccctgtgcagaacctgggcagcctcttcagcatccgggtggtgggcctgtctgtggcctgcagctacctgagccccaaggacagccggcccctgtgccactgggccgtggacagagtgctgcacctgcggcggcctgggggccccccccacgtgaagctggccgtggagtgggacagctctgtgaaggagcggctgtttggcagcctgcaggaggagcgggcccaggatgctgacagcgtgtggcagcagcagcaggcccaccagcagcacagctgcaccctggatgagtgcttccagttctacaccaaggaggagcagctggcccaggatgatgcctggaagtgcccccactgccaggtgctgcagcagggcatggtgaagctgagcctgtggaccctgcctgacatcctgatcatccacctgaagcgcttctgccaggtgggggagaggaggaacaagctgagcaccctggtgaagttccccctgagcggcctgaacatggccccccacgtggcccagaggagcaccagccctgaggccggcctgggcccctggcccagctggaagcagcctgactgcctgcccaccagctaccccctggacttcctgtatgacctgtatgctgtgtgcaaccaccacggcaacctgcaggcctactgcaggaacagcctggatggccagtggtacagctatgatgacagcacagtggagcccctgagagaagatgaggtgaacaccaggggggcctacatcctcttctaccagaagagaaattccatccccccctggagcgccagcagctccatgaggggcagcaccagcagcagcctgagtgaccactggctgctgcggctgggcagccatgctggcagcacccggggcagcctgctgtcctggagcagcgccccctgccccagcctgccccaggtgcctgacagccccatcttcaccaacagcctgtgcaaccaggagaagggcggcctggagccccggcggctggtgcggggcgtgaagggccgcagcatctccatgaaggcccccaccaccagccgggccaagcagggccccttcaagaccatgcccctgcgctggagctttggcagcaaggagaagcccccaggggcctctgtggagctggtggagtacctggagagcagaagaagacccaggagcaccagccagagcatcgtgtccctgctgactggaacagctggggaggatgagaagagcgccagccccaggagcaatgtggccctgcctgccaacagtgaagatggcggccgggccatcgagcggggccctgctggggtgccctgccccagcgcccagcccaaccactgcctggcccctggcaacagtgatggccccaacacagccaggaagctgaaggaaaatgccggccaggacatcaagctgcccaggaagtttgacctgcccctgactgtgatgcccagcgtggagcacgagaagccagcccggcctgagggccagaaggccatgaactggaaggagagcttccagatgggcagcaagagcagcccccccagcccctacatgggcttcagcggcaacagcaaggacagcagaagaggcaccagcgagctggaccggcccctgcagggcaccctgaccctgctgcggagcgtcttcaggaagaaggagaacagaagaaatgaaagagctgaggtgagcccccaggtgccccctgtgtccctggtgtctgggggcctgagccctgccatggatggccaggcccctggcagccccccagccctgcgcatccctgagggcctggcccggggcctgggcagccggctggagagagatgtgtggagcgcccccagcagcctgcggctgcccaggaaggccagccgggccccccggggcagcgccctgggcatgagccagaggacagtgcctggagagcaggccagctatggcaccttccagagggtgaagtaccacaccctgagcctgggcaggaagaagaccctgcctgagagcagcttctag

SEQ ID NO: 94580 - DNA, 3357 bp, Artificial Sequence
  derived and/or modified sequence
atggacctgggccccggcgacgccgccggcggcggccccctggcccctagaccacggcggcgccggtccctccgcagactgttttcacggttcctactggccttgggatctagatcacggcccggggatagtcctccacggcctcagcctggccactgcgacggggatggggagggtggctttgcatgcgcacccgggcccgtccccgccgccccaggctcgcctggggaggagcggccccccggtccacagccgcaactgcagttaccagcgggcgatggtgcccgccctcctggcgcccagggtctgaaaaatcatgggaatacttgttttatgaacgctgtggtgcaatgtctgtccaacacagaccttctcgccgagttcctggctctcgggcgttaccgagccgctcccggacgcgcagaggtgacagagcaactagccgctctcgttagggcgctgtggacgagagagtacacaccacagctgagcgccgagttcaagaacgcagtgtctaagtatggctctcagttccagggtaacagccagcatgatgctctggagtttcttctttggttactggaccgagtacacgaggatttggagggctcttcaagaggccccgtcagcgaaaagctgccaccagaggccaccaaaacaagcgagaactgtttgtcaccatcagcccagctgcctcttggacagtccttcgtgcaaagccactttcaggcacagtaccgttccagccttacttgcccacattgcctcaagcagtcaaatacattcgatccatttctttgtgtcagtctcccgatccccttgaggcagactaggtttctgagcgtcactctggtgttcccctcaaagagccagagatttttgcgcgttggactagcggtcccaattctgagcaccgtggctgctctgcgtaagatggtggctgaagagggaggagttccagccgacgaagtcatactcgtcgagctttatcctagtgggttccagaggagcttctttgatgaagaggacttaaatacgatagccgaaggggataacgtgtacgcttttcaagtgccaccttcccctagccagggtacactgagcgctcatcccctcggcctgagtgccagtccaaggctggcagctcgcgaaggccagcgctttagtttgtccctgcatagcgagagcaaggtgctcattctgttctgtaacttggtaggaagtggccagcaggcttcccgtttcggtcctcccttcctgattcgggaggacagagcagtgtcatgggcccagctgcaacagtctattctgagcaaagtgaggcacctcatgaaatctgaagctcccgtccagaacttgggcagcctgttttccatcagggtggtcggcttgtccgtcgcttgtagctatctctctccaaaggatagccgaccactctgtcactgggccgtcgatcgagtgcttcatctccgacgcccggggggaccaccacatgtgaagttggctgtggagtgggactcatctgtaaaggagcggctgttcggatcactgcaggaggaacgcgctcaggatgctgattctgtttggcaacagcagcaggctcatcagcagcactcatgtactttagacgaatgctttcagttctacaccaaggaagaacaacttgcccaggatgacgcttggaaatgtccccattgccaggttctccagcagggcatggttaagttgagcctctggaccctgcccgacatcctgatcatccatttaaaaaggttttgccaggtgggtgaacggagaaataagctatctaccctcgtgaaattccccttgagtggtctcaatatggcaccccacgtggcccagcggagcacaagccccgaggccgggctcggaccatggccctcctggaagcagcctgactgtttgcctacttcctatcctttagactttttgtatgacctgtacgctgtatgtaaccaccacggaaatttacaggcatattgtagaaactcactggacgggcaatggtactcctatgacgacagtaccgtggaacctctgcgggaggatgaggtaaacaccaggggggcatatattttgttctatcagaagcggaactctatccccccttggtcagcttcaagttctatgagaggcagcactagctccagcctgagtgatcactggttgcttagactcgggagtcatgcaggctccacccggggaagtttgctgagctggagctctgctccttgtccctctctcccccaagttccagacagccctatctttacaaacagcctctgcaatcaggaaaaaggtgggctggaacctcgtaggcttgtacggggcgtgaaagggcgaagtatcagcatgaaggctcccaccaccagcagagctaagcagggaccctttaaaactatgcctcttcgctggtcgtttggcagcaaagaaaagcctcctggagcttccgtggaactggttgaatacctagagtcccgcaggaggccacggtctacctcccaatcaattgtgagtctcttgacagggactgctggggaggatgagaaatccgcttctcctcgatcaaacgttgctcttcctgccaacagcgaggacggcgggcgcgctatcgagcgggggcctgcaggggtgccgtgcccttctgcccagcccaatcactgtttagctcccggaaattctgacggtccaaatacggcccgcaaactgaaggaaaatgccggtcaggacattaagctcccacgcaagttcgatttgcccttgaccgtcatgccatccgttgaacatgagaagcctgccaggcctgagggccaaaaagctatgaactggaaggaatcattccagatgggaagcaaaagctcccccccatctccctacatggggttcagcggtaactcgaaggatagtaggcgcggtacctctgagttggatcgccccctgcagggaacgctcacactgctcaggagtgtgtttagaaaaaaggagaatcggagaaacgaaagggctgaagtcagtccacaggtgccccccgtgagcctggtctcgggcggactcagcccagctatggatggtcaggcgcccggcagccctccagccctcaggatcccagaagggctggcgcggggactaggttctcgcctggaaagagatgtatggagcgcacccagctcccttcgactgccccgaaaagctagccgtgccccccgcggcagcgccctgggaatgtctcagcggactgtgcctggggagcaggcatcctacggtacctttcagcgtgtcaagtatcatactctctcattgggtagaaaaaagacactccctgaaagctctttttag

SEQ ID NO: 94581 - DNA, 3357 bp, Artificial Sequence
  derived and/or modified sequence
atggatctgggcccaggggatgccgctggcggaggcccactcgctcccagacctcggagaagaaggtccctgagacgcctgttctctcgtttcctactcgctctgggttctaggtcacggccaggcgacagtccccctcgacctcagcctggtcattgcgacggcgacggcgagggaggattcgcctgcgcccctggtccagtccctgccgctcccggatctcctggtgaggaaagaccccctggcccacaaccacagctgcagctcccagcgggtgatggtgccaggccacccggagcacagggtctgaagaaccacggcaacacttgtttcatgaatgccgtggttcagtgcttgtccaataccgatctcctcgccgagtttttggccttggggcgatacagggctgcaccaggcagagccgaagtgactgagcagcttgccgctctcgtccgagcattgtggacccgcgagtacactccccagctgtcggctgagtttaaaaacgctgtgtccaagtatggctcacaatttcaggggaactcacagcacgatgccttggaatttctcctgtggctactggaccgggtccatgaagatcttgagggttcatctaggggacccgtctccgaaaaactgcccccagaggcaactaagacctccgaaaactgtctgtccccatctgcccagctcccactcggccagagtttcgtacagtcccacttccaggcccagtacagatcttctctcacctgtcctcactgcctcaaacagtcgaatacctttgacccctttctgtgtgtgagtttgccaattccccttcgccagacacgtttcctgagtgtgactctggtgtttccttcaaaatcgcagcgcttcttgagagtaggcctggccgtgcctatcctgagcactgtggctgctttgcggaaaatggttgccgaggagggcggagtgcctgcggatgaagtcatcctggtcgaactgtacccctcaggctttcagcgttcgttcttcgatgaggaggatcttaacaccatcgccgagggagacaacgtctacgcctttcaggttccaccatccccgagtcagggtactctgtcagctcaccccctagggttgagtgcatctccacgcctcgcagctcgcgaggggcagcgcttctccctgagcttgcattccgaaagtaaagtgctcatcctcttttgtaacttggtcggatctggacagcaggcctctcggttcggccctcctttcttaattagggaggaccgagccgtatcctgggctcagctgcaacagtctattttatccaaggtgcgccatcttatgaaatcagaggcccctgtgcagaacctgggcagtcttttctcaatccgagttgtcgggttatccgttgcctgtagctacctaagcccaaaggatagtcgaccactgtgtcattgggccgttgatcgagtactgcatcttagacgcccaggcggaccccctcacgttaagctagcagtagagtgggacagttcagtgaaggagcgtctcttcgggtcgctccaggaagagagggcccaagatgccgacagtgtgtggcagcaacagcaggcccaccagcaacacagctgcacccttgacgagtgttttcagttctacacaaaagaggaacaactggcgcaggacgacgcgtggaagtgtcctcactgccaggtgttgcagcaagggatggttaaattatcactttggacactgccagatatcctaattatacacttgaaaaggttctgccaggtgggagaacgcaggaataaattaagcactctggtgaagtttccactgagtggactgaatatggcacctcacgtagcccagaggtccactagcccagaggccggactgggaccctggcctagctggaaacagccggattgtctgccaactagctatcctttggactttctttacgacctctacgccgtctgcaatcaccatggcaacttacaggcctattgtagaaattccctggacggacagtggtactcctatgatgactccacagtcgaacccctccgagaagacgaggttaatacccggggtgcttatatcctgttttatcaaaagcggaattccattcccccttggagcgctagttcttccatgagaggctcaacgtcctcgtccttgagtgatcactggctgctgcgccttgggtcgcatgccggtagcacgagggggtctctgctttcctggagcagcgcaccgtgtccaagcctgccccaagtacccgattccccgattttcactaactcactgtgcaaccaggaaaaaggagggctagagcctcggcgacttgtaagaggtgtgaaaggacgatcaataagcatgaaggctccaaccacaagcagggctaaacagggtccctttaagacgatgcccctaagatggtcttttggatccaaagaaaagcccccaggggcaagcgtggagctggtggagtatctggaaagccgcagacgacctcggagcacctcacagagcattgtgtccctcctgaccgggactgctggcgaagatgagaaaagcgcctctccacgctctaatgttgcgctgccagccaattccgaggatggaggcagagccatcgaacggggtcccgctggcgtcccatgtccctccgcccaaccgaaccactgcctcgccccaggcaattctgacggacccaacacggctcggaagctgaaggaaaatgctggccaggacattaagcttcctagaaaattcgatctcccactcaccgtcatgcccagcgtggagcacgagaaaccagccaggccagagggccagaaagccatgaactggaaggagtcctttcagatgggctccaagagtagcccaccctccccctacatgggcttttcaggaaattccaaagattctagacgcggtactagcgaactggataggcccctgcaaggaaccctgacactgcttcggtccgttttcaggaagaaggaaaaccggagaaatgagcgggctgaagtgtcgccacaggttccacctgtgtccctcgtgtcaggaggactgagcccagccatggacggccaggcgcctgggagtccgcctgcattgagaattcccgaaggcctagctagaggactgggctccagactagagagagacgtgtggagtgccccttcttccctgaggctccctaggaaggcttcacgcgctccacgcggatccgctctggggatgagtcaacgcacagtaccaggcgagcaggccagctacggaacattccagcgagtgaagtaccacacattgtccttaggcaggaaaaaaaccctccctgagagctccttttag

SEQ ID NO: 94582 - DNA, 3500 bp, Artificial Sequence
  derived and/or modified sequence
cggcaccaggagccttagagaagctgtagggcctgctggccgctcgtccgcctcgcgcccgggggctccgcgcctggagctgcgccggcggcagccatggacctgggccccggggacgcggcaggagggggaccgctcgcgccccggccccgccgccgccgctccctgcgccgcctgttcagccgcttcctgctggcgctgggcagccgctcacgccccggggactcaccgccccggccccagccgggacactgtgatggcgacggtgaggggggcttcgcctgcgccccgggcccagttccagcggcccccgggagccccggggaggaacgcccgcccggaccccagccccagctccagctccccgccggcgatggggcgcggccgccgggcgctcagggcttgaagaaccacggcaacacctgtttcatgaacgcggtggtgcagtgtctcagcaacaccgacctgctggccgagttcctggcgctggggcgctaccgggcggctccgggccgcgccgaggtcaccgagcagctggcggcgctggtgcgcgcgctctggactcgcgaatacacgccccaactttccgcggagttcaagaatgcagtttccaagtacggctctcagttccaaggcaattcccagcacgacgccctggaattcctgctctggttgctggatcgtgtacatgaggacctggagggttcatcccgagggccggtgtcggagaagcttccgcctgaagccactaaaacctctgagaactgcctgtcaccatcagctcagcttcctctaggtcaaagctttgtgcaaagccactttcaagcacaatatagatcttccttgacttgtccccactgcctgaaacagagcaacacctttgatcctttcctgtgtgtgtccctacctatccccttgcgccagacgaggttcttgagtgtcaccttggtcttcccctctaagagccagcggttcctgcgggttggcctggccgtgccgatcctcagcacagtggcagccctgaggaagatggttgcagaggaaggaggcgtccctgcagatgaggtgatcttggttgaactgtatcccagtggattccagcggtctttctttgatgaagaggacctgaataccatcgcagagggagataatgtgtatgcctttcaagttcctccctcacccagccaggggactctctcagctcatccactgggtctgtcggcctccccacgcctggcagcccgtgagggccagcgattctccctctctctccacagtgagagcaaggtgctaatcctcttctgtaacttggtggggtcagggcagcaggctagcaggtttgggccacccttcctgataagggaagacagagctgtttcctgggcccagctccagcagtctatcctcagcaaggtccgccatcttatgaagagtgaggcccctgtacagaacctggggtctctgttctccatccgtgttgtgggactctctgtggcctgcagctatttgtctccgaaggacagtcggcccctctgtcactgggcagttgacagggttttgcatctcaggaggccaggaggccctccacatgtcaagctggcggtggagtgggatagctctgtcaaggagcgcctgttcgggagcctccaggaggagcgagcgcaggatgccgacagtgtgtggcagcagcagcaggcgcatcagcagcacagctgtaccttggatgaatgttttcagttctacaccaaggaggagcagctggcccaggatgacgcctggaagtgtcctcactgccaagtcctgcagcaggggatggtgaagctgagtttgtggacgctgcctgacatcctcatcatccacctcaaaaggttctgccaggtgggcgagagaagaaacaagctctccacgctggtgaagtttccgctctctggactcaacatggctccccatgtggcccagagaagcaccagccctgaggcaggactgggcccctggccttcctggaagcagccggactgcctgcccaccagttacccgctggacttcctgtacgacctgtatgccgtctgcaaccaccatggcaacctgcaagcctactgccggaactctctggatggccagtggtacagttatgatgacagcacggtggaaccgcttcgagaagatgaggtcaacaccagaggggcttatatcctgttctatcagaagcggaacagcatccctccctggtcagccagcagctccatgagaggctctaccagctcctccctgtctgatcactggctcttacggctcgggagccacgctggcagcacaaggggaagcctgctgtcctggagctctgccccctgcccctccctgccccaggttcctgactctcccatcttcaccaacagcctctgcaatcaggaaaagggagggttggagcccaggcgtttggtacggggcgtgaaaggcagaagcattagcatgaaggcacccaccacttcccgagccaagcagggaccattcaagaccatgcctctgcggtggtcctttggatccaaggagaaaccaccaggtgcctccgtcgagttggtggagtacttggaatccagacgaagacctcggtccacgagccagtccattgtgtcgctgttgacgggcactgcgggtgaggatgagaagtcagcatcgccgaggtccaacgtcgcccttcctgctaacagcgaagatggtgggcgggccattgaaagaggtccagccggggtgccctgtccctcggctcaacccaaccactgtctggcccctggaaactcagatggtccaaacacagcaaggaaactcaaggaaaatgcagggcaggacatcaagcttcccagaaagtttgacctgcctctcactgtgatgccttcagtggagcatgagaaaccagctcgaccggagggccagaaggccatgaactggaaggagagcttccagatgggaagcaaaagcagcccaccctccccctatatgggattctctggaaacagcaaagacagtcgccgaggcacctctgagctagacagacccctgcaggggacactcacccttctgaggtccgtgtttcggaagaaggagaacaggaggaatgagagggcagaggtctctccacaggtgccccccgtctccctggtgagtggcgggctgagccctgccatggacgggcaggctccaggctcacctcctgccctcaggatcccagagggcctggccaggggcctgggcagccggctcgagagggatgtctggtcagcccccagctctctccgcctccctcgtaaagccagcagggccccgagaggcagtgcactgggcatgtcacaaaggactgttccaggggagcaggcttcttatggcacctttcagagagtcaaatatcacactctttctttaggtcgaaagaaaaccttaccggagtccagcttttgatggagcgtgtcagtattgtgtgacgctggcattcttgggactttgcc

SEQ ID NO: 94583 - protein, 525 aa, Artificial Sequence
  derived and/or modified sequence
MRRSEVLAEESIVCLQKALNHLREIWELIGIPEDQRLQRTEVVKKHIKEEGETTILQLEKDLRTQVELMRKQKKERKQELKLLQEQDQELCEILCMPHYDIDSASVPSLEELNQFRQHVTTLRETKASRREEFVSIKRQIILCMEALDHTPDTSFERDVVCEDEDAFCLSLENIATLQKLLRQLEMQKSQNEAVCEGLRTQIRELWDRLQIPEEEREAVATIMSGSKAKVRKALQLEVDRLEELKMQNMKKVIEAIRVELVQYWDQCFYSQEQRQAFAPFCAEDYTESLLQLHDAEIVRLKNYYEVHKELFEGVQKWEETWRLFLEFERKASDPNRFTNRGGNLLKEEKQRAKLQKMLPKLEEELKARIELWEQEHSKAFMVNGQKFMEYVAEQWEMHRLEKERAKQERQLKNKKQTETEMLYGSAPRTPSKRRGLAPNTPGKARKLNTTTMSNATANSSIRPIFGGTVYHSPVSRLPPSGSKPVAASTCSGKKTPRTGRHGANKENLELNGSILSARTFKGFQI

SEQ ID NO: 94584 - DNA, 1578 bp, Artificial Sequence
  derived and/or modified sequence
atgcgaagatccgaagtgctggcggaggagagtatcgtatgcctgcaaaaagccttaaatcacctgagggagatctgggaactgatcggaattccagaagatcagcgtctccagaggactgaggtggtgaagaagcatattaaagaggagggcgagaccaccatactccaactggagaaagacttgcggactcaggtggagcttatgcggaaacaaaagaaggagcgcaaacaggaacttaaactcttgcaggaacaggaccaggagttatgcgagatcttgtgtatgccccattatgacattgattctgcttcggtcccatccctggaggaactgaaccagtttagacaacacgtgaccacactccgcgaaacaaaagcctcccggcgggaggagtttgtatccattaagaggcagatcattctgtgcatggaggctttggaccatacacctgatacgagctttgagcgggacgtggtctgcgaagacgaggatgcattttgtttatccctcgagaatattgccaccctgcagaaactactgaggcaacttgaaatgcagaagtctcagaacgaagcggtgtgtgaaggtctgcgcacacagatcagggaactttgggatagactgcagataccagaggaagagagggaagctgtcgctactataatgtcaggaagtaaggcgaaggtgaggaaagccctacagttggaggtcgatcgcctggaggaacttaaaatgcagaatatgaagaaagtgatcgaggcgatcagggtagagttggttcagtactgggatcagtgcttctattcccaggagcagcggcaggcgtttgccccattttgcgcagaggattacaccgagagcctcctgcagcttcatgatgctgagatcgtgcgcctgaaaaactattacgaggtccataaggaactgttcgagggtgtgcagaaatgggaggagacgtggagactgtttctggaatttgaacgaaaggccagtgatccgaatagattcacaaaccgagggggcaacctgctgaaggaggagaagcagagagcgaagctgcagaaaatgctgcctaaactggaggaagaactaaaggcccgaattgaattatgggagcaggaacatagcaaggcctttatggtgaatggacagaagtttatggagtatgtggctgagcagtgggagatgcatcgcttggaaaaagaacgcgccaagcaggagcgtcagctgaaaaataaaaaacaaaccgagactgagatgctctacgggtcggcaccccggacacctagcaaaaggcggggcctggcacccaatactcctggtaaggcaagaaagctgaatacaactacaatgtcaaacgctaccgccaactcctcgatacgtcccattttcggcggcacggtctatcacagcccagtgtcccggctcccaccttctgggtccaagcccgttgcagccagcacctgtagtggcaaaaagaccccccgcacaggtcggcatggtgctaacaaggaaaatctagagctgaacggcagtattttgagcgcccgaacatttaaaggcttccagatctag

SEQ ID NO: 94585 - DNA, 1578 bp, Artificial Sequence
  derived and/or modified sequence
atgagaagaagtgaggtgctggccgaggagagcatcgtgtgcctgcagaaggccctgaaccacctgcgggagatctgggagctgattggcatccctgaggaccagaggctgcagaggacagaggtggtgaagaagcacatcaaggaggagggggagaccaccatcctgcagctggagaaggacctgcggacccaggtggagctgatgaggaagcagaagaaggagaggaagcaggagctgaagctgctgcaggagcaggaccaggagctgtgtgagatcctgtgcatgccccactatgacattgattctgcctctgtgcccagcctggaggagctgaaccagttccggcagcacgtgaccaccctgcgggagaccaaggccagcagaagagaggagtttgtgtccatcaagaggcagatcatcctgtgcatggaggccctggaccacaccccagacaccagctttgaaagagatgtggtgtgtgaagatgaagatgccttctgcctgagcctggagaacatcgccaccctgcagaagctgctgcggcagctggagatgcagaagagccagaatgaagctgtgtgtgagggcctgcggacccagatccgggagctgtgggaccggctgcagatccctgaggaggagcgggaggccgtggccaccatcatgagcggcagcaaggccaaggtgaggaaggccctgcagctggaggtggaccggctggaggagctgaagatgcagaacatgaagaaggtgattgaggccatccgggtggagctggtgcagtactgggaccagtgcttctacagccaggagcagaggcaggcctttgcccccttctgtgccgaggactacacagagagcctgctgcagctgcatgatgctgagatcgtgcggctgaagaactactatgaggtgcacaaggagctgtttgaaggagtgcagaagtgggaggagacctggaggctcttcctggagtttgagaggaaggccagtgaccccaaccgcttcaccaacagaggaggcaacctgctgaaggaggagaagcagagggccaagctgcagaagatgctgcccaagctggaggaggagctgaaggccagaattgagctgtgggagcaggagcacagcaaggccttcatggtgaatggccagaagttcatggagtatgtggccgagcagtgggagatgcaccggctggagaaggagcgggccaagcaggagcggcagctgaagaacaagaagcagacagaaacagagatgctgtatggcagcgcccccaggacccccagcaagagaagaggcctggcccccaacaccccaggcaaggccaggaagctgaacaccaccaccatgagcaatgccacagccaacagcagcatccggcccatctttggaggcaccgtgtaccacagccctgtgtcccggctgccccccagcggcagcaagcctgtggccgccagcacctgcagcggcaagaagacccccaggactggaagacatggagccaacaaggagaacctggagctgaatggcagcatcctgagcgcccggaccttcaagggcttccagatctag

SEQ ID NO: 94586 - DNA, 1578 bp, Artificial Sequence
  derived and/or modified sequence
atgcggcggagcgaggtgctggccgaggagagcatcgtgtgcctgcagaaggcacttaaccacctgcgagaaatctgggaacttatcggcatccccgaggaccagcgcttacagcgcacagaagtcgtgaagaagcacatcaaggaggagggcgagaccaccatacttcagttggaaaaggacctgagaacacaggttgagttaatgagaaaacagaagaaggagagaaagcaagagctgaaactgctgcaggaacaagaccaagaactctgtgaaattctctgtatgcctcactatgacattgactcagcctccgtgccctccctcgaggaattgaatcagttcaggcagcatgttactacattaagagaaaccaaggcaagccgcagagaggagttcgtcagcatcaagagacaaatcattctgtgcatggaggctcttgatcatacacccgatacaagctttgaacgagacgtcgtgtgcgaagatgaagatgctttctgtctgagtctcgagaatatagccacactgcagaaattgctgcggcagttggagatgcaaaagagccagaatgaggccgtatgtgagggcttacggactcagattcgggagctgtgggatcggctgcagattcccgaggaggagagagaagccgtagcaacgattatgtcagggtccaaggctaaagtgcggaaggccctgcagctggaggttgacagactggaggagctgaagatgcagaacatgaagaaggtgatcgaggccatacgggtggagttagtccagtattgggatcaatgtttttattcgcaagaacagcgtcaagccttcgcacccttttgcgcagaggattataccgagtcccttcttcagctccatgacgctgagatcgtgcgcctgaaaaattactacgaagtacataaggaactgtttgagggagtgcaaaagtgggaggaaacctggcggctgttcctggagtttgaaaggaaagcctccgacccaaacagattcacgaaccgcgggggcaacctgctgaaagaggagaaacagcgcgccaaactgcagaagatgctacccaagttggaggaagagctgaaggctagaatagagctgtgggaacaggaacacagcaaggcctttatggtcaacggtcagaaatttatggagtatgtagccgaacaatgggaaatgcaccgtcttgaaaaggaaagggctaagcaagagcggcagttgaagaataaaaaacagaccgaaacagagatgctgtacggatcggctccgaggacgcccagcaaaagacggggtctggcacctaacaccccaggcaaagccaggaagctcaatacaactaccatgagcaatgccaccgccaatagcagtataagacctatttttggcggtacagtgtatcactcccccgtctctcgcctgccaccgagcggttcgaagccagttgcagcttccacttgctccggaaagaagactcccagaacagggcgtcacggagccaacaaggagaacctcgagttgaatggcagcatcctcagcgctagaacatttaaaggcttccagatctag

SEQ ID NO: 94587 - DNA, 1578 bp, Artificial Sequence
  derived and/or modified sequence
atgaggagatccgaagtgctggctgaagagtcaatcgtctgtctgcaaaaagctctcaaccacctcagagaaatttgggagctgatcggcatccccgaggaccaaaggctgcagcgaaccgaggtggtcaagaaacatataaaagaagagggcgaaaccactattctccaattggaaaaggatttgcggacccaggtagaactgatgaggaagcaaaaaaaagagcgcaagcaggagctgaagctgttgcaggagcaggatcaggagttgtgcgagatcttgtgtatgccacattacgatatcgactctgccagtgttcccagcctcgaagaactgaaccaatttcggcagcatgtcaccaccttacgagagacgaaagcaagccgccgagaagagttcgtcagtatcaagcgccaaattatcctgtgtatggaggctcttgatcacaccccagatacctccttcgagagggacgtagtttgcgaagatgaagatgccttctgtttgtcgttggagaacatcgcaacattgcagaagctcctcaggcagttagagatgcaaaagtcgcagaacgaggccgtatgtgaagggctccgcacccaaattcgcgagctttgggatcgcttgcagattcccgaggaggaacgcgaagccgtggccaccattatgtccggctcaaaggccaaggtgagaaaagccctgcaactcgaggttgatagactggaagagttgaagatgcagaacatgaagaaggtgatcgaggctattcgggtcgagctcgtgcagtattgggatcaatgcttttatagccaggaacagaggcaggcgttcgctccattctgcgcagaagactacaccgaatcactactgcagctccatgatgccgagattgtgagactgaagaattactatgaagtgcataaggagttgtttgaaggcgtccagaagtgggaagagacatggagactgttcctcgagtttgagcgaaaggcctctgatcccaatcgttttaccaatcggggaggtaacttgctaaaagaagagaaacagcgcgctaagctacagaagatgttaccaaaacttgaagaagagctcaaagctcgcatcgagctgtgggagcaggagcactctaaggctttcatggtcaacgggcagaagtttatggagtacgttgcggagcagtgggaaatgcacaggctcgagaaggaacgagccaagcaagagagacaactgaagaacaagaagcaaactgaaaccgagatgttgtacggaagtgctccgagaacaccttcaaagaggaggggattagccccaaacacaccagggaaagccaggaaactgaacacaacaacaatgagcaacgcgaccgcgaatagcagcatccggccaattttcggagggactgtgtatcactctccagtgtcaaggctgccacctagtggcagtaagccagttgcagcctctacctgtagcggaaagaagacgccaaggactggtcgacacggcgcaaataaggaaaacctggaactgaacggtagtatactgagtgcaaggacctttaaggggtttcagatatag

SEQ ID NO: 94588 - DNA, 2060 bp, Artificial Sequence
  derived and/or modified sequence
ggagcggctacgcggagtgacatcgccggtgtttgcgggtggttgttgctctcggggccgtgtggagtaggtctggacctggactcacggctgcttggagcgtccgccatgaggagaagtgaggtgctggcggaggagtccatagtatgtctgcagaaagccctaaatcaccttcgggaaatatgggagctaattgggattccagaggaccagcggttacaaagaactgaggtggtaaagaagcatatcaaggaagaaggagagacgaccatcttgcaactagaaaaagatttgcgcacccaagtggaattgatgcgaaaacagaaaaaggagagaaaacaggaactgaagctacttcaagagcaagatcaagaactgtgcgaaattctttgtatgccccactatgatattgacagtgcctcagtgcccagcttagaagagctgaaccagttcaggcaacatgtgacaactttgagggaaacaaaggcttctaggcgtgaggagtttgtcagtataaagagacagatcatactgtgtatggaagcattagaccacaccccagacacaagctttgaaagagatgtggtgtgtgaagacgaagatgccttttgtttgtctttggagaatattgcaacactacaaaagttgctacggcagctggaaatgcagaaatcacaaaatgaagcagtgtgtgaggggctgcgtactcaaatccgagagctctgggacaggttgcaaatacctgaagaagaaagagaagctgtggccaccattatgtctgggtcaaaggccaaggtccggaaagcgctgcaattagaagtggatcggttggaagaactgaaaatgcaaaacatgaagaaagtgattgaggcaattcgagtggagctggttcagtactgggaccagtgcttttatagccaggagcagagacaagcttttgcccctttctgtgctgaggactacacagaaagtctgctccagctccacgatgctgagattgtgcggttaaaaaactactatgaagttcacaaggaactctttgaaggtgtccagaagtgggaagaaacctggaggcttttcttagagtttgagagaaaagcttcagatccaaatcgatttacaaaccgaggaggaaatcttctaaaagaagaaaaacaacgagccaagctccagaaaatgctgcccaagctggaagaagagttgaaggcacgaattgaattgtgggaacaggaacattcaaaggcatttatggtgaatgggcagaaattcatggagtatgtggcagaacaatgggagatgcatcgattggagaaagagagagccaagcaggaaagacaactgaagaacaaaaaacagacagagacagagatgctgtatggcagcgctcctcgaacacctagcaagcggcgaggactggctcccaatacaccgggcaaagcacgtaagctgaacactaccaccatgtccaatgctacggccaatagtagcattcggcctatctttggagggacagtctaccactcccccgtgtctcgacttcctccttctggcagcaagccagtcgctgcttccacctgttcagggaagaaaacaccccgtactggcaggcatggagccaacaaggagaacctggagctcaacggcagcatcctgagtgcgagaactttcaaaggcttccaaatctgatgctacttctggaatcctcaattcaaccaacatccagtcctgagaagccctgatcagtcaaccagctgtggcttcctgtgcctagactggacctaattatatgggggtgactttagtttttcttcagcttaggcgtgcttgaaaccttggccaggttccatgaccatgggcctaacttaaagatgtgaatgagtgttacagttgaaagcccatcataggtttagtggtcctaggagacttggttttgacttatatacatgaaaagtttatggcaagaagtgcaaattttagcatatggggcctgacttctctaccacataattctacttgctgaagcatgatcaaagcttgttttatttcaccactgtaggaaa

SEQ ID NO: 94589 - DNA, 1578 bp, Artificial Sequence
  derived and/or modified sequence
atgagaagaagcgaggtgctggccgaggagagcatcgtgtgcctgcagaaggccctgaaccacctgagagagatctgggagctgatcggcatccccgaggaccagagactgcagagaaccgaggtggtgaagaagcacatcaaggaggagggcgagaccaccatcctgcagctggagaaggacctgagaacccaggtggagctgatgagaaagcagaagaaggagagaaagcaggagctgaagctgctgcaggagcaggaccaggagctgtgcgagatcctgtgcatgccccactacgacatcgacagcgccagcgtgcccagcctggaggagctgaaccagttcagacagcacgtgaccaccctgagagagaccaaggccagcagaagagaggagttcgtgagcatcaagagacagatcatcctgtgcatggaggccctggaccacacccccgacaccagcttcgagagagacgtggtgtgcgaggacgaggacgccttctgcctgagcctggagaacatcgccaccctgcagaagctgctgagacagctggagatgcagaagagccagaacgaggccgtgtgcgagggcctgagaacccagatcagagagctgtgggacagactgcagatccccgaggaggagagagaggccgtggccaccatcatgagcggcagcaaggccaaggtgagaaaggccctgcagctggaggtggacagactggaggagctgaagatgcagaacatgaagaaggtgatcgaggccatcagagtggagctggtgcagtactgggaccagtgcttctacagccaggagcagagacaggccttcgcccccttctgcgccgaggactacaccgagagcctgctgcagctgcacgacgccgagatcgtgagactgaagaactactacgaggtgcacaaggagctgttcgagggcgtgcagaagtgggaggagacctggagactgttcctggagttcgagagaaaggccagcgaccccaacagattcaccaacagaggcggcaacctgctgaaggaggagaagcagagagccaagctgcagaagatgctgcccaagctggaggaggagctgaaggccagaatcgagctgtgggagcaggagcacagcaaggccttcatggtgaacggccagaagttcatggagtacgtggccgagcagtgggagatgcacagactggagaaggagagagccaagcaggagagacagctgaagaacaagaagcagaccgagaccgagatgctgtacggcagcgcccccagaacccccagcaagagaagaggcctggcccccaacacccccggcaaggccagaaagctgaacaccaccaccatgagcaacgccaccgccaacagcagcatcagacccatcttcggcggcaccgtgtaccacagccccgtgagcagactgccccccagcggcagcaagcccgtggccgccagcacctgcagcggcaagaagacccccagaaccggcagacacggcgccaacaaggagaacctggagctgaacggcagcatcctgagcgccagaaccttcaagggcttccagatctag

SEQ ID NO: 94590 - protein, 88 aa, Artificial Sequence
  derived and/or modified sequence
MVINLCLPQFRPRIHCNKISADGYEVENLISEDLTKRSHGFRTEYFIKPPVYVTVSFPFNVEICRINIDLTAGGGQNVTGLEMYTSAS

SEQ ID NO: 94591 - protein, 644 aa, Artificial Sequence
  derived and/or modified sequence
MDDIADRMRMDAGEVTLVNHNSVFKTHLLPQTGFPEDQLSLSDQQILSSRQGHLDRSFTCSTRSAAYNPSYYSDNPSSDSFLGSGDLRTFGQSANGQWRNSTPSSSSSLQKSRNSRSLYLETRKTSSGLSNSFAGKSNHHCHVSAYEKSFPIKPVPSPSWSGSCRRSLLSPKKTQRRHVSTAEETVQEEEREIYRQLLQMVTGKQFTIAKPTTHFPLHLSRCLSSSKNTLKDSLFKNGNSCASQIIGSDTSSSGSASILTNQEQLSHSVYSLSSYTPDVAFGSKDSGTLHHPHHHHSVPHQPDNLAASNTQSEGSDSVILLKVKDSQTPTPSSTFFQAELWIKELTSVYDSRARERLRQIEEQKALALQLQNQRLQEREHSVHDSVELHLRVPLEKEIPVTVVQETQKKGHKLTDSEDEFPEITEEMEKEIKNVFRNGNQDEVLSEAFRLTITRKDIQTLNHLNWLNDEIINFYMNMLMERSKEKGLPSVHAFNTFFFTKLKTAGYQAVKRWTKKVDVFSVDILLVPIHLGVHWCLAVVDFRKKNITYYDSMGGINNEACRILLQYLKQESIDKKRKEFDTNGWQLFSKKSQEIPQQMNGSDCGMFACKYADCITKDRPINFTQQHMPYFRKRMVWEILHRKLL

SEQ ID NO: 94592 - protein, 643 aa, Artificial Sequence
  derived and/or modified sequence
MDDIADRMRMDAGEVTLVNHNSVFKTHLLPQTGFPEDQLSLSDQQILSSRQGHLDRSFTCSTRSAAYNPSYYSDNPSSDSFLGSGDLRTFGQSANGQWRNSTPSSSSSLQKSRNSRSLYLETRKTSSGLSNSFAGKSNHHCHVSAYEKSFPIKPVPSPSWSGSCRRSLLSPKKTQRRHVSTAEETVQEEEREIYRQLLQMVTGKQFTIAKPTTHFPLHLSRCLSSSKNTLKDSLFKNGNSCASQIIGSDTSSSGSASILTNQEQLSHSVYSLSSYTPDVAFGSKDSGTLHHPHHHHSVPHQPDNLAASNTQSEGSDSVILLKVKDSQTPTPSSTFFQAELWIKELTSVYDSRARERLRQIEEQKALALQLQNQRLQEREHSVHDSVELHLRVPLEKEIPVTVVQETQKKGHKLTDSEDEFPEITEEMEKEIKNVFRNGNQDEVLSEAFRLTITRKDIQTLNHLNWLNDEIINFYMNMLMERSKEKGLPSVHAFNTFFFTKLKTAGYQAVKRWTKKVDVFSVDILLVPIHLGVHWCLAVVDFRKKNITYYDSMGGINNEACRILLQYLKQESIDKKRKEFDTNGWQLFSKKSQIPQQMNGSDCGMFACKYADCITKDRPINFTQQHMPYFRKRMVWEILHRKLL

SEQ ID NO: 94593 - protein, 87 aa, Artificial Sequence
  derived and/or modified sequence
MVDLTQVMDDEVFMAFASYATIILSKMMLMSTATAFYRLTRKVFANPEDCVAFGKGENAKKYLRTDDRVERVRRIKQTLSIYLASSI

SEQ ID NO: 94594 - DNA, 129 bp, Artificial Sequence
  derived and/or modified sequence
atggtcgatctgacacaggtcatggatgacgaggtgttcatggcttttgccagttacgccactattattctgtctaaaatgatgctgatgtccacagcaacagcattttatcggctgacgcgaaagtag

SEQ ID NO: 94595 - DNA, 264 bp, Artificial Sequence
  derived and/or modified sequence
atggttgacctgacccaagtcatggatgatgaggtgttcatggctttcgcttcttatgccactattatcctctccaaaatgatgctgatgtcaaccgcaaccgcattttatagactcacgagaaaggtgttcgcaaatccagaagattgcgtagccttcgggaaaggggagaatgcaaagaaatatctgaggaccgatgatcgagttgagcgagtaaggcggataaaacagactctctccatttacctggcttcaagcatctag

SEQ ID NO: 94596 - DNA, 129 bp, Artificial Sequence
  derived and/or modified sequence
atggtggacctgacccaggtgatggatgatgaggtgttcatggcctttgccagctatgccaccatcatcctgagcaagatgatgctgatgagcacagccacagccttctaccgcctgaccaggaagtag

SEQ ID NO: 94597 - DNA, 264 bp, Artificial Sequence
  derived and/or modified sequence
atggtggacctgacccaggtgatggatgatgaggtgttcatggcctttgccagctatgccaccatcatcctgagcaagatgatgctgatgagcacagccacagccttctaccgcctgaccaggaaggtgtttgccaaccctgaggactgtgtggcctttggaaaaggagaaaatgccaagaagtacctgaggacagatgacagagtggagcgggtgcggcgcatcaagcagaccctgagcatctacctggccagcagcatctag

SEQ ID NO: 94598 - DNA, 202 bp, Artificial Sequence
  derived and/or modified sequence
gtacctgtgaaggggaagatgttaccctggagagatggttcattgactcatcagattccagaccaaaattgaaaaaatggttgacctcacccaggtaatggatgatgaagtattcatggcttttgcatcctatgcaacaattattctttcaaaaatgatgcttatgagtactgcaactgcattctatagattgacaagaaag

SEQ ID NO: 94599 - DNA, 1331 bp, Artificial Sequence
  derived and/or modified sequence
tcctcctcggcctcaccattccagaccaaaattgaaaaaatggttgacctcacccaggtaatggatgatgaagtattcatggcttttgcatcctatgcaacaattattctttcaaaaatgatgcttatgagtactgcaactgcattctatagattgacaagaaaggtttttgccaatccagaagactgtgtagcatttggcaaaggagaaaatgccaagaagtatcttcgaacagatgacagagtagaacgtgtacgcagaatcaaacaaaccctgagcatttatcttgcctcttctatataaagtttaactcggcataaccaattgctgatgaagaagaaatgtttccttgtagaagcaaaccagtgaataattgaagaaaaaatttatcttttcaacatctaatgagttaatggattcaagcaaagattatccacggctgttaacaacacaaaaagacaatcggaaattagctattactgcgggaagtacccaataccatctatgaaactgtgtggacaaaaacactgacaaaaatctccacgaatctctaattttgaatacaaatttaaagaaaatgcaaaggattaaaatagaccatgatgaagtcagaaaaattcagacagagaaaaatgctccaggaccagaaacccatttcttccgcaaaagcttccaggtagagattgactgaccgagagaacagagacatagagagaacctagagattaaaagaaacttgagcgatttgtcagcattcagttgcaacgtatggatgtgatttgaattctaatttaaaaaccaaagtagaaagtggtaaacaattggggaaatgtgaacaatgatagaatatttaatattaatgaaatatgttaaatattttcagatatgataatggcattgagtatgtaaaaaagagcctgtttttaaagaaatacctctgaaatacagatgatataatatcatctgtatattagatgatattatatatatcagtatcatcagaataaagtaaggttagcatgaattgttaattgttgacactgtgcaataggtacgtggataattactatactgttctcattccttttatttatgtttgaaatgttctaaaattaaaagttaaagcatagagtgtaaagttgagcaaattcctccaagacctaaatatagcttatcaaaacttacattaattagatgctgactgttgagctaatacttttttttaatgatgtgtgcttcagtttattgcacttttcaaatactccagttttttgtgtgcgtgtgttttttaaattttattattattaaagttttagggtacatgtgcacaa

SEQ ID NO: 94600 - DNA, 129 bp, Artificial Sequence
  derived and/or modified sequence
atggtggacctgacccaggtgatggacgacgaggtgttcatggcctttgctagttatgcgacgattatcctgtcgaagatgatgcttatgtcgacggccactgccttctatcggctgactaggaagtag

SEQ ID NO: 94601 - DNA, 264 bp, Artificial Sequence
  derived and/or modified sequence
atggtggacctgacccaggtgatggacgacgaggtgttcatggccttcgccagctacgccaccatcatcctgagtaagatgatgttgatgtccaccgccacggccttctatcgattgacccggaaagtctttgctaaccctgaagactgtgtggccttcggaaagggcgaaaatgctaaaaagtacttgaggaccgacgaccgagtggagcgagtgcgccgcattaagcaaacactgtctatttatctcgccagcagcatatag

SEQ ID NO: 94602 - DNA, 129 bp, Artificial Sequence
  derived and/or modified sequence
atggtcgatctcacacaggtcatggacgatgaagtcttcatggcatttgccagttatgctaccatcatattgagcaaaatgatgttgatgtccacagccacagcattctatcgactaactaggaaatag

SEQ ID NO: 94603 - DNA, 264 bp, Artificial Sequence
  derived and/or modified sequence
atggtggacctcacccaagttatggacgacgaagtcttcatggccttcgcttcctatgctaccatcattctgtctaagatgatgcttatgtcgactgccacggccttttacagactgactaggaaggtttttgcgaatcctgaggactgcgtggcctttgggaaaggggaaaacgcgaagaaatacttgaggaccgatgaccgcgtggagagggtgcgcaggattaaacagacactgtcaatttatctcgcttcctcgatttag

SEQ ID NO: 94604 - DNA, 129 bp, Artificial Sequence
  derived and/or modified sequence
atggtggacctgacccaggtgatggacgacgaggtgttcatggccttcgccagctacgccaccatcatcctgagcaagatgatgctgatgagcaccgccaccgccttctacagactgaccagaaagtag

SEQ ID NO: 94605 - DNA, 264 bp, Artificial Sequence
  derived and/or modified sequence
atggtggacctgacccaggtgatggacgacgaggtgttcatggccttcgccagctacgccaccatcatcctgagcaagatgatgctgatgagcaccgccaccgccttctacagactgaccagaaaggtgttcgccaaccccgaggactgcgtggccttcggcaagggcgagaacgccaagaagtacctgagaaccgacgacagagtggagagagtgagaagaatcaagcagaccctgagcatctacctggccagcagcatctag

SEQ ID NO: 94606 - protein, 650 aa, Artificial Sequence
  derived and/or modified sequence
MMPSPSDSSRSLTSRPSTRGLTHLRLHRPWLQALLTLGLVQVLLGILVVTFSMVASSVTTTESIKRSCPSWAGFSISFFSLLSVLCVMLSMAGSVLSCKNAQLARDFQQCSLEGKVCVCCPSVPLLRPCPESGQELKVAPNSTCDEARGALKNLLFSVCGLTICAAIICTLSAIVCCIQIFSLDLVHTQLAPERSVSGPLGPLGCTSPPPAPLLHTMLDLEEFVPPVPPPPYYPPEYTCSSETDAQSITYNGSMDSPVPLYPTDCPPSYEAVMGLRGDSQATLFDPQLHDGSCICERVASIVDVSMDSGSLVLSAIGDLPGGSSPSEDSCLLELQGSVRSVDYVLFRSIQRSRAGYCLSLDCGLRGPFEESPLPRRPPRAARSYSCSAPEAPPPLGAPTAARSCHRLEGWPPWVGPCFPELRRRVPRGGGRPAAAPPTRAPTRRFSDSSGSLTPPGHRPPHPASPPPLLLPRSHSDPGITTSSDTADFRDLYTKVLEEEAASVSSADTGLCSEACLFRLARCPSPKLLRARSAEKRRPVPTFQKVPLPSGPAPAHSLGDLKGSWPGRGLVTRFLQISRKAPDPSGTGAHGHKQVPRSLWGRPGRESLHLRSCGDLSSSSSLRRLLSGRRLERGTRPHSLSLNGGSRETGL

SEQ ID NO: 94607 - DNA, 1953 bp, Artificial Sequence
  derived and/or modified sequence
atgatgcccagccccagcgacagcagcagaagcctgaccagcagacccagcaccagaggcctgacccacctgagactgcacagaccctggctgcaggccctgctgaccctgggcctggtgcaggtgctgctgggcatcctggtggtgaccttcagcatggtggccagcagcgtgaccaccaccgagagcatcaagagaagctgccccagctgggccggcttcagcatcagcttcttcagcctgctgagcgtgctgtgcgtgatgctgagcatggccggcagcgtgctgagctgcaagaacgcccagctggccagagacttccagcagtgcagcctggagggcaaggtgtgcgtgtgctgccccagcgtgcccctgctgagaccctgccccgagagcggccaggagctgaaggtggcccccaacagcacctgcgacgaggccagaggcgccctgaagaacctgctgttcagcgtgtgcggcctgaccatctgcgccgccatcatctgcaccctgagcgccatcgtgtgctgcatccagatcttcagcctggacctggtgcacacccagctggcccccgagagaagcgtgagcggccccctgggccccctgggctgcaccagccccccccccgcccccctgctgcacaccatgctggacctggaggagttcgtgccccccgtgcccccccccccctactacccccccgagtacacctgcagcagcgagaccgacgcccagagcatcacctacaacggcagcatggacagccccgtgcccctgtaccccaccgactgcccccccagctacgaggccgtgatgggcctgagaggcgacagccaggccaccctgttcgacccccagctgcacgacggcagctgcatctgcgagagagtggccagcatcgtggacgtgagcatggacagcggcagcctggtgctgagcgccatcggcgacctgcccggcggcagcagccccagcgaggacagctgcctgctggagctgcagggcagcgtgagaagcgtggactacgtgctgttcagaagcatccagagaagcagagccggctactgcctgagcctggactgcggcctgagaggccccttcgaggagagccccctgcccagaagaccccccagagccgccagaagctacagctgcagcgcccccgaggcccccccccccctgggcgcccccaccgccgccagaagctgccacagactggagggctggcccccctgggtgggcccctgcttccccgagctgagaagaagagtgcccagaggcggcggcagacccgccgccgccccccccaccagagcccccaccagaagattcagcgacagcagcggcagcctgaccccccccggccacagacccccccaccccgccagccccccccccctgctgctgcccagaagccacagcgaccccggcatcaccaccagcagcgacaccgccgacttcagagacctgtacaccaaggtgctggaggaggaggccgccagcgtgagcagcgccgacaccggcctgtgcagcgaggcctgcctgttcagactggccagatgccccagccccaagctgctgagagccagaagcgccgagaagagaagacccgtgcccaccttccagaaggtgcccctgcccagcggccccgcccccgcccacagcctgggcgacctgaagggcagctggcccggcagaggcctggtgaccagattcctgcagatcagcagaaaggcccccgaccccagcggcaccggcgcccacggccacaagcaggtgcccagaagcctgtggggcagacccggcagagagagcctgcacctgagaagctgcggcgacctgagcagcagcagcagcctgagaagactgctgagcggcagaagactggagagaggcaccagaccccacagcctgagcctgaacggcggcagcagagagaccggcctgtag

SEQ ID NO: 94608 - DNA, 2609 bp, Artificial Sequence
  derived and/or modified sequence
gagaggagaaaggacggggccttgggcgcctctgagatgctcccaagtgccagggagggccgagcgaggcgcaggcaaccgggcagcaggcatgatgccctcgcctagtgactccagccgctcgctgaccagccggcccagcaccaggggccttacccacctccgcctccaccgaccctggctgcaggccctgcttacgctggggctggtccaagtgctcctgggcatcctggtggtcaccttcagcatggtggcctcttccgtcaccaccaccgagagcatcaagaggtcctgcccgtcttgggctgggttctcgatctccttcttctccttgctttcggtgctctgtgtcatgcttagcatggctggctctgttctctcctgtaagaatgctcaactggcccgagacttccaacagtgctctctggaaggaaaggtctgtgtgtgctgtccctctgttcccctcctccggccctgtccagagtcggggcaggaactgaaagttgcccctaactccacctgtgatgaagcccgaggggccctcaagaacctgctcttcagcgtctgtgggctcaccatttgtgccgctataatctgtacactctctgctattgtctgctgcatccaaatcttctccctggacctcgtgcatacgcagctggcccctgagcggtcagtctcaggcccactgggacctctgggctgcacgtccccgcccccagcccctctcctacacaccatgctggacctggaggaatttgtcccgcctgtgcccccaccgccctactatcccccagagtatacctgcagctcagaaacagatgcacagagcatcacgtacaatggctccatggacagcccagtgcccttgtaccctaccgattgccccccttcttatgaggcagtcatgggactacgaggagacagccaggccactctctttgaccctcagcttcacgatggctcgtgcatctgtgaacgagtggcctccattgtagacgtgtccatggacagcgggtctctggtgctgtcagccattggtgacctccctgggggctctagcccgtcggaggactcgtgcctgctggagctgcagggctccgtgcgctccgtggactacgttctctttcgctccatccagcgcagccgtgccggctactgcctcagcctggactgtggcctgcggggccccttcgaggaaagccccctgccacggcgccccccacgggctgcccgctcctattcctgctctgcccctgaagctccacccccactgggtgcccccacagctgcccgcagctgccaccggttggagggctggccgccctgggtgggaccctgcttccccgagctgaggcggcgggtcccccggggagggggccgcccagccgcagccccgcccacccgagccccgactcgtcgcttcagcgatagctcaggttccctcaccccaccggggcaccggcctcctcatccggcatccccaccaccgctgctgctgccacggtcccacagcgacccaggcatcacgacctccagtgacactgctgacttcagggacctttataccaaagtgcttgaggaagaagctgcttctgtttcctctgcagatacagggctctgctctgaagcctgcctcttccgcctagcccgctgcccttcccccaagttgctacgtgcccggtcagccgagaaacggcgccctgtgcccaccttccaaaaagttcccctgccctcgggccctgcacctgcccactccctgggggacctaaagggcagctggccaggtcggggcctggtcactcgtttcctccagatatccaggaaagccccagaccccagtgggactggagctcatggacataagcaggtgccccggagcctgtggggccggcctggccgagagagcctccaccttcgcagctgcggagatctgagctctagctcttccctgcggcgtctcctgtctggccgcaggctggagcgtggtacccgcccccacagcctcagcctcaacgggggcagccgggagactgggctctgacctaggcttcttgtcacactgaacacatccagccacaggcaccagctggttgggaccagcagcccccagcatcctcttgcactggctggcacaaaaagaaacctgctgtataccccccaaagtgtccctttccctcctacctctggggtctcttgctgcttgcctctgctgctctggactgggagagcttctgtcctgtgctgcatgggtatttagactgtgggggagatgccccttcttatagcactggaggaggaaaacaaattcttgtccccctcagaatgagagtggctctttctgatttgcaagggcactatggtcagggcaaaggcatggcccaggtgtttaagtacagggtgacgtgtgcctatgcaatggggtggtaaggcaggcacgaagagtccaaaaaatctaggtggcctctcagctctgccacctctagctgcatgaccttgggcaagctatgtaaccccaattgcctgctccattaaagactgtgaaggtagaatgtttgtaaagctcttaacagtatgtaagccttcaataaatttcagttttccccttg

SEQ ID NO: 94609 - DNA, 1953 bp, Artificial Sequence
  derived and/or modified sequence
atgatgccatcaccctctgattcttctcgttccctgaccagccgtccgtccacacgtggactgacgcatctgcgtctccatcgaccctggctgcaggctctcctgaccctcggcctggtgcaggtcctgctcggaattctggtggtgacattctccatggtagcctcttctgttacgactacggagtcaatcaaacgcagttgtccgtcctgggctggcttctccatctccttcttttctctcttaagtgtcctgtgtgtgatgctatccatggccgggtccgttttgagctgcaagaacgcccagctagccagagatttccaacagtgttccctggagggcaaggtctgcgtgtgttgtccgagtgtacccttacttagaccatgtcccgaatcgggtcaggagctgaaagtggcaccgaactccacttgtgacgaagctcgaggtgctctgaaaaacctcctttttagtgtttgtggcttgactatatgcgcggctataatctgcactctatctgccatcgtgtgctgcatccaaatattctctctggatcttgtacacacccagctggctcccgaacgctcagtgagcgggccattgggccccctgggatgtacctcccctccccccgctcctctccttcacaccatgctggacctcgaggaattcgtcccaccggttccaccaccaccctattatccccctgagtatacatgctcttccgaaaccgatgctcagagcatcacttataatggcagcatggattctcccgtgccactgtatccaactgactgtcctccctcttatgaggctgtcatgggattaagaggtgatagtcaggctactttattcgatccgcagctgcatgatggaagctgtatatgtgagcgagtagccagcattgtggatgtgtctatggactccggctcactggtgctatccgccattggtgatctcccgggaggatctagtccatccgaggattcctgtctgctggagcttcaaggcagtgtgagaagtgtggactacgtcctgtttagaagcatccagagatcaagggctggctattgcctgagcttggattgcgggctgcggggccctttcgaggagtcacctctacctagaaggcccccacgagccgctcgctcttattcttgtagcgcacctgaagcccctccccccctcggagcacctactgctgcgagatcttgtcacagactcgaggggtggccaccttgggtgggaccatgcttcccggagctaaggaggcgggttcccaggggtggcgggcggcctgcagccgcgccccctaccagagcgcccacccgacgcttttcagacagtagcgggtcactcacgccacctggacacagacccccacacccagcttcccctccacctctgctgttacctcgttcacacagcgaccccggaattactacctcatctgacacagccgattttcgagacctatataccaaagttctggaggaggaggctgcttctgtgtcctctgccgatacaggcctgtgtagtgaggcttgtctgttccgccttgcacggtgccccagccctaagcttctccgagctagatccgcggaaaaaaggcggccagttccaactttccagaaggtgcccctcccatctggccccgctccagcacacagtcttggggatctgaagggatcctggcctggtcggggattggttacccggtttttacaaatcagtcgcaaggcgcccgacccttcaggcaccggagcacacggacacaagcaggtgcctcgtagtctgtgggggagacctggtcgggagtccttgcatctccggtcctgcggggatctcagcagtagcagtagcctccggcggctactctccggcagacgcctggagcgcggcacaagaccgcacagtttgtctctgaatggaggctcccgcgaaacagggctgtag

SEQ ID NO: 94610 - DNA, 1953 bp, Artificial Sequence
  derived and/or modified sequence
atgatgcccagccccagcgacagcagccgcagcctgaccagccggcccagcacccggggcctgacccacctgcggctgcaccggccctggctgcaggccctgctgaccctgggcctggtgcaggtgctgctgggcatcctggtggtgaccttctccatggtggccagctctgtgaccaccacagagagcatcaagaggagctgccccagctgggccggcttcagcatctccttcttcagcctgctgtctgtgctgtgtgtgatgctgtccatggccggctctgtgctgagctgcaagaatgcccagctggcccgggacttccagcagtgcagcctggagggcaaggtgtgtgtgtgctgccccagcgtgcccctgctgcggccctgcccagagagcggccaggagctgaaggtggcccccaacagcacctgtgatgaggcccggggggccctgaagaacctgctcttctctgtgtgtggcctgaccatctgtgccgccatcatctgcaccctgagcgccatcgtgtgctgcatccagatcttcagcctggacctggtgcacacccagctggcccctgagaggtctgtgtctggccccctgggccccctgggctgcaccagccccccaccagcccccctgctgcacaccatgctggacctggaggagtttgtgccccctgtgcccccaccaccctactacccacctgagtacacctgcagcagcgagacagatgcccagagcatcacctacaacggctccatggacagccctgtgcccctgtaccccacagactgcccccccagctatgaagctgtgatgggcctgcggggggacagccaggccaccctgtttgacccccagctgcatgatggcagctgcatctgtgagcgggtggccagcatcgtggatgtgtccatggacagcggcagcctggtgctgagcgccatcggggacctgcccggcggcagcagccccagcgaggacagctgcctgctggagctgcagggctctgtgcgctctgtggactatgtgctcttccgcagcatccagaggagccgggccggctactgcctgagcctggactgtggcctgcggggcccctttgaggagagccccctgcccaggaggcctccccgggccgcccggagctacagctgcagcgcccctgaggcccccccacccctgggcgcccccacagctgcccggagctgccaccggctggagggctggccaccctgggtgggcccctgcttccctgagctgcggaggagagtgccccggggcggcggccggcctgctgctgccccacccacccgggcccccacccggcgcttcagtgacagcagcggcagcctgaccccacctggccacaggcctccccacccagccagccccccacccctgctgctgcccaggagccacagcgaccccggcatcaccaccagcagtgacacagctgacttccgggacctgtacaccaaggtgctggaggaggaggccgcctctgtgtcctctgctgacaccggcctgtgcagcgaggcctgcctcttccggctggcccgctgccccagccccaagctgctgcgggcccggtctgctgagaagaggaggcctgtgcccaccttccagaaggtgcccctgcccagcggccctgccccagcccacagcctgggggacctgaagggctcctggccaggccggggcctggtgacccgcttcctgcagatcagcaggaaggccccagaccccagcggcaccggggcccacggccacaagcaggtgcccaggagcctgtggggccggcccggccgggagagcctgcacctgcggagctgtggggacctgagcagcagcagcagcctgcggcggctgctgagcggccggcggctggagcggggcacccggccccacagcctgagcctgaatggaggcagccgggagaccggcctgtag

SEQ ID NO: 94611 - DNA, 1953 bp, Artificial Sequence
  derived and/or modified sequence
atgatgcccagccccagcgacagcagccggagcctgaccagccggccgtcaacaaggggacttactcatctgcgattgcaccgcccatggttacaggcgctgctcaccctggggcttgtgcaggtcttgctggggattctggttgttacattctcgatggtggcttcctctgtcacaactacggaaagcataaaacgatcctgcccctcatgggcagggttctcaatcagtttcttctcccttctatctgttctatgtgtgatgctgagtatggccggaagcgtgctttcctgcaagaatgcacagcttgctagagactttcagcaatgttcacttgaagggaaagtctgtgtttgctgtccttcagtcccccttcttcggccttgcccggagagtggacaagagctgaaagtagcccccaacagcacctgcgatgaggccaggggtgctctgaaaaatctgctgttttctgtgtgcggcctgactatctgtgccgccattatatgtactctgagcgccatcgtgtgctgcattcagatttttagtctggacctggtgcatacccagctcgccccagaacgttctgtgagcggtcccttagggcctcttggatgtacatccccgcctccagcccctctgctacacaccatgctcgatctggaggagttcgtgccccctgtgcccccacccccttattaccctccagagtacacttgctcctctgagacagacgcccaatctataacctataacgggagcatggattctcctgtgccactatacccaaccgactgcccaccctcatatgaggccgttatgggattaaggggggactcacaggcaacccttttcgacccccagctccacgatggatcctgcatttgcgaaagggtcgccagcatcgtcgatgtgtctatggactctggcagtctggttcttagtgcaatcggcgacctccccgggggttcgtctccctctgaagattcctgcctgctggaactgcagggctcagtcagatctgtggattacgtgctgtttagaagtattcagaggagcagagctggctactgcctgagtctggactgcggactgcgcggccctttcgaagaaagcccactcccccgtcggcctccccgcgccgcccgctcctacagttgtagtgccccggaggcaccaccccccctcggagctccaaccgcagctcggtcctgtcaccgtctagaaggctggcccccatgggtcggaccatgtttccctgagctacgtcggcgcgtgcccaggggagggggcagacctgccgcagccccccccaccagagcacctaccaggagattttcagattcctctggcagcctgacacccccaggtcacagacccccccatccagcttcacccccaccgctgctgttgccgcggtctcactccgaccccggaatcacaacatctagcgatacggccgattttagagacctgtatacaaaggttctagaggaagaagccgcttctgtcagttccgctgataccggcctttgttctgaggcatgtctgttcagattggcacgatgtccctctcctaagctgctcagggcccggtctgccgagaagaggaggcctgtgcctacttttcagaaagtgcccttaccctcaggtccagcaccagcccactcactaggtgacctcaagggctcttggccgggcaggggcctagtgactagattcctacagataagcagaaaagcaccagatccctctgggaccggggcgcacggacacaagcaggttcccagatctctgtgggggcgacccgggagagaaagcctgcatctgagaagttgtggagacctatcctcctcctcatcattacgtaggcttctttcagggaggcggctggagcgtggcaccaggcctcattccctgtctcttaatggcggctccagagagaccggactgtag

SEQ ID NO: 94612 - DNA, 1953 bp, Artificial Sequence
  derived and/or modified sequence
atgatgccatccccttctgatagcagtaggtctctgaccagccggccatccactcggggattgacacatctccggctgcataggccctggctgcaggcactgctgaccttaggcctggtgcaggtgctgctcgggattctggtggtgactttctctatggtcgcgtccagtgtgactaccactgaaagtattaagcgatcctgcccctcctgggccggtttttccatatccttcttcagcttgctgtctgtgctatgcgtaatgttgtccatggcaggaagcgtcctcagttgcaaaaatgcacagctggctcgggactttcagcagtgttctttggaaggaaaggtgtgtgtgtgctgcccctcggtgcctctactgcgcccttgtccagagagcggccaagagctgaaggttgcaccaaattccacatgcgatgaggcaaggggggctctaaaaaacttgctcttctcagtgtgcgggctcacgatctgtgctgcgatcatctgcacactgtctgctatcgtatgctgcatacaaattttttccctggatctcgtgcacacccaactcgcccctgaaagatccgtgagcggcccactgggaccactggggtgtacttccccccctcccgcacccctgctacacaccatgcttgatctggaagaatttgtgccgccagtgccgcctccaccgtattaccctcctgagtatacatgctcttctgagaccgatgcccagtcaatcacttataacggttcaatggacagcccagttccgctgtaccctactgactgtccaccttcatatgaagctgtcatgggactccgaggcgattcccaagctacactctttgatccccagctgcatgatggctcgtgcatttgcgaaagagtggcatctattgttgacgtctcaatggatagcggctcgctcgtactctcagctatcggggacctgcctggtggctcttcaccgagtgaagactcgtgtctgctcgagctccaaggcagtgtcaggagcgtggactacgttctgtttcgcagcatccaaaggagtcgggctggatattgcttgtcattagattgcggcctcagggggccatttgaggaaagcccccttccacgccgaccgccaagagccgctcggtcatacagctgctccgcaccagaggcaccaccacccctcggggcacctaccgccgcacgctcttgtcacagactggaggggtggccaccttgggtgggcccttgctttccagagctgagacgcagggttccacgtggtggaggcaggcctgccgctgctccgcctacccgcgctcctactcggcgattttccgactcttccggaagtctgaccccgccaggacaccgcccaccccacccagcttctcccccaccgcttctgctgcctaggagtcattccgaccccggtatcaccacatcctccgatacggctgactttagagatctgtatactaaagttttagaggaggaggcagcctctgtctcttccgccgacacaggactctgttcggaagcctgcttgttcagacttgcccgatgccctagccctaaactcctgcgagccaggagcgctgaaaagaggagaccggtcccaaccttccagaaggtcccgctccccagcgggcctgctcccgctcattctctgggggatctgaagggaagctggcctgggaggggcctggtgactcggttcctgcagatttcacgcaaggctcccgacccgagcgggactggagcccatgggcataagcaggtgcccagatccctgtggggcagaccaggtcgcgaaagtttgcatttacgttcttgtggcgacctgtctagctcctcaagcctgaggcgtttgctaagcggtcgaaggctggaaagaggcacgagaccccattctctctccctgaatgggggttcccgggagaccggactgtag

SEQ ID NO: 94613 - DNA, 510 bp, Artificial Sequence
  derived and/or modified sequence
atgttaccaagcaccatgtttttggtgcacctccctctttcaaccaatagactgcactgcctgcggaatacctccttagagccatgcttgtgcagttttgtgcatttaaaccaccctttgcacatttccgaccctgttattctgatcagccttcacgaggccgtgcggttcagctttgccttctcatttcctcgcgggaccctgtctattgcctactgcctgatgtccagcgtcagcacaagctcagaggccattatgtctactgagctgctcgccaattattgtcactcttcactgcacgtgtgcatctgtattagttcattccctaatgaaactgggaaccacgattcttttcccggagccgtggtcagtatttcagaccaacctaccgaccagtgcaagttggcagcgaaggaactgccacttagaaatctccttgagtgccggtttttcgactgcatgggcgaggaagatttgatcaacctaggtgtgatagggacagaacgctag

SEQ ID NO: 94614 - DNA, 1953 bp, Artificial Sequence
  derived and/or modified sequence
atgatgccaagccctagcgactcatctagaagcctgacatctcgcccctctacccggggcctgacccatctgaggttacaccgtccttggctgcaggccttgctgaccttggggctggtccaggtgcttctgggtatactggtggtgacattctccatggtggcttcttctgtcaccactacggagagcatcaaacgctcttgcccctcctgggccggcttctctataagtttcttttcattgcttagcgtactgtgcgtcatgttaagtatggctggcagtgtgttaagctgtaagaacgctcagttagcgcgcgacttccagcagtgctccttggaaggcaaggtgtgcgtctgttgtccttcagtgcccctgctgagaccgtgtccagagtctggccaagagttgaaggtggcccctaattcaacttgcgatgaagcgagaggcgctctcaagaatttgcttttttccgtctgcggattgaccatttgtgcagccatcatctgcacacttagcgctatcgtgtgttgtatccagatcttctccttagacctagtccatactcagttggctcccgagcgaagtgtctcaggccctctcggtcctctgggttgcacttcccccccccctgctcccctactgcacacaatgcttgacctcgaggagttcgtcccaccagtgcctcccccaccatactacccccctgagtacacatgtagctccgaaactgacgcgcaatctataacatataacggaagcatggatagtcccgtccccttgtacccaacagattgcccccccagttacgaggccgtgatggggttacgtggcgactcccaggccacactctttgatccccaacttcacgacggcagctgtatctgtgagcgagtcgcatcaattgtagacgtgagcatggattccggctcccttgtgttatcggccatcggggatctccctgggggcagtagcccctctgaggactcatgtttgttggagttgcagggtagtgtgcgcagcgtcgactacgtactctttcgaagtatacagcggagccgcgcaggctactgtctgtccctagactgtgggttgcgtgggcctttcgaggagtcgcctctgccccgccgaccccccagggcggcacggtcttattcctgctctgccccagaagcgccacctcccctgggcgctccaacagccgctagatcatgccaccgactggagggttggccaccctgggttggaccatgctttcccgaacttcgtaggcgcgtgccaagggggggagggaggcctgcagctgcaccccccactagggcgccaacccgacgcttcagcgatagttcagggtctttgacccctcctggccatcgacccccacatcctgcatccccaccacccctcctgttgccacggtcccatagtgatccaggtattacaacaagcagcgatacagcggatttcagggatttgtatactaaggttctcgaggaggaagctgctagtgtgtcatccgcagataccggcctgtgcagtgaggcctgcttattcagactcgccagatgccctagccccaagctgctgcgtgctcgtagtgctgaaaagagaagacctgtacccacgttccagaaagttcctctcccaagtggccccgcgccggcccacagcctcggggatctgaagggatcctggcccggcagggggctggtcactaggtttctgcaaatttccaggaaagcacctgatccaagtggcactggtgcacatgggcacaaacaggtccccagatctctgtggggcaggcctggacgggaatctcttcatctgagatcctgtggggatctgtcatccagcagcagtctccggagactcctttctggacggcgactagagcggggtacacgccctcattcattgagccttaatgggggcagtagagaaacaggtctttag

SEQ ID NO: 94615 - DNA, 1623 bp, Artificial Sequence
  derived and/or modified sequence
ggccttcacagctcctgccttcatgttaccgtctactatgttcctcgtgcaccttccactcagcacaaacaggctgcactgcctccgaaacacatcactggaaccctgcctctgctcctttgtccatctgaatcaccctctccacatttctgaccctgtaatcctgatctcacttcatgaggcagttcgcttctcttttgcatttagctttccccggggtacactgtcaatagcctactgtctgatgtcatcagtcagcacttcatcagaggcaattatgtccacagagcttttggctaattactgtcactcctctttacatgtgtgcatatgcatatcatctttccctaatgagactggaaatcatgattcattccctggagcagtggtttccataagtgaccaacccacagaccagtgcaaactggctgcaaaagagcttcctctgaggaacttattagaatgcagattctttgactgcatgggagaggaggatctcataaatctgggtgtaataggcacagaacgttaggtgtaatatgggcgggactctggactcagcatatccaacaagctgctggctgattccgatgatgccgatgaattgccaggttgggaactgctgcccccagagaacctagcagagagctctgtacgtggtaggtgctcactcccctattgtttgggtgtatgcctcctgataatgaacttgatcgtaacattattgttgcattatgcctgtattgtttccttaggtgaaggaagaatgcttttgagtacctaataggtggcaagctctgtgcctacttacatacatgaactattccttttaataacctttggaaataaagtggcatttccattgggcattagaaatctgaagactttcgtttacagctgttgcaacagcagaactagaattcgacctccgacatttctgctcaccagagggcatgaactgctggtttgtacctggcttgcagataccttctttgggcagcacaatgttcaaaattaaaaaaactaccaacacttctaaactggatactttgtatcaatatctgggtttctggcttctcttcatgggaaacaaacaaacaaaaaaaaaggtttggtgaacaatggggcccacattcctgcagggcaacagtcacatggagactttagatgggcacgtgcccagaacacactagagtccccatcgctccccattctcttacattctgttcccaactaggttcttataggcctgggtttgtgcctgttgcacacttatctactctcttgcttcccactggtcaggaagtctggcaaacttaaaaggcctctttttgttgctctctcctgtatggatctctcatcatagaggtgtgtgcatttctgactttgtgatttcaatactaaggaagctgtcggcacattatcaaggaaaacggggatcgctgctccccaacgtacacattctggtgtgccccagtaaaattctatattcagcctccaaactagctgggaaaaatgtggcaaatcatctacttgctccaattcaatagtgtttagaagtaagaagtcactgtgagcaatgccaccaagtggtggagagactccatgcagaatcgccacctt

SEQ ID NO: 94616 - DNA, 510 bp, Artificial Sequence
  derived and/or modified sequence
atgctgcccagcaccatgttcctggtgcacctgcccctgagcaccaaccggctgcattgcctgcgtaatacatctttagaaccatgcctttgtagtttcgtgcacctgaaccaccccttgcacatctctgatcctgtcatcttaatctcgctgcatgaggccgtgagattctctttcgcattctccttccctcgcggtacactcagcattgcttattgtctgatgtccagtgtgtctaccagtagcgaggcaataatgagcacagagttgcttgcaaactattgccactcaagcctgcatgtttgcatttgcatctccagttttccaaatgaaacagggaaccacgattcatttcctggcgctgtggtttccatctctgatcagccgactgaccagtgcaaactagccgccaaggagcttccgctgcgcaacctactagagtgtcgcttcttcgactgcatgggcgaggaagatctaattaatttgggcgtgataggcaccgagagatag

SEQ ID NO: 94617 - DNA, 1953 bp, Artificial Sequence
  derived and/or modified sequence
atgatgcccagccccagcgacagcagccggagcctgaccagccggccttccacaaggggcctcacccatctgaggctccaccgaccgtggctccaggccctacttactctcggccttgttcaggttctactgggcatcctggtagtgacgttctcaatggtcgcctcttcagtgaccaccacagagtccataaagcgaagttgccctagctgggcgggattctctataagtttcttttcgctcctgtcagtgctctgtgtaatgctgtctatggctggctcagttctcagctgcaaaaacgcccagcttgctcgtgatttccagcagtgtagcctcgaaggtaaggtgtgtgtttgctgcccaagcgtgccccttctgcgaccatgcccagaatctggccaagagctgaaagtggcacctaacagcacttgtgatgaggcgaggggagcgctaaagaacctgttgttttctgtatgtggtctgaccatctgtgcagcaatcatttgtacattgagcgctatcgtctgctgcatccagatattctctttggacctggttcatacgcaattagcgcctgagcgctcagtcagcgggccactgggccccctggggtgtactagccctccaccagctcccctgctccatactatgctcgacctcgaagaattcgtccctcctgtgcccccacctccttactatccacctgagtacacatgctcctcagaaactgacgcccagtctataacatacaatggttcaatggactccccagttccactgtaccccacagactgccccccatcatacgaagccgtgatgggactgcggggggactcacaggctaccttgttcgacccccagctccacgacggctcgtgcatatgcgaaagagtggcgtcaatcgtggatgttagcatggattctggatccttggtgctcagtgctatcggcgatctccctggcggatcttcaccatcagaagattcctgcctgttggagctgcagggttctgtccgcagcgtggattatgtccttttcagatctatccaaagaagtagggccggctactgcctgtcgttagactgtggcttacggggcccttttgaggaaagtcctctgcctagacggccccctagggctgctcgctcttatagttgtagcgcgccagaggcccccccacctttaggggccccaacagccgcccgctcttgtcacaggctagaagggtggcccccttgggtgggcccatgtttcccagagctgcgtagacgagtgcctcgcggcggcgggcggcccgcagccgctccaccaacccgggcgcccacccgccgttttagcgacagttcaggaagcctcacaccccctgggcatcgtcctcctcacccagcctctccacccccactattgctgccgcggtcccattccgacccagggatcacaacatcatcagacacggccgatttcagggacctctacactaaggttctggaagaagaggccgcaagcgtgtcatcagccgatactggcttgtgcagcgaagcctgcctgtttcgtttggcccgttgtccatcacctaaattgttgcgcgcgcgtagcgcggagaaaagacggcccgtacctacctttcaaaaagttcccttaccaagcggaccggcgcctgcccactcactgggtgacctgaaggggagctggccgggaaggggcttggtcaccaggttcctacaaatttctcggaaagctccagaccccagtggcacgggggcccacggacataagcaggtgccccgaagcctgtggggaaggccaggccgtgagtctctccatctgagaagctgcggcgatctgtcatctagttccagcctgcgcagactgctgtcaggacggagactcgagcggggcacccgcccgcatagcctctctctgaacggagggtcacgggaaaccgggttatag

SEQ ID NO: 94618 - DNA, 510 bp, Artificial Sequence
  derived and/or modified sequence
atgcttccttctaccatgtttttggtccacctgcccttaagcacaaacagactgcactgcttgcggaacacttcgcttgagtcctacctgtgttcatttgtccacttaaaccaccccctgcacataagcgaccgagtgatcctgatttccctgcacgaggccgtccggtttagttttgctttctcttttcctcgcggaaccttgagtatcgcttactgtttgatgagttcagtgtctacctcctccgaagcaatcatgtcaaccgagctcttggccaattactgccattcctctctgcatgtgtgtatatgtatctcctcattcccaaacgaaactggaaaccatgatagtttccccggagccgtcgtatcaatcagtgatcaacccaccgatcagtgtaagctggccgctaaagaacttccgctccgaaacttgctagagtgtaggttctttgactgcatgggtgaggaggacctcatcaatctgggtgtgatcgggaccgaacggtag

SEQ ID NO: 94619 - DNA, 510 bp, Artificial Sequence
  derived and/or modified sequence
atgcttcctagtactatgttccttgttcacctgcctctgtctactaacagactgcactgcttaaggaacacaagcctggaaccgtgcctgtgctctttcgtccacctcaatcatcctctgcatatcagtgaccctgttatcctgatttcattgcatgaggctgtcagattctcattcgccttttccttcccgaggggcacactgtcaattgcttactgcctgatgtcatccgtatctacctctagtgaagcaattatgagtaccgaattgctggccaactactgccactctagcttacatgtctgtatctgtatatcttccttcccaaatgaaactgggaatcacgacagctttccaggcgctgtggtgtccatcagcgatcagcctacggaccagtgtaaactcgctgccaaagaattgccacttcgtaatctgctggagtgtcgtttctttgattgtatgggagaagaggatcttatcaatctgggggtgatcggtactgagcgttag

SEQ ID NO: 94620 - DNA, 1953 bp, Artificial Sequence
  derived and/or modified sequence
atgatgccatcccccagcgactctagtcggtccttgacaagcagaccaagcaccagggggctcacccacttgagacttcacagaccatggctgcaggccttgcttaccctcggattggtccaggtgttactgggcatactggtagttactttcagtatggtggccagctctgttacaacaaccgaaagcataaagaggagctgtccctcatgggccggattcagtatatcttttttttctcttctgtctgtactgtgtgtcatgctatcaatggctggtagtgtcctttcgtgtaagaacgctcagctggccagagacttccagcagtgcagcctggagggcaaagtatgcgtttgctgtcccagcgtgcctttgttaagaccctgtcccgagagtgggcaggagctgaaggtcgcccctaacagcacttgcgacgaggcgaggggggctttgaaaaacctattgttctctgtgtgcgggctcaccatttgcgcagcgattatttgcaccctgtcggccattgtctgctgcattcagatctttagtctagatttggtccatacccagcttgctcctgagaggagcgtaagtggacccctgggccctttggggtgcaccagccctccgccagcccctcttctacacaccatgctcgatctggaggagtttgtgccccctgttcctcccccaccctattatcctcccgaatacacttgctcaagcgagactgacgcacagtcgatcacctacaatgggtctatggacagccccgtgcccctttaccccaccgattgcccaccttcatacgaggccgtcatgggcctccgaggcgacagccaggccaccctgttcgacccccagctccacgatggaagctgcatttgtgaacgggtggcttccattgtcgatgtgtccatggacagcggcagtctggtcttgtctgccattggggatctccctggcggatcctcaccctctgaggactcatgcctgcttgaacttcagggctcagtgcgcagcgtggactatgtgctctttcgcagcattcaaaggagccgggcagggtattgcctgtcactcgattgcggccttcgcggtccttttgaggagagccccctgcccaggagacctcctagagcagccaggtcctatagctgttccgcacccgaggcacctcctccgctcggtgcacctaccgctgctaggtcttgtcatagactggaaggctggcctccatgggtcggaccctgcttccctgagctaaggcgtcgggtgccacgtggcggaggacggcctgccgcagcccctcctactagagccccaacgagacggttttctgactccagcggctccctcactcctccaggccaccgtcccccacaccccgctagccctccacctctcttgctcccaagatcacattcagacccaggtatcactacatcaagcgacaccgcagatttcagggatttgtacacgaaagtgttggaggaagaggcagcaagtgtctcctccgccgacacaggtctttgctccgaggcttgcttgtttagacttgccagatgcccttcaccgaagctactccgggcacgcagtgccgagaaacgcaggcccgtgccaacctttcaaaaggtgcccttgccatccggccctgcaccggcacactcactgggagacctgaaagggtcctggcctgggaggggccttgtcacccgtttcctgcagataagtagaaaggcccctgatccttccggtactggcgctcatggacataaacaagtacctcgctccctgtggggacgcccaggaagagagtccttgcatttgcgtagttgtggcgatctttcttcttcgagctctctgcggcgtctgttgtccgggcgacgtcttgagcggggaacacgtccccacagcctgtccctcaatggcggaagcagggagactggtctgtag

SEQ ID NO: 94621 - protein, 529 aa, Artificial Sequence
  derived and/or modified sequence
MSLNSSLSCRKELSNLTEEEGGEGGVIITQFIAIIVITIFVCLGNLVIVVTLYKKSYLLTLSNKFVFSLTLSNFLLSVLVLPFVVTSSIRREWIFGVVWCNFSALLYLLISSASMLTLGVIAIDRYYAVLYPMVYPMKITGNRAVMALVYIWLHSLIGCLPPLFGWSSVEFDEFKWMCVAAWHREPGYTAFWQIWCALFPFLVMLVCYGFIFRVARVKARKVHCGTVVIVEEDAQRTGRKNSSTSTSSSGSRRNAFQGVVYSANQCKALITILVVLGAFMVTWGPYMVVIASEALWGKSSVSPSLETWATWLSFASAVCHPLIYGLWNKTVRKELLGMCFGDRYYREPFVQRQRTSRLFSISNRITDLGLSPHLTALMAGGQPLGHSSSTGDTGFSCSQDSGTDMMLLEDYTSDDNPPSHCTCPPKRRSSVTFEDEVEQIKEAAKNSILHVKAEVHKSLDSYAASLAKAIEAEAKINLFGEEALPGVLVTARTVPGGGFGGRRGSRTLVSQRLQLQSIEEGDVLAAEQR

SEQ ID NO: 94622 - DNA, 2422 bp, Artificial Sequence
  derived and/or modified sequence
ttttcctgtcccctggtcctgccttatctttccagtcgtccagcatgctctgcccaccccacgccgaggtgcactgaccatgagcctcaactcctccctcagctgcaggaaggagctgagtaatctcactgaggaggagggtggcgaagggggcgtcatcatcacccagttcatcgccatcattgtcatcaccatttttgtctgcctgggaaacctggtcatcgtggtcaccttgtacaagaagtcctacctcctcaccctcagcaacaagttcgtcttcagcctgactctgtccaacttcctgctgtccgtgttggtgctgccttttgtggtgacgagctccatccgcagggaatggatctttggtgtagtgtggtgcaacttctctgccctcctctacctgctgatcagctctgccagcatgctaaccctcggggtcattgccatcgaccgctactatgctgtcctgtaccccatggtgtaccccatgaagatcacagggaaccgggctgtgatggcacttgtctacatctggcttcactcgctcatcggctgcctgccacccctgtttggttggtcatccgtggagtttgacgagttcaaatggatgtgtgtggctgcttggcaccgggagcctggctacacggccttctggcagatctggtgtgccctcttcccctttctggtcatgctggtgtgctatggcttcatcttccgcgtggccagggtcaaggcacgcaaggtgcactgtggcacagtcgtcatcgtggaggaggatgctcagaggaccgggaggaagaactccagcacctccacctcctcttcaggcagcaggaggaatgcctttcagggtgtggtctactcggccaaccagtgcaaagccctcatcaccatcctggtggtcctcggtgccttcatggtcacctggggcccctacatggttgtcatcgcctctgaggccctctgggggaaaagctccgtctccccgagcctggagacttgggccacatggctgtcctttgccagcgctgtctgccaccccctgatctatggactctggaacaagacagttcgcaaagaactactgggcatgtgctttggggaccggtattatcgggaaccatttgtgcaacgacagaggacttccaggctcttcagcatttccaacaggatcacagacctgggcctgtccccacacctcactgcgctcatggcaggtggacagcccctggggcacagcagcagcacgggggacactggcttcagctgctcccaggactcagggacagatatgatgctgcttgaggactacacgtctgatgacaaccctccctctcactgcacttgcccacccaagagaaggagctcggtgacatttgaggatgaagtggaacaaatcaaagaagctgccaagaactcgattcttcatgtgaaagctgaagtacacaagtccttggacagttacgcagcaagcttggccaaagccattgaggccgaagccaaaatcaacttatttggggaggaggctttgccaggggtcttggttacagcacggactgtcccggggggcggcttcgggggccgccgaggcagcagaactcttgtgagccagaggctgcagttgcagagcatcgaagaaggagatgttttagctgccgagcagagatgagggcctcagggtgccgtggggctgcagcctgagaggctggcccggggaggagttcccatcaccgcctgtgccgcggccttgggagcatgtcactgtgtacagctggccacacacagggaaggagcagcatctggtatgcagccaccaggacaaggactgaaaataatgtctacagtccacagcttcagcatttccagagaccacatgtgagcttcttttaggtcccagtgatgggaccagaagcatctaaagcaaaaaaaaaaccaaaaaaaaatctagagatgtggctgtggctttttgggaggtggggcatgggaggaccagagacgaagggcttggaaggagacccccacatgcatcatttcctcctcttcacagtgtgctgggagtccagccgtgcactgtgccagatgcctcaggaggagaaccctccccagtgtactgtgaaggatgacacagcacttcttcctaatgacacgcgaccgtcctggtgcctctacatggttgatgcgggcagtgtgggaccctcagttctaggactggtccgcagagaaagcacccaggagcagagcgcttcggagcggtcctcagtggcgccacctgctggtgctaatagggacagccacaggcctcttgcagactggcccaccctgcctacttccctactgacaagttctttggtatttcaaaagggagaaaccactataaaagacaagaggaagggcaggtactaggtgtttcatttccagaatt

SEQ ID NO: 94623 - protein, 451 aa, Artificial Sequence
  derived and/or modified sequence
MGGRRCVPGTLPMRAAPPGAKRLHVPLRAKGVGRSGHAPRLESVRTSYYAVLYPMVYPMKITGNRAVMALVYIWLHSLIGCLPPLFGWSSVEFDEFKWMCVAAWHREPGYTAFWQIWCALFPFLVMLVCYGFIFRVARVKARKVHCGTVVIVEEDAQRTGRKNSSTSTSSSGSRRNAFQGVVYSANQCKALITILVVLGAFMVTWGPYMVVIASEALWGKSSVSPSLETWATWLSFASAVCHPLIYGLWNKTVRKELLGMCFGDRYYREPFVQRQRTSRLFSISNRITDLGLSPHLTALMAGGQPLGHSSSTGDTGFSCSQDSGTDMMLLEDYTSDDNPPSHCTCPPKRRSSVTFEDEVEQIKEAAKNSILHVKAEVHKSLDSYAASLAKAIEAEAKINLFGEEALPGVLVTARTVPGGGFGGRRGSRTLVSQRLQLQSIEEGDVLAAEQR

SEQ ID NO: 94624 - DNA, 1878 bp, Artificial Sequence
  derived and/or modified sequence
attgtgcgaggctgagggctcagggcgcgggccgggaagggtccccgcccccacggcgctccctttctccccgcgcccctctcggaggtcagggctgtcctccgcccgcactgcgccttgctttggagagctggagctctttgtgggaagatgttgggggcgcgcccctcccctgcggcctggggcttctgagaggcccaccccattctgctgggtgcagcccgccccgtttctccggcgccgcccgaagcccctaaacagtccgctggatgggagggcgtaggtgcgtgcccgggactctgccgatgcgggccgcgccccctggggccaagagactccacgtcccgctcagggcaaagggtgtggggagaagcggtcacgcccctcggctggaatccgtgaggaccagctactatgctgtcctgtaccccatggtgtaccccatgaagatcacagggaaccgggctgtgatggcacttgtctacatctggcttcactcgctcatcggctgcctgccacccctgtttggttggtcatccgtggagtttgacgagttcaaatggatgtgtgtggctgcttggcaccgggagcctggctacacggccttctggcagatctggtgtgccctcttcccctttctggtcatgctggtgtgctatggcttcatcttccgcgtggccagggtcaaggcacgcaaggtgcactgtggcacagtcgtcatcgtggaggaggatgctcagaggaccgggaggaagaactccagcacctccacctcctcttcaggcagcaggaggaatgcctttcagggtgtggtctactcggccaaccagtgcaaagccctcatcaccatcctggtggtcctcggtgccttcatggtcacctggggcccctacatggttgtcatcgcctctgaggccctctgggggaaaagctccgtctccccgagcctggagacttgggccacatggctgtcctttgccagcgctgtctgccaccccctgatctatggactctggaacaagacagttcgcaaagaactactgggcatgtgctttggggaccggtattatcgggaaccatttgtgcaacgacagaggacttccaggctcttcagcatttccaacaggatcacagacctgggcctgtccccacacctcactgcgctcatggcaggtggacagcccctggggcacagcagcagcacgggggacactggcttcagctgctcccaggactcagggacagatatgatgctgcttgaggactacacgtctgatgacaaccctccctctcactgcacttgcccacccaagagaaggagctcggtgacatttgaggatgaagtggaacaaatcaaagaagctgccaagaactcgattcttcatgtgaaagctgaagtacacaagtccttggacagttacgcagcaagcttggccaaagccattgaggccgaagccaaaatcaacttatttggggaggaggctttgccaggggtcttggttacagcacggactgtcccggggggcggcttcgggggccgccgaggcagcagaactcttgtgagccagaggctgcagttgcagagcatcgaagaaggagatgttttagctgccgagcagagatgagggcctcagggtgccgtggggctgcagcctgagaggctggcccggggaggagttcccatcaccgcctgtgccgcggccttgggagcatgtcactgtgtacagctggccacacacagggaaggagcagcatctggtatgcagccaccaggacaaggactgaaaataatgtctacagtccacagcttcagcatttccagagaccacatgtgagcttcttttaggtcccagtgatgggaccagaagcatctaaagc

SEQ ID NO: 94625 - DNA, 1356 bp, Artificial Sequence
  derived and/or modified sequence
atgggtgggcgacggtgcgtgcccggcactctgccaatgcgtgcagcacctcccggggcaaagaggctgcacgtccctttaagagctaaaggcgtgggaaggtcaggtcatgccccacggctggagagcgtccgaacatcatactacgccgtgctttatccaatggtttaccccatgaagatcacagggaacagggccgtgatggccctggtgtatatctggctgcatagccttatagggtgtctgcctcccctgtttggctggagtagcgtcgagttcgatgagttcaagtggatgtgcgtcgccgcttggcacagggagcctggttacacagccttctggcagatttggtgtgcactgttcccatttctcgtcatgcttgtttgctatggctttatctttcgagtggcgcgcgtgaaggctcgcaaagtacactgcggaactgtggtgattgtggaggaggatgcgcagaggacaggtcggaagaattcttcaacttctacttccagttcagggagtcggcgcaacgccttccagggggttgtgtactccgccaatcagtgcaaagccttaatcactatcctggttgttctcggtgcatttatggtgacctggggcccttacatggtagtgatagcgagtgaggccttatgggggaaatctagtgtatccccatcccttgaaacatgggcgacgtggctgagcttcgcctcggcagtgtgtcatcctcttatatatggcttgtggaataagacggttcgcaaggagctgcttgggatgtgcttcggcgatagatactatcgggagccctttgtgcagaggcagcgcacaagccgtctattttctatctcaaatagaattaccgatttaggcttatctccccacctgaccgccctaatggcaggaggacaacctctggggcactcctcaagcaccggagatacaggattctcttgtagtcaagactctggcacagacatgatgctcctggaagactatacctctgacgacaaccccccttctcactgtacttgccctcccaagcgccggtcaagcgtaacatttgaagacgaggttgagcaaatcaaggaggccgctaaaaacagcattctgcatgtgaaggccgaggttcacaagagtctggatagctacgctgcctctcttgctaaggccatagaggctgaggcgaagattaatcttttcggtgaggaggccctgcccggagtgcttgtgactgctcgcactgtccctggtgggggtttcggtgggagacgaggatcacggacattagtatctcagcggcttcagctgcagtcaatcgaggaaggagacgtcctggccgccgaacagcgatag

SEQ ID NO: 94626 - DNA, 1356 bp, Artificial Sequence
  derived and/or modified sequence
atgggcggccgccgctgtgtgcccggcaccctgcccatgagagctgcccctcctggggccaagaggctgcacgtgcccctgcgggccaagggcgtgggccgcagcggccacgccccccggctggagagcgtgaggaccagctactatgctgtgctgtaccccatggtgtaccccatgaagatcaccggcaacagagctgtgatggccctggtgtacatctggctgcacagcctgattggctgcctgccccccctgtttggctggagctctgtggagtttgatgagttcaagtggatgtgtgtggccgcctggcaccgggagcccggctacacagccttctggcagatctggtgtgccctcttccccttcctggtgatgctggtgtgctacggcttcatcttccgggtggcccgggtgaaggccaggaaggtgcactgcggcaccgtggtgattgtggaggaggatgcccagaggactggaaggaagaacagcagcaccagcaccagcagcagcggcagcagaagaaatgccttccagggcgtggtgtacagcgccaaccagtgcaaggccctgatcaccatcctggtggtgctgggcgccttcatggtgacctggggcccctacatggtggtgattgccagcgaggccctgtggggcaagagctctgtgagccccagcctggagacctgggccacctggctgagctttgccagcgctgtgtgccaccccctcatctacggcctgtggaacaagacagtgaggaaggagctgctgggcatgtgcttcggggaccgctactaccgggagccctttgtgcagaggcagaggaccagccgcctcttcagcatcagcaaccgcatcacagacctgggcctgagcccccacctgacagccctgatggccggcggccagcccctgggccacagcagcagcactggagacaccggcttcagctgcagccaggacagcggcacagacatgatgctgctggaggactacaccagtgatgacaacccccccagccactgcacctgcccccccaagagaagaagctctgtgacctttgaagatgaggtggagcagatcaaggaggccgccaagaacagcatcctgcacgtgaaggccgaggtgcacaagagcctggacagctatgctgccagcctggccaaggccatcgaggccgaggccaagatcaacctgtttggagaggaggccctgcccggggtgctggtgacagccaggacagtgcctgggggcggctttggaggccggcggggcagcaggaccctggtgtcccagaggctgcagctgcagagcattgaggagggagatgtgctggccgctgagcagaggtag

SEQ ID NO: 94627 - DNA, 1356 bp, Artificial Sequence
  derived and/or modified sequence
atgggcggccggcggtgcgtgcccggcaccctgcccatgcgggccgcccctccgggagccaaacgcctccacgtgccgctgcgcgccaaaggggtgggaaggagtggccacgctcctagattggaatcggtgcggacatcctattatgcagtcctttaccctatggtgtacccaatgaaaatcaccgggaacagagctgtgatggccttggtgtatatctggttgcactctctgattggatgcctcccccccctatttggctggagctcggtagagtttgacgagttcaagtggatgtgcgttgctgcctggcacagggaaccaggctacaccgctttttggcagatctggtgcgcgctgtttccattcctcgtcatgctggtgtgctacggtttcatctttcgcgttgctagagttaaggccaggaaggtgcactgcggtactgttgtcattgtagaggaagatgcccagcggacggggagaaaaaattcctccacttcaacaagctctagcgggtcacggagaaacgctttccagggagtggtttactcggccaaccagtgtaaggcattaatcacgattctggtggttctgggagcgttcatggtcacatgggggccctacatggttgtcattgctagcgaagccttatgggggaagagtagcgtaagcccctccttagagacatgggcgacgtggctctctttcgcctctgctgtgtgccatccactaatctatggcctatggaacaagacagtcagaaaagaactgctgggtatgtgttttggggatcggtactacagggagccgtttgtgcaaagacaacgcacatccaggctgtttagtatctccaaccggatcaccgatctcggcctctccccccacctaaccgccctgatggccgggggacaacccctcggtcactcctcttcaacaggtgatacagggttttcctgtagtcaagattccggaactgatatgatgctgctcgaagattatacttccgacgataaccctccttcacactgcacgtgccctcctaaaaggcggagcagtgtcacgtttgaagacgaagttgagcagatcaaagaggctgccaagaactccatcttacatgtgaaggctgaggtacacaagtcactggacagttacgctgcgtctctagccaaggccattgaagcggaggctaaaatcaatttgttcggagaggaggctttgccaggagtgctcgtgacagctcggacagtccctggtggcggcttcggggggcgtcgcggctccagaacactggttagtcagagacttcagctccagtctattgaggagggcgacgttctggctgccgagcaacgctag

SEQ ID NO: 94628 - DNA, 1356 bp, Artificial Sequence
  derived and/or modified sequence
atgggaggcagacggtgtgtacctggcacgctccccatgcgggctgccccacccggagccaaaaggctgcacgtgccgcttcgggcaaagggcgtgggacgcagcggtcatgcccctcgcctggaatcagtccgcacctcttactacgctgtgctgtatccgatggtttaccctatgaaaatcactggcaacagagcggtaatggcactcgtttacatttggctacatagcctgatcggatgtctgcccccactctttgggtggtcatccgtggaattcgacgagtttaagtggatgtgcgtagcggcatggcaccgggaaccgggatatactgccttttggcagatttggtgtgcactgtttcccttccttgttatgcttgtgtgctatgggttcattttcagggtggcacgagtaaaggctcggaaagttcattgcggcaccgtggtgatagttgaagaagatgcccagaggaccggcagaaaaaattcatcaactagcacatctagtagcgggtcacggaggaacgcctttcagggtgtagtttacagcgccaaccagtgcaaggcactgataacgattctggtggttttgggcgctttcatggtcacatggggtccatatatggtggtgatcgcctctgaggcactctggggcaagagctcagtgagccctagcctggagacatgggccacctggttgtcctttgcctcggctgtgtgtcaccccttgatttacggtctgtggaacaaaacagttcgcaaagagctgctaggaatgtgtttcggggatcgctattaccgggagcccttcgttcagagacagcggacctccagactgttcagtattagtaacagaattactgatctcggactgtctcctcacttaacagccttgatggcaggtgggcagccactgggacactcatcatctactggggataccggcttttcatgctcacaggattcaggcacggatatgatgctcctggaggactacaccagcgacgacaatcccccaagccattgcacctgccccccaaagcgccgaagtagcgtcacttttgaggatgaagtggaacagattaaggaagctgctaagaatagcattttacacgttaaggcagaagtgcataagagcttggacagctatgccgctagcctggctaaggccattgaagccgaagcgaaaattaatctctttggagaggaagccttgccaggtgtgctggtaactgcaaggactgtaccaggaggtggtttcggcggtaggcgcggttcacggaccctggtgtcccagcgcctgcaactgcagagtattgaggaaggagatgtcctcgcagctgaacagcggtag

SEQ ID NO: 94629 - DNA, 1356 bp, Artificial Sequence
  derived and/or modified sequence
atgggcggcagaagatgcgtgcccggcaccctgcccatgagagccgccccccccggcgccaagagactgcacgtgcccctgagagccaagggcgtgggcagaagcggccacgcccccagactggagagcgtgagaaccagctactacgccgtgctgtaccccatggtgtaccccatgaagatcaccggcaacagagccgtgatggccctggtgtacatctggctgcacagcctgatcggctgcctgccccccctgttcggctggagcagcgtggagttcgacgagttcaagtggatgtgcgtggccgcctggcacagagagcccggctacaccgccttctggcagatctggtgcgccctgttccccttcctggtgatgctggtgtgctacggcttcatcttcagagtggccagagtgaaggccagaaaggtgcactgcggcaccgtggtgatcgtggaggaggacgcccagagaaccggcagaaagaacagcagcaccagcaccagcagcagcggcagcagaagaaacgccttccagggcgtggtgtacagcgccaaccagtgcaaggccctgatcaccatcctggtggtgctgggcgccttcatggtgacctggggcccctacatggtggtgatcgccagcgaggccctgtggggcaagagcagcgtgagccccagcctggagacctgggccacctggctgagcttcgccagcgccgtgtgccaccccctgatctacggcctgtggaacaagaccgtgagaaaggagctgctgggcatgtgcttcggcgacagatactacagagagcccttcgtgcagagacagagaaccagcagactgttcagcatcagcaacagaatcaccgacctgggcctgagcccccacctgaccgccctgatggccggcggccagcccctgggccacagcagcagcaccggcgacaccggcttcagctgcagccaggacagcggcaccgacatgatgctgctggaggactacaccagcgacgacaacccccccagccactgcacctgcccccccaagagaagaagcagcgtgaccttcgaggacgaggtggagcagatcaaggaggccgccaagaacagcatcctgcacgtgaaggccgaggtgcacaagagcctggacagctacgccgccagcctggccaaggccatcgaggccgaggccaagatcaacctgttcggcgaggaggccctgcccggcgtgctggtgaccgccagaaccgtgcccggcggcggcttcggcggcagaagaggcagcagaaccctggtgagccagagactgcagctgcagagcatcgaggagggcgacgtgctggccgccgagcagagatag

SEQ ID NO: 94630 - protein, 415 aa, Artificial Sequence
  derived and/or modified sequence
MLVPVGWMNESYYAVLYPMVYPMKITGNRAVMALVYIWLHSLIGCLPPLFGWSSVEFDEFKWMCVAAWHREPGYTAFWQIWCALFPFLVMLVCYGFIFRVARVKARKVHCGTVVIVEEDAQRTGRKNSSTSTSSSGSRRNAFQGVVYSANQCKALITILVVLGAFMVTWGPYMVVIASEALWGKSSVSPSLETWATWLSFASAVCHPLIYGLWNKTVRKELLGMCFGDRYYREPFVQRQRTSRLFSISNRITDLGLSPHLTALMAGGQPLGHSSSTGDTGFSCSQDSGTDMMLLEDYTSDDNPPSHCTCPPKRRSSVTFEDEVEQIKEAAKNSILHVKAEVHKSLDSYAASLAKAIEAEAKINLFGEEALPGVLVTARTVPGGGFGGRRGSRTLVSQRLQLQSIEEGDVLAAEQR

SEQ ID NO: 94631 - DNA, 1653 bp, Artificial Sequence
  derived and/or modified sequence
gactgctccctggccttttggttccgagggagtgcagggcagcagtgtgaagacctgtttacgtccactccccactccccggggctggcttcgggacgaattcactgtggtattaacagagcccgggacagagcctggcagaaggcagatggatgctcgtgcccgtcggctggatgaatgaaagctactatgctgtcctgtaccccatggtgtaccccatgaagatcacagggaaccgggctgtgatggcacttgtctacatctggcttcactcgctcatcggctgcctgccacccctgtttggttggtcatccgtggagtttgacgagttcaaatggatgtgtgtggctgcttggcaccgggagcctggctacacggccttctggcagatctggtgtgccctcttcccctttctggtcatgctggtgtgctatggcttcatcttccgcgtggccagggtcaaggcacgcaaggtgcactgtggcacagtcgtcatcgtggaggaggatgctcagaggaccgggaggaagaactccagcacctccacctcctcttcaggcagcaggaggaatgcctttcagggtgtggtctactcggccaaccagtgcaaagccctcatcaccatcctggtggtcctcggtgccttcatggtcacctggggcccctacatggttgtcatcgcctctgaggccctctgggggaaaagctccgtctccccgagcctggagacttgggccacatggctgtcctttgccagcgctgtctgccaccccctgatctatggactctggaacaagacagttcgcaaagaactactgggcatgtgctttggggaccggtattatcgggaaccatttgtgcaacgacagaggacttccaggctcttcagcatttccaacaggatcacagacctgggcctgtccccacacctcactgcgctcatggcaggtggacagcccctggggcacagcagcagcacgggggacactggcttcagctgctcccaggactcagggacagatatgatgctgcttgaggactacacgtctgatgacaaccctccctctcactgcacttgcccacccaagagaaggagctcggtgacatttgaggatgaagtggaacaaatcaaagaagctgccaagaactcgattcttcatgtgaaagctgaagtacacaagtccttggacagttacgcagcaagcttggccaaagccattgaggccgaagccaaaatcaacttatttggggaggaggctttgccaggggtcttggttacagcacggactgtcccggggggcggcttcgggggccgccgaggcagcagaactcttgtgagccagaggctgcagttgcagagcatcgaagaaggagatgttttagctgccgagcagagatgagggcctcagggtgccgtggggctgcagcctgagaggctggcccggggaggagttcccatcaccgcctgtgccgcggccttgggagcatgtcactgtgtacagctggccacacacagggaaggagcagcatctggtatgcagccaccaggacaaggactgaaaataatgtctacagtccacagcttcagcatttccagagaccacatgtgagcttcttttaggtcccagtgatgggaccagaagcatctaaagc

SEQ ID NO: 94632 - DNA, 1248 bp, Artificial Sequence
  derived and/or modified sequence
atgctggtgcctgttggttggatgaatgaatcttactatgccgtgttgtatcctatggtgtaccctatgaagattactggaaatcgcgccgtgatggcccttgtctacatctggctgcactcgctcattggctgcctgcctccactctttggctggtcttcagtcgagtttgatgaatttaagtggatgtgcgtggccgcttggcaccgagagccagggtacacagccttttggcaaatttggtgcgccttgttcccctttttggttatgctggtttgctacggtttcatcttcagggttgcaagggtaaaggctcggaaagtgcactgtggaactgtggtgatagtcgaggaggatgctcagaggaccggcaggaagaacagtagcaccagcacttcatcctccgggagtcggaggaatgccttccagggagtggtgtattcggccaatcaatgtaaggctctgatcaccatcctggtcgtacttggagctttcatggtcacatgggggccatatatggtggtcatcgcttcggaagcactgtggggcaagtcttccgtgtccccgtctctcgaaacctgggccacatggctctctttcgcatctgccgtgtgccatccccttatctacggcctttggaacaaaacagtaagaaaggaactgctgggaatgtgttttggggatcggtattacagggagccattcgtgcagaggcagcgaaccagtaggttatttagcattagcaatcgtattactgatttgggcctttcaccccacctcacagccttgatggcaggcgggcagcccctgggacactcgagttctaccggcgatacaggtttcagttgcagccaggattccggtaccgacatgatgcttttagaagattatacaagtgatgataaccctccatcccactgtacttgtccacccaagagaagatcttccgtgacctttgaggatgaggtcgaacaaattaaagaggcagctaagaacagcattctgcacgtgaaggccgaagtccataagagtctcgactcttacgcagctagcctcgctaaagccatcgaggcagaagccaagattaaccttttcggcgaagaagcgctgcccggcgtgttggtgaccgcacgcactgtgccaggcggaggtttcggtggaagacgcgggagccgaaccctagtgtctcagagactccaactacaaagtattgaggagggcgacgtgctcgctgctgaacagcggtag

SEQ ID NO: 94633 - DNA, 1248 bp, Artificial Sequence
  derived and/or modified sequence
atgctggtgcctgtgggctggatgaatgaaagctactatgctgtgctgtaccccatggtgtaccccatgaagatcaccggcaacagagctgtgatggccctggtgtacatctggctgcacagcctgattggctgcctgccccccctgtttggctggagctctgtggagtttgatgagttcaagtggatgtgtgtggccgcctggcaccgggagcccggctacacagccttctggcagatctggtgtgccctcttccccttcctggtgatgctggtgtgctacggcttcatcttccgggtggcccgggtgaaggccaggaaggtgcactgcggcaccgtggtgattgtggaggaggatgcccagaggactggaaggaagaacagcagcaccagcaccagcagcagcggcagcagaagaaatgccttccagggcgtggtgtacagcgccaaccagtgcaaggccctgatcaccatcctggtggtgctgggcgccttcatggtgacctggggcccctacatggtggtgattgccagcgaggccctgtggggcaagagctctgtgagccccagcctggagacctgggccacctggctgagctttgccagcgctgtgtgccaccccctcatctacggcctgtggaacaagacagtgaggaaggagctgctgggcatgtgcttcggggaccgctactaccgggagccctttgtgcagaggcagaggaccagccgcctcttcagcatcagcaaccgcatcacagacctgggcctgagcccccacctgacagccctgatggccggcggccagcccctgggccacagcagcagcactggagacaccggcttcagctgcagccaggacagcggcacagacatgatgctgctggaggactacaccagtgatgacaacccccccagccactgcacctgcccccccaagagaagaagctctgtgacctttgaagatgaggtggagcagatcaaggaggccgccaagaacagcatcctgcacgtgaaggccgaggtgcacaagagcctggacagctatgctgccagcctggccaaggccatcgaggccgaggccaagatcaacctgtttggagaggaggccctgcccggggtgctggtgacagccaggacagtgcctgggggcggctttggaggccggcggggcagcaggaccctggtgtcccagaggctgcagctgcagagcattgaggagggagatgtgctggccgctgagcagaggtag

SEQ ID NO: 94634 - DNA, 1248 bp, Artificial Sequence
  derived and/or modified sequence
atgctggtgcccgtgggctggatgaacgagagctactacgccgtgctgtacccaatggtttatccgatgaagattaccgggaacagggccgtcatggctctggtgtatatctggcttcattccctgatcgggtgcttaccaccactgttcggatggtcatcagttgaattcgatgagttcaagtggatgtgtgtggctgcctggcaccgggagccaggatatacggccttttggcagatctggtgtgctctgtttcctttcctggtgatgctagtgtgctacggtttcatttttagagtggccagggtcaaagctcgcaaagtccattgcgggaccgtggtcattgtggaggaagacgcccagcgtacaggtcggaaaaactcatcaacatcaacaagttccagtggtagcaggagaaatgccttccagggcgtagtgtatagtgcaaaccaatgtaaagccctcattactatattagtggtgctgggtgcctttatggtgacgtggggtccttacatggtggttatagccagcgaggccctctggggaaagtcctccgtcagtccttcccttgagacctgggctacttggctttcctttgcctccgccgtctgccaccccctgatctatggcctgtggaacaagacggtccgcaaagagctgctggggatgtgttttggagaccggtactacagggagccatttgtgcagaggcagcgcacatcgcgtctgttttctatttctaataggatcactgacctgggactatcaccgcacctaaccgcgctgatggcgggtggacaaccactaggccacagctctagcacaggggatactggcttctcatgttcacaggactctggcacagacatgatgctgcttgaggattatacctctgacgacaatcctccatcccattgcacctgccccccaaaaagaaggtcgagtgtcacgttcgaagatgaggttgaacagatcaaggaagccgccaagaatagtatcctgcacgttaaggccgaagtgcataagagcctggattcctacgctgccagtctggctaaggccatcgaagcagaagccaaaattaacctgttcggggaagaggctttgccgggggtgctcgttactgcccggacagtgcctgggggcggtttcggcgggcggagaggcagccggacactggtgagccagcggctccaacttcagtccatcgaagagggagatgttcttgcagcagaacaaaggtag

SEQ ID NO: 94635 - DNA, 1248 bp, Artificial Sequence
  derived and/or modified sequence
atgctggtacctgtgggatggatgaacgagtcatactacgccgtgctgtatcctatggtgtaccctatgaaaatcaccggcaaccgggctgtgatggccctggtgtacatatggctacatagcctgatagggtgtctcccacccctctttggctggtcatctgtcgaattcgatgaattcaagtggatgtgtgtcgctgcatggcatagggagcctggatacaccgcgttctggcagatatggtgcgccctcttcccctttttggtgatgctggtatgctacgggttcattttccgtgtggccagggtgaaggcaagaaaggtccattgtggtacagtcgtgatcgttgaggaagacgcccagcgtaccgggcgaaaaaactctagcactagcacttcaagcagcggcagtaggcggaacgcttttcagggagtggtgtacagtgcgaaccagtgcaaggcgttgatcaccatcctggtggtactgggcgcattcatggtgacatgggggccttacatggtcgtgatcgcttctgaagccctgtggggcaagtctagtgtgtcacctagcctggaaacctgggccacctggctcagcttcgccagtgccgtgtgtcatcccctaatctacgggctgtggaacaagacagtgcgcaaggagctgctgggaatgtgctttggggataggtactaccgcgagccgtttgtgcagaggcagagaacttcccgcctgttcagtatatccaacaggattactgacttagggctgagccctcacctgactgccctcatggccggtggtcagccgttaggtcattctagcagcacaggggatactggttttagttgtagtcaggacagtgggaccgacatgatgttgctcgaggactatacgtccgacgacaatcctccctctcattgtacatgtcccccaaaaagacgttcttctgtgacattcgaagatgaggtggagcagattaaggaagcggctaagaattctattctgcacgtcaaggcagaggtccacaaatcccttgactcctatgctgcatctctagccaaagccatcgaggccgaggccaagattaatctcttcggagaggaagctttgcccggtgtgctggtgacggcgagaaccgtcccgggaggtggcttcgggggacgcaggggttcccgaaccctggtgagccagcggttacagctccagtcaatcgaggagggtgacgttctggcagcagagcagagatag

SEQ ID NO: 94636 - DNA, 1248 bp, Artificial Sequence
  derived and/or modified sequence
atgctggtgcccgtgggctggatgaacgagagctactacgccgtgctgtaccccatggtgtaccccatgaagatcaccggcaacagagccgtgatggccctggtgtacatctggctgcacagcctgatcggctgcctgccccccctgttcggctggagcagcgtggagttcgacgagttcaagtggatgtgcgtggccgcctggcacagagagcccggctacaccgccttctggcagatctggtgcgccctgttccccttcctggtgatgctggtgtgctacggcttcatcttcagagtggccagagtgaaggccagaaaggtgcactgcggcaccgtggtgatcgtggaggaggacgcccagagaaccggcagaaagaacagcagcaccagcaccagcagcagcggcagcagaagaaacgccttccagggcgtggtgtacagcgccaaccagtgcaaggccctgatcaccatcctggtggtgctgggcgccttcatggtgacctggggcccctacatggtggtgatcgccagcgaggccctgtggggcaagagcagcgtgagccccagcctggagacctgggccacctggctgagcttcgccagcgccgtgtgccaccccctgatctacggcctgtggaacaagaccgtgagaaaggagctgctgggcatgtgcttcggcgacagatactacagagagcccttcgtgcagagacagagaaccagcagactgttcagcatcagcaacagaatcaccgacctgggcctgagcccccacctgaccgccctgatggccggcggccagcccctgggccacagcagcagcaccggcgacaccggcttcagctgcagccaggacagcggcaccgacatgatgctgctggaggactacaccagcgacgacaacccccccagccactgcacctgcccccccaagagaagaagcagcgtgaccttcgaggacgaggtggagcagatcaaggaggccgccaagaacagcatcctgcacgtgaaggccgaggtgcacaagagcctggacagctacgccgccagcctggccaaggccatcgaggccgaggccaagatcaacctgttcggcgaggaggccctgcccggcgtgctggtgaccgccagaaccgtgcccggcggcggcttcggcggcagaagaggcagcagaaccctggtgagccagagactgcagctgcagagcatcgaggagggcgacgtgctggccgccgagcagagatag

SEQ ID NO: 94637 - protein, 793 aa, Artificial Sequence
  derived and/or modified sequence
MSEQGDLNQAIAEEGGTEQETATPENGIVKSESLDEEEKLELQRRLEAQNQERRKSKSGAGKGKLTRSLAVCEESSARPGGESLQDQESIHLQLSSFSSLQEEDKSRKDDSEREKEKDKNKDKTSEKPKIRMLSKDCSQEYTDSTGIDLHEFLINTLKNNSRDRMILLKMEQEIIDFIADNNNHYKKFPQMSSYQRMLVHRVAAYFGLDHNVDQTGKSVIINKTSSTRIPEQRFCEHLKDEKGEESQKRFILKRDNSSIDKEDNQSVCSQESLFVENRGNRDGSGRTSGSRQSSSENELKWSDHQRAWSSTDSDSSNRNLKPAMTKTASFGGITVLTRGDSTSSTRSTGKLSKAGSESSSSAGSSGSLSRTHPPLQSTPLVSGVAAGSPGCVPYPENGIGGQVAPSSTSYILLPLEAATGIPPGSILLNPHTGQPFVNPDGTPAIYNPPTSQQPLRSAMVGQSQQQPPQQQPSPQPQQQVQPPQPQMAGPLVTQSVQGLQASSQSVQYPAVSFPPQHLLPVSPTQHFPMRDDVATQFGQMTLSRQSSGETPEPPSGPVYPSSLMPQPAQQPSYVIASTGQQLPTGGFSGSGPPISQQVLQPPPSPQGFVQQPPPAQMPVYYYPSGQYPTSTTQQYRPMAPVQYNAQRSQQMPQAAQQAGYQPVLSGQQGFQGLIGVQQPPQSQNVINNQQGTPVQSVMVSYPTMSSYQVPMTQGSQGLPQQSYQQPIMLPNQAGQGSLPATGMPVYCNVTPPTPQNNLRLIGPHCPSSTVPVMSASCRTNCASMSNAGWQVKF

SEQ ID NO: 94638 - protein, 54 aa, Artificial Sequence
  derived and/or modified sequence
MSEQGDLNQAIAEEGGTEQETATPENGIVKSESLDEEEKLELQRRLEAQNQERR

SEQ ID NO: 94639 - protein, 104 aa, Artificial Sequence
  derived and/or modified sequence
MSEQGDLNQAIAEEGGTEQETATPENGIVKSESLDEEEKLELQRRLEAQNQERRKSKSGAGKGKLTRSLAVCEESSARPGGESLQDQESIHLQLSSFSSLQEED

SEQ ID NO: 94640 - DNA, 2382 bp, Artificial Sequence
  derived and/or modified sequence
atgagcgagcagggcgacctgaaccaggccatcgccgaggagggcggcaccgagcaggagaccgccacccccgagaacggcatcgtgaagagcgagagcctggacgaggaggagaagctggagctgcagagaagactggaggcccagaaccaggagagaagaaagagcaagagcggcgccggcaagggcaagctgaccagaagcctggccgtgtgcgaggagagcagcgccagacccggcggcgagagcctgcaggaccaggagagcatccacctgcagctgagcagcttcagcagcctgcaggaggaggacaagagcagaaaggacgacagcgagagagagaaggagaaggacaagaacaaggacaagaccagcgagaagcccaagatcagaatgctgagcaaggactgcagccaggagtacaccgacagcaccggcatcgacctgcacgagttcctgatcaacaccctgaagaacaacagcagagacagaatgatcctgctgaagatggagcaggagatcatcgacttcatcgccgacaacaacaaccactacaagaagttcccccagatgagcagctaccagagaatgctggtgcacagagtggccgcctacttcggcctggaccacaacgtggaccagaccggcaagagcgtgatcatcaacaagaccagcagcaccagaatccccgagcagagattctgcgagcacctgaaggacgagaagggcgaggagagccagaagagattcatcctgaagagagacaacagcagcatcgacaaggaggacaaccagagcgtgtgcagccaggagagcctgttcgtggagaacagaggcaacagagacggcagcggcagaaccagcggcagcagacagagcagcagcgagaacgagctgaagtggagcgaccaccagagagcctggagcagcaccgacagcgacagcagcaacagaaacctgaagcccgccatgaccaagaccgccagcttcggcggcatcaccgtgctgaccagaggcgacagcaccagcagcaccagaagcaccggcaagctgagcaaggccggcagcgagagcagcagcagcgccggcagcagcggcagcctgagcagaacccacccccccctgcagagcacccccctggtgagcggcgtggccgccggcagccccggctgcgtgccctaccccgagaacggcatcggcggccaggtggcccccagcagcaccagctacatcctgctgcccctggaggccgccaccggcatcccccccggcagcatcctgctgaacccccacaccggccagcccttcgtgaaccccgacggcacccccgccatctacaacccccccaccagccagcagcccctgagaagcgccatggtgggccagagccagcagcagcccccccagcagcagcccagcccccagccccagcagcaggtgcagcccccccagccccagatggccggccccctggtgacccagagcgtgcagggcctgcaggccagcagccagagcgtgcagtaccccgccgtgagcttccccccccagcacctgctgcccgtgagccccacccagcacttccccatgagagacgacgtggccacccagttcggccagatgaccctgagcagacagagcagcggcgagacccccgagccccccagcggccccgtgtaccccagcagcctgatgccccagcccgcccagcagcccagctacgtgatcgccagcaccggccagcagctgcccaccggcggcttcagcggcagcggcccccccatcagccagcaggtgctgcagcccccccccagcccccagggcttcgtgcagcagcccccccccgcccagatgcccgtgtactactaccccagcggccagtaccccaccagcaccacccagcagtacagacccatggcccccgtgcagtacaacgcccagagaagccagcagatgccccaggccgcccagcaggccggctaccagcccgtgctgagcggccagcagggcttccagggcctgatcggcgtgcagcagcccccccagagccagaacgtgatcaacaaccagcagggcacccccgtgcagagcgtgatggtgagctaccccaccatgagcagctaccaggtgcccatgacccagggcagccagggcctgccccagcagagctaccagcagcccatcatgctgcccaaccaggccggccagggcagcctgcccgccaccggcatgcccgtgtactgcaacgtgaccccccccaccccccagaacaacctgagactgatcggcccccactgccccagcagcaccgtgcccgtgatgagcgccagctgcagaaccaactgcgccagcatgagcaacgccggctggcaggtgaagttctag

SEQ ID NO: 94641 - DNA, 3037 bp, Artificial Sequence
  derived and/or modified sequence
cagttcgatcaaggttgacgatgtgtcacactgtgtaagggaatcgcatggagatgggcattccgaactgttaatggggacatgggactccagttgtctctgatcacttgtgtggattttcctggcgtagaacgacagaagccgctagtaagtcgccaagacctacagcaggaattctgcaccaaagggcataaaatcttgttattttaatttgcatctgggagaatgtctgagcaaggagacctgaatcaggcaatagcagaggaaggagggactgagcaggagacggccactccagagaacggcattgttaaatcagaaagtctggatgaagaggagaaactggaactgcagaggcggctggaggctcagaatcaagaaagaagaaaatccaagtcaggagcaggaaaaggtaaactgactcgcagccttgctgtctgtgaggaatcttctgccagaccaggaggtgaaagtcttcaggatcaggaatcaattcatttacagctttccagtttttccagcctgcaagaggaggataaatctaggaaagatgactctgaaagagaaaaagaaaaggataaaaacaaagataaaacctctgaaaaacccaagatcagaatgttatcaaaagattgcagccaagaatacacggattctacaggcatagacttacacgagtttctgattaacacattaaagaataattccagggacaggatgatacttttgaaaatggagcaggaaattattgatttcattgctgacaacaataatcattataaaaagttccctcagatgtcatcgtatcagaggatgcttgtccatcgagtggcagcttattttggattggatcacaatgtggatcaaacaggaaaatctgttatcatcaacaagaccagcagcaccagaataccagagcaaaggttttgtgaacatttaaaagatgaaaaaggtgaagaatcccagaagcggtttatcttgaagcgagataactctagtattgataaagaagacaatcagtcagtttgctcccaggaaagcctttttgtggaaaacaggggcaacagagatggctcagggagaacatctgggagtcgacagagcagctcagaaaatgaactcaagtggtctgaccaccaaagggcctggagcagcacagactccgacagttccaaccgcaatctaaagcccgccatgaccaagacggcgagttttgggggcatcacggtgctgaccaggggtgacagcacttccagtactaggagtaccgggaagctgtccaaagcaggttccgagtcttccagcagtgcaggctcctcaggatcgctgtcccgcacccatccacctctccagagcacacccctagtctcaggtgtggcagctggctctccaggctgtgtgccttatccagagaatggaatagggggccaggttgctcccagcagcaccagctacatcctccttccacttgaagctgcaacaggcatcccgcctggaagcatccttcttaatccacacacaggccagccctttgtgaatcccgatggaactcctgcaatatacaacccacccaccagtcagcagcccctgcgaagcgccatggtggggcagtcccaacagcagccaccacagcagcagccctccccgcagccccaacagcaggtccagccaccgcagccacagatggcaggccctctggtcactcagtctgtccaggggctgcaggcttcctcccagtcagtgcaatatccagcagtctcttttcctccccagcacctcctacctgtgtctccaacgcagcactttcccatgagagatgatgtggcaacacagtttggccagatgaccctgagccggcagtcctcgggggagactcctgaacccccatcaggtcctgtctacccatcctcccttatgccacagccggcccagcagcccagctatgtaatcgcctctacaggccagcagcttcctacaggaggattctcaggctctggccctcccatctcccagcaggtcctccagccccctccctcaccacagggatttgtgcaacagcctccgcctgcacagatgcctgtatattattacccatctggtcagtaccctacctcaaccacgcaacagtaccggcccatggccccggttcagtacaacgctcagaggagtcaacagatgccacaggcagcacagcaagcaggttaccagccagtcttgtctggtcaacagggattccaaggcctaataggagtgcagcagccacctcagagtcagaacgtgataaataaccaacaaggaactccggtgcaaagcgtgatggtttcctacccaacaatgtcttcttatcaggtgccaatgacccagggttctcaaggactgccccagcagtcataccaacagccaatcatgctacctaaccaggcaggtcaagggtcactcccagccactggaatgcctgtttactgtaatgtcacaccgcccacccctcagaacaaccttaggctgattggcccacactgcccctccagcactgtcccagtgatgtcagctagctgcagaacaaactgtgcaagtatgagcaatgctggttggcaggtcaaattctgagagctctggctgtggtacatttcttcagatatttctcatggcctttgatggaagaggaacaaggtgggaaaactggctgaggacttaagtattcactcaacactcaaatgattgctgctggtattctgtaaaaaataaacaaagactaatatacacgttagctggttaatggtgcatatttctgtcatgtctgctaggtatgcctttatagcttagctagtgacatgaattcatcaaggtaagattttctcctaccactgaataccactgtgtagattataatatccctaatttggattagttttgtactttgtgttgagtttgtgatgctaaaagtatttaaaaattatatactaaatcacattgtaccaaagctgtaatggaaaagcaaagaagaattgatgaattgaaggaataatttatatacatt

SEQ ID NO: 94642 - DNA, 297 bp, Artificial Sequence
  derived and/or modified sequence
atgagcgagcagggcgacctgaaccaggccatcgccgaggagggcggcaccgagcaggagaccgccacccccgagaacggcatcgtgaagagcgagagcctggacgaggaggagaagctggagctgcagagaagactggaggcccagaaccaggagagaagaaagagcaagagcggcgccggcaagggcaagctgaccagaagcctggccgtgtgcgaggagagcagcgccagacccggcggcgagagcctgcaggaccaggagagcatccacctgcagctgagcagcttcagctag

SEQ ID NO: 94643 - DNA, 2382 bp, Artificial Sequence
  derived and/or modified sequence
atgagtgagcagggggacctcaatcaggctatcgctgaggagggcggcaccgaacaagagacagcaacccccgaaaacggtatcgtcaagtccgagtccttggacgaagaagagaaactcgagctgcaacgtcggctcgaggcccagaaccaggaacggagaaagtcaaagtccggtgccgggaaggggaagttaaccagatcactggctgtgtgtgaggagagcagcgcaagaccggggggagaaagcctgcaggaccaggagagcatacacctgcagctcagctccttctcaagtcttcaggaagaagacaaaagcagaaaagatgactccgagcgtgagaaagagaaggacaagaataaagacaagacaagcgagaagcccaagattcgtatgctatcaaaggactgcagccaggaatataccgactccactggaatcgaccttcatgaattccttatcaacacactcaaaaacaactcaagagatcgtatgattctactcaaaatggaacaggagatcatagatttcattgctgacaataacaaccactataagaaatttccacagatgtcaagttaccagagaatgctggtgcaccgcgttgccgcctactttgggctcgaccacaatgttgaccaaacgggaaagtccgttatcattaacaaaacatcgagtaccagaatccccgagcaacgcttctgcgagcacctgaaagatgagaagggcgaggagagccagaagaggtttattcttaagagggataacagctccatagataaggaggacaaccagtctgtctgttctcaagaatccctttttgtcgagaaccgaggtaaccgtgacggcagcggaagaacatccgggtcaaggcagtcttcatctgagaacgagctgaaatggtcggatcaccaacgtgcttggtcatctaccgattctgacagtagtaatcgtaatctgaaaccagccatgacgaagacagcttcttttggggggatcactgttctgacccgtggagactcaacctcttccactcggtctaccggaaaactcagcaaagcaggtagtgagtctagcagttctgccggtagtagcggaagcctctcccggacacatcccccactccagagcactcctctggtttcaggcgtggccgctggctcccctgggtgtgtgccttaccctgagaatggaattgggggtcaggtcgccccttcctccacaagctatattctgctgcccctggaagccgcaaccggaatccctccgggaagcatactcctaaatcctcacaccggtcagcccttcgtaaaccccgacggaactcccgcaatctacaatcctcctacctcccagcaacccctcagatcagcgatggtgggacagtcgcagcagcaacctccacagcaacagccttcacctcagccccaacagcaagtgcagcccccgcagccacagatggctgggccactagttacccagagtgtccagggcctccaggctagctctcagtccgtgcaatatcctgccgtaagctttcccccacagcatcttttgcctgtctcccctacgcagcatttccccatgcgcgatgacgtggcgacccagtttggccaaatgaccctgagccgccagtctagcggtgagaccccagagcctccctccggacccgtttacccatcatccctgatgccacagccagcccagcagccctcctacgttatcgcgtccactggtcagcaattgcctacgggcggattcagcgggtcgggcccccccatttcccaacaagtcctccaaccaccaccttcccctcagggtttcgttcaacagcctcctcctgcacaaatgccagtctactactatccatccgggcagtacccaactagcacgactcagcagtacagacctatggcacctgtgcagtataacgcccagcggagccagcagatgccacaggccgctcagcaggcaggataccagccagttctgtccggacaacagggctttcagggactgataggtgtgcagcagcccccccagtcgcagaacgtgattaataatcagcaaggcacccccgtccagagtgtgatggtgagttaccctactatgtctagttatcaggtgccaatgacccaagggtcacagggattaccccagcaatcttatcagcagcccatcatgctgcccaatcaggctggccagggatccctccccgccacaggcatgcctgtctactgcaatgtgaccccacccactcctcagaacaatctgcgccttattggccctcattgtccctcctctactgtgcctgttatgtctgcttcctgccggactaattgcgcaagtatgagcaacgcagggtggcaagtcaagttctag

SEQ ID NO: 94644 - DNA, 297 bp, Artificial Sequence
  derived and/or modified sequence
atgagcgaacagggcgacctaaatcaggctatagccgaagaagggggtacagaacaggagaccgccacaccagaaaacggcatcgtgaagtcagaatctctggacgaagaggagaaattggaactgcagcggcggctggaagcacagaaccaagagagaaggaagtcaaaaagcggagctggaaaagggaagctgacacggtcacttgcagtctgtgaggagtcatcagcgcgacccggcggagaaagtctccaggatcaagagagcatccatctacagttatcatcatttagttag

SEQ ID NO: 94645 - DNA, 2382 bp, Artificial Sequence
  derived and/or modified sequence
atgagcgaacagggtgatctcaaccaggccatcgctgaggaagggggaacagagcaggaaactgccacgcctgaaaatgggatcgttaagagtgaatccctggacgaggaggagaagttagagctccagaggaggctcgaagctcagaaccaggaacggagaaaatctaagtccggggctggcaagggaaaactgacccgcagcttggctgtctgtgaggaaagttcagccaggcccggaggcgaaagccttcaggaccaggagtccatccatctgcagttatcatctttctcatcattgcaggaggaggacaagagccggaaggacgattcagaacgcgagaaagagaaggacaaaaacaaggataagaccagcgagaagccaaagatcagaatgctgagcaaggactgtagccaggagtataccgatagtactggtatagacctgcatgagttcctgatcaatactttgaagaataactctagagaccgcatgattctgctgaagatggagcaagagatcatcgactttatcgctgataataataatcattataagaaattccctcagatgtcgtcgtaccaaaggatgctcgtgcaccgcgtcgccgcttattttgggctggatcacaacgtggatcagactgggaagtcagtcatcattaacaaaacctcctctacccggatccctgaacagaggttttgcgaacatctgaaggatgagaaaggcgaggaatcacagaagcgcttcatcctgaaaagggataacagttcaattgataaggaagacaatcaaagcgtatgcagtcaagagagtttgtttgtagagaatcgtggcaatcgagacgggagcggacgaactagtggatctcgccaatcttcaagcgagaacgagttgaagtggtcagatcaccagagagcctggagctctaccgatagcgacagttcaaacagaaatcttaagcccgccatgacgaaaaccgcttctttcggggggataactgtgttgacccggggggatagtacgtccagcactcgctccactgggaaactctcaaaggccggctctgagagtagctcatctgccggttcgagcggctccctgtctaggactcatcccccacttcaatccacacccctcgtgagtggtgtcgctgctggctcccccggctgcgtgccgtatccggaaaatgggatcggcggacaggtcgcaccctccagcaccagctacattctgctgcccctcgaagctgctacggggattccgccgggctccatcctactgaacccccacactgggcagcccttcgtgaaccccgacggaacacctgctatctacaacccccctacctctcagcaacccctgcggtccgccatggttggacagtcccagcagcagcctccccagcagcagccctccccgcagcctcagcagcaggtgcaaccgccccagccccagatggcgggtccccttgttactcagagtgttcagggcctgcaggcctcttcccagagtgtgcaatatcctgcagtgagctttccgccacaacatctgttgcccgtctcaccaactcagcattttccaatgcgggatgacgtcgcaacacaattcggacagatgacgttgtcacgccagtcatccggggagactcctgagcctcctagtgggccagtatatccgagtagtctcatgccacaacctgctcaacagcccagttatgtgatcgctagtacaggccagcagctgccaacggggggattttctggaagcggcccacccatatctcaacaggtactgcagccccctccatcgccccagggcttcgttcagcaaccccccccagctcagatgcccgtttattactatcccagtggtcagtaccccacctctactacccagcagtataggcctatggctcctgtgcaatacaatgcccagaggtcacagcagatgccgcaggcagctcagcaagccggctatcagccggttcttagcggccagcaaggcttccagggtctgatcggtgtacagcaaccccctcaatcccagaacgtcattaataaccagcagggaactcctgttcagtccgtgatggtgtcttatcctacaatgagttcttaccaggtgccgatgacccagggttcccagggcctgccccaacaaagctaccagcagcccattatgctcccgaatcaggccggtcaggggagcttaccagcaactggcatgccagtttactgcaatgttacaccccccacacctcagaataacctgcggctaatcgggcctcactgtccttctagcactgttccagtgatgtccgcctcttgccgcactaattgcgcttctatgtcgaatgctgggtggcaggtcaaattctag

SEQ ID NO: 94646 - DNA, 2382 bp, Artificial Sequence
  derived and/or modified sequence
atgtctgagcagggcgacctgaaccaggccatcgccgaggagggcggcacagagcaggagacagccaccccagaaaatggcatcgtgaagtctgagagcctggatgaggaggagaagctggagctgcagaggcggctggaggcccagaaccaggagaggaggaagagcaagagcggggccggcaagggcaagctgaccaggagcctggccgtgtgtgaggagagcagcgcccggcctggaggagagagcctgcaggaccaggagagcatccacctgcagctgagcagcttcagcagcctgcaggaggaggacaagagcaggaaggatgattctgagcgggagaaggagaaggacaagaacaaggacaagaccagcgagaagcccaagatccgcatgctgagcaaggactgcagccaggagtacacagacagcactggaattgacctgcacgagttcctgatcaacaccctgaagaacaacagccgggacaggatgatcctgctgaagatggagcaggagatcatcgacttcatcgctgacaacaacaaccactacaagaagttcccccagatgagcagctaccagaggatgctggtgcaccgggtggccgcctacttcggcctggaccacaacgtggaccagacaggcaagagcgtcatcatcaacaagaccagcagcacccgcatccctgagcagcgcttctgtgagcacctgaaggatgagaagggggaggagagccagaagcgcttcatcctgaagagggacaacagcagcattgacaaggaggacaaccagagcgtgtgcagccaggagagcctgtttgtggagaacagaggcaacagagatggcagcggccgcaccagcggcagccggcagagcagcagtgaaaatgagctgaagtggagcgaccaccagagggcctggagcagcacagacagcgacagcagcaacagaaacctgaagccagccatgaccaagacagccagctttggaggcatcaccgtgctgaccaggggggacagcaccagcagcaccaggagcacaggcaagctgagcaaggccggcagcgagagcagcagcagcgctggcagcagcggcagcctgagcaggacccacccccccctgcagagcacccccctggtgtctggagtggccgccggcagccctggctgtgtgccctacccagaaaatggaattggaggccaggtggcccccagcagcaccagctacatcctgctgcccctggaggccgccaccggcatccccccaggcagcatcctgctgaacccccacacaggccagccctttgtgaacccagatggcaccccagccatctacaacccccccaccagccagcagcccctgcggagcgccatggtgggccagagccagcagcagcccccccagcagcagcccagcccccagccccagcagcaggtgcagcccccccagccccagatggccggccccctggtgacccagagcgtgcagggcctgcaggccagcagccagagcgtgcagtacccagctgtgtccttccccccccagcacctgctgcctgtgagccccacccagcacttccccatgagagatgatgtggccacccagtttggccagatgaccctgagccggcagagcagtggagagaccccagagcccccatctggccctgtgtaccccagcagcctgatgccccagcctgcccagcagcccagctatgtgattgccagcacaggccagcagctgcccaccggcggcttcagcggcagcggcccccccatcagccagcaggtgctgcagcccccacccagcccccagggctttgtgcagcagcccccaccagcccagatgcctgtgtactactaccccagcggccagtaccccaccagcaccacccagcagtaccggcccatggcccctgtgcagtacaatgcccagaggagccagcagatgccccaggccgcccagcaggccggctaccagcctgtgctgagcggccagcagggcttccagggcctcatcggcgtgcagcagcccccccagagccagaatgtcatcaacaaccagcagggcacccctgtgcagagcgtgatggtgtcctaccccaccatgagcagctaccaggtgcccatgacccagggcagccagggcctgccccagcagagctaccagcagcccatcatgctgcccaaccaggccggccagggcagcctgcctgccaccggcatgcctgtgtactgcaatgtgaccccacccaccccccagaacaacctgcggctgattggcccccactgccccagcagcacagtgcctgtgatgtctgccagctgcaggaccaactgtgcctccatgagcaatgccggctggcaggtgaagttctag

SEQ ID NO: 94647 - DNA, 297 bp, Artificial Sequence
  derived and/or modified sequence
atgtctgagcagggcgacctgaaccaggccatcgccgaggagggcggcacagagcaggagacagccaccccagaaaatggcatcgtgaagtctgagagcctggatgaggaggagaagctggagctgcagaggcggctggaggcccagaaccaggagaggaggaagagcaagagcggggccggcaagggcaagctgaccaggagcctggccgtgtgtgaggagagcagcgcccggcctggaggagagagcctgcaggaccaggagagcatccacctgcagctgagcagcttctcctag

SEQ ID NO: 94648 - DNA, 2382 bp, Artificial Sequence
  derived and/or modified sequence
atgagcgagcagggcgacctgaaccaggccatcgccgaggagggcggcacagaacaagaaacggccacccctgagaacggcattgtgaagtccgaatccctggacgaggaggagaaactggaactgcaacggagactcgaggcgcagaaccaggagaggcgcaaatcaaaaagtggagccggaaaaggtaagctgacccggagtctggcagtttgtgaggagtcaagcgcaagaccaggaggtgagtcccttcaggaccaagagagcattcatctacagctgtcaagtttctctagcctgcaggaggaggacaaaagccggaaggatgactccgaacgagagaaagaaaaagacaaaaacaaggataagaccagcgaaaagcctaaaataagaatgctgtccaaggactgttcccaggaatacactgactcaacgggaattgatttgcatgaattcctgataaatacgctgaagaacaattctcgagacagaatgatactgctgaagatggaacaggaaatcatcgatttcatcgcagataataataaccactacaagaagttcccacaaatgtccagctaccaaaggatgctcgtgcacagagtggccgcctattttgggttagaccataacgtcgaccagacagggaagtctgttataatcaacaaaacctctagcacacggattccagagcagagattctgcgagcacctgaaagatgaaaaaggcgaggagagtcagaaaagatttattctcaagagagataactccagcatagacaaggaggacaaccagtccgtttgttctcaggaatccctcttcgtggagaatcgcgggaacagagacggctctggccggacgtcaggatcccgccaaagcagcagcgaaaatgagctcaaatggagcgatcatcagcgggcgtggtcatccaccgatagcgattcaagcaaccgcaatttgaaacccgccatgactaagactgcgtcctttggaggcatcaccgtcctgacccgcggcgactcaacgtcctctactcggtccaccgggaaactgtcaaaagctggttctgagagttctagctctgcgggatcttccggaagtctgtcacggacacacccccctctgcaatcaacacccctggtctccggtgtcgccgcaggtagccctggctgtgttccgtacccagagaatggcatcggaggacaggttgcaccaagttctacctcctacattcttctgcccctggaggctgctactggcatacctcctgggagcatattgctgaatccacacacaggccaaccctttgtgaatcccgatgggacgccagccatctataatccccccacaagtcagcaacccctacggagtgccatggtggggcagtcccagcagcagcccccccagcagcagccgtcaccccagccacaacagcaagtgcagcctccccagccacagatggcagggccattggtcacccagtccgtgcagggcctacaggcctcttcccagagcgtacaatatccagccgtgtcttttcctccccaacacctcctgccagtatctccaacccaacactttccaatgcgtgatgacgtggctacccagttcggccagatgaccctctcccgccagtcctccggcgagactccggagccgccgtccggccccgtttatccaagttcgctcatgccccaacccgcacagcagccttcatatgtgatcgcatcaaccgggcagcagctgccaactggagggttcagcggcagtggaccccctatcagccagcaggtcctgcagccgcctccctccccccaggggtttgtccagcagcctccccccgcacaaatgcctgtgtactattatccttccggccaataccctacgagcaccacacaacagtaccggccaatggcaccagtgcagtacaatgcccagagaagtcagcagatgcctcaggccgcccagcaggctggataccagcccgtgctgagcggacagcagggctttcagggtctgatcggagtgcagcagccacctcagagccagaatgtcattaataatcaacagggcactcctgttcaaagtgtgatggtatcttatcctacaatgagctcatatcaggttcctatgactcaggggtcacagggcctcccccagcaaagctatcagcagcccatcatgttacctaatcaggcaggacaaggctcattgcctgccaccggcatgccagtctactgtaacgtaacgccacctacaccacagaataatttgcgtttgataggcccgcactgcccgagctccactgtgcctgtgatgtccgcgagctgcagaacgaactgtgccagcatgtcaaacgccggttggcaggtcaaattctag

SEQ ID NO: 94649 - DNA, 297 bp, Artificial Sequence
  derived and/or modified sequence
atgagcgagcagggcgacctgaaccaggccatcgccgaggagggcggtaccgagcaggagaccgccacccccgagaacggtattgtcaaatctgagtccttagatgaagaagaaaagctggagctgcagcggcgactggaagcccagaaccaggagcgaaggaagtctaagtccggcgccgggaaggggaagctcacccggagtctcgcagtctgcgaggagtctagcgcacgaccagggggagaatctctgcaggaccaggagagtatacaccttcagttgtcatccttcagctag

SEQ ID NO: 94650 - DNA, 2382 bp, Artificial Sequence
  derived and/or modified sequence
atgagcgagcagggcgacctgaaccaggccatcgccgaggagggcggtacagaacaagagactgccacccccgaaaatggtattgtgaaaagcgaatctctggatgaggaagagaagctggagttgcagcggcgcttggaggctcaaaaccaggaaaggcgaaagtccaaaagcggagctggcaaagggaaactgacacgctcactggcagtctgtgaagagagcagcgcgaggcccggcggagagtccctgcaggatcaggagtccatccatctgcaactcagttccttcagctccttacaggaggaagataaaagccggaaggatgactcagagagggaaaaggaaaaagataagaataaggacaaaaccagtgaaaagcccaagattcggatgctgtcaaaggactgctctcaggaatacaccgattcaaccggcatcgacctgcacgagtttcttatcaacactctgaaaaataattctcgggataggatgattctactgaagatggaacaggagattattgatttcatcgcggataacaataatcactataagaagttcccccagatgtcctcttatcagcggatgcttgttcacagagtggccgcctattttggtttggatcacaatgtcgatcagactgggaaaagcgtgataatcaacaagacttcttcaactaggatccctgagcagaggttctgcgagcacctaaaggacgaaaagggagaggaatctcaaaaacgcttcatcctaaagcgagataacagcagcatagacaaggaagataaccagtccgtgtgttcacaagaaagtctgttcgttgagaacagaggcaatcgagacggtagcggacgcacttcagggagccgacagtcttcatcagagaatgagcttaaatggtccgaccaccaacgtgcatggagctccactgactcggactcatcaaatagaaacttgaagccagctatgactaaaacggctagtttcgggggaatcacagtcttgactcggggcgacagcacaagtagtacgcggagcacaggcaagctaagcaaggccggcagcgagtcctccagttcggcaggatcatcagggtctctttccaggacacacccacctcttcaatccacccccttggtgtctggtgtggccgcggggtctcccggttgcgtaccataccctgagaacgggattggcggccaggtggccccatctagtacgtcctacatccttctccctttggaggctgctactggaatcccccctggatccatactgttaaacccccatacgggccagccctttgtgaatccagacggaactcccgccatatacaatcccccaacctcgcagcagccactgagatccgccatggtggggcaaagtcagcagcaaccccctcaacagcagcctagcccacaaccccagcaacaggtgcagcccccacagcctcagatggcaggccccttggtcacccaaagcgtgcaaggcctgcaagcatcatctcagtcagtccaatacccagccgtgtcattcccccctcagcatctactccccgtgagccctactcagcacttccccatgcgggatgacgtggctacccaattcggccagatgacactgtctcgccagagctccggcgagacccctgagccgccctcaggaccagtgtatccaagtagcctgatgcctcagcctgcacaacagccttcttacgtcatcgctagcactggccaacagcttccaaccggcggattttcaggtagcggccctcctatcagccagcaggttttacagcccccaccgagtcctcagggtttcgttcagcaacctcctccagcccaaatgcccgtctactattacccctctggacaataccctacttctacaacccagcagtaccggcccatggcccccgtgcaatacaacgctcagcgttcgcagcagatgccccaagcggcacagcaggctgggtatcagcccgtgctgtctggccaacaggggtttcagggactgatcggcgtgcaacagccaccacaaagccagaacgtgattaataatcagcagggcaccccagtacagtcggtgatggtgagttatcctaccatgagctcctaccaggttcctatgacacaagggtcacagggcctacctcaacagtcatatcagcagccaatcatgcttccaaaccaagctggacaggggtctcttcctgctacgggtatgccagtgtactgtaatgtcacacccccaactccacaaaataatctcaggctgattggcccacattgtcctagtagtaccgtcccagtcatgtcagcttcctgtcgcactaattgcgcttctatgagcaatgcgggatggcaagttaagttctag

SEQ ID NO: 94651 - DNA, 550 bp, Artificial Sequence
  derived and/or modified sequence
gattattgcaattattattatttatttttcatcttttttcaggttgacgatgtgtcacactgtgtaagggaatcgcatggagatgggcattccgaactgttaatggggacatgggactccagttgtctctgatcacttgtgtggattttcctggcgtagaacgacagaagccgctagtaagtcgccaagacctacagcaggaattctgcaccaaagggcataaaatcttgttattttaatttgcatctgggagaatgtctgagcaaggagacctgaatcaggcaatagcagaggaaggagggactgagcaggagacggccactccagagaacggcattgttaaatcagaaagtctggatgaagaggagaaactggaactgcagaggcggctggaggctcagaatcaagaaagaagaaaatccaagtcaggagcaggaaaaggtaaactgactcgcagccttgctgtctgtgaggaatcttctgccagaccaggaggtgaaagtcttcaggatcaggaatcaattcatttacagctttccagtttttccag

SEQ ID NO: 94652 - DNA, 2382 bp, Artificial Sequence
  derived and/or modified sequence
atgagtgaacagggcgacctgaatcaggccattgccgaagagggaggaactgagcaggagaccgccactcctgagaatggtattgtcaagtccgagagtctggatgaggaagaaaaactggagttacagcgccgtctggaagcgcagaatcaagagagaagaaaaagcaagagtggagccggaaaaggcaaattgacccgatcactggcagtatgcgaggagagtagtgcccgacctggaggagagagtctccaggatcaggaatctatacacctacagctgagctcatttagcagtctccaggaagaggacaaatcacggaaggatgattctgagagggagaaggagaaagacaagaacaaagataaaaccagcgagaagcccaagatccgcatgcttagtaaagattgttcccaggagtacacagattcaaccggaatcgacttgcatgaattcctgattaataccctgaagaacaacagcagagatcgtatgatcctgctcaagatggagcaggagattatagactttatcgcagataacaataatcactataaaaagtttccacaaatgagtagctaccagcgtatgctggttcatcgggtggcggcatacttcgggttggaccacaatgtcgaccagaccgggaaaagcgtgataattaacaaaacttcctccacccgcatcccagaacagaggttctgtgaacatttaaaagatgagaaaggcgaagaaagccagaaacgttttatccttaagagagataactctagcatcgacaaagaagacaaccaaagcgtctgctctcaggagtcactctttgtagaaaacagaggcaacagggacggttccggtaggacatctggcagtcgacagtccagctccgaaaatgagcttaaatggtccgatcatcaacgggcatggtcttccactgactcggattcaagcaataggaacttgaagccagccatgacaaagactgcttcctttggcggaatcaccgtcctgacccggggagacagtactagctccactcgttcaacaggcaagctgtccaaggccggaagcgaaagttcttctagtgccggttccagcggatcactctcccggacccatccgccactccagagcaccccccttgtttcgggagtcgccgcaggttccccgggatgtgtgccttaccctgagaatgggatcggaggacaggtggcgccaagcagcacctcctacatacttctgccacttgaagcggctactgggataccacccggttcaattcttcttaatccccacactggacaaccttttgttaatcctgatgggacacccgcaatctacaatccacctacaagccagcagccccttcgcagtgccatggtggggcagtctcagcagcagccgccacagcaacaaccatcaccacagccccaacagcaggtacagcctcctcagccacaaatggcgggtcctttagtaacgcagtccgtgcaggggcttcaggcatcttcccagtccgttcagtaccctgcagtctcatttccgccacagcacctgctgccagtgagccccacccagcatttccctatgagagatgatgtagccacacagtttggccagatgaccctgtcccgacagagttctggcgagacccccgaacctccaagtggtcccgtttatccgtctagcttgatgccgcaaccagctcagcagccaagctacgtgattgccagtacaggccagcagttgcctactggcggattcagtggctcaggccctcccatctcacagcaggtgctccagccacccccatctccacagggtttcgtccagcagccaccaccagctcagatgcctgtttattattatccctccggtcagtaccccacgtccactactcagcaatatagaccgatggcaccagtgcagtacaatgcacaaagatcccagcagatgccccaggccgctcagcaggccggataccaacctgtactgagtggccagcaggggtttcaaggcctgatcggcgtacagcagccccctcagtcacagaacgtgatcaacaaccagcagggtacacctgtgcaatctgtgatggtgtcttatcccactatgtcctcttatcaggtgccaatgactcagggatctcaaggcctgccccagcagagctatcaacaacctatcatgcttcccaaccaggccggtcagggaagtctgccagctaccggcatgccggtctactgcaacgtgactcccccaacccctcagaataatctgcgattgattgggccacactgtccaagtagcacagtccctgtgatgtcagcctcctgccgtacgaactgcgcatcaatgagtaacgcgggttggcaggtgaaattttag

SEQ ID NO: 94653 - DNA, 297 bp, Artificial Sequence
  derived and/or modified sequence
atgtccgaacagggtgatctgaaccaggcaattgccgaagagggaggaaccgaacaagaaactgctactcctgaaaatggaatcgtgaagagtgagagcttagacgaggaagaaaagctagaactgcagcgtaggctcgaggcccagaatcaggagcggaggaagtcaaagtcaggggcaggcaagggcaagcttacccgctcactggcagtttgcgaggaatcatctgcgaggccaggcggagagagcctccaggaccaggaaagcatacacctgcaactgagtagcttctcatag

SEQ ID NO: 94654 - DNA, 2382 bp, Artificial Sequence
  derived and/or modified sequence
atgtcagaacagggcgatctgaatcaagccatcgctgaggaaggtgggaccgagcaggaaacagcaacacctgagaatggtattgtaaaatccgagtcactggatgaggaagagaagctagaactccagcgccgactggaagcccagaaccaggaaagacggaagtccaagagcggagcaggcaaaggcaagctgacccgatccctggctgtatgcgaggaaagctctgcccgtccaggcggtgaatcattacaggaccaggaaagcattcatctccagctgagctcttttagcagcctgcaggaagaagacaaaagtcgtaaggatgacagcgagcgggagaaggagaaagataaaaacaaagataaaacctccgagaagccaaaaatccgaatgctttcaaaagattgcagccaggagtacactgacagcaccggcattgatttgcatgaattcctcatcaataccttgaagaataacagcagagaccggatgattctactcaaaatggagcaagagattattgatttcatagctgacaacaacaaccattacaagaaattcccacagatgtcatcttatcagagaatgctggtgcatagagtagcggcatactttggcctggatcacaacgtggaccagaccggtaagtcagtgattatcaataagaccagttccacacgcatccctgagcagcgcttttgcgagcacttgaaggacgagaaaggggaggaatcgcagaaacgatttatcctaaaacgggataatagttccatcgacaaggaggataaccagtccgtatgctctcaggaaagtctgtttgttgagaatcgcggaaatcgcgacgggagtggcaggactagcgggtctcggcagagttcatcagagaacgagctgaagtggagcgaccatcagcgagcctggtctagtaccgatagtgacagctccaaccggaacctgaaaccagccatgacaaagactgcctccttcgggggaataaccgttctgacccgcggtgactccactagcagtaccaggagtactggaaaactttccaaggcgggaagcgagtcgtccagctctgcagggtccagtggctcgctttctaggactcatccccctttgcagtccacgccactggtgagcggagttgccgcaggctcacctggctgcgtaccttacccagagaatggcataggaggacaggtggcgcctagctctactagttacattctactgccattggaagccgcaacaggtatacccccaggtagtatactgcttaacccacacacaggccaacctttcgttaaccctgatggcacccccgcaatttacaatcctcctacctcccagcaacccctcaggagtgctatggtcggacagagtcagcagcagccccctcagcagcagccctctccacagccccagcagcaggtccagcctcctcaaccccagatggccggtccccttgtcacacaatccgtccaaggactccaagcgtcctcccagtctgtgcagtatcccgctgtgtcatttcctcctcagcatttgctgccagtttcccctacccagcattttccaatgagggacgacgtggctactcagttcggccagatgacccttagtaggcaaagtagtggagagacaccagaacctccaagcggacctgtctacccttcgtctctcatgccgcagcccgctcagcagccctcctatgtcatcgcctccactggccaacagctcccaactgggggtttctcaggatccggccctccgatcagccagcaagtcttacagcctccaccgagcccccaaggctttgtacagcagcctcccccagcccagatgccagtttattactatccctccggtcagtatccaaccagcacaacgcagcaatatcggcctatggccccagttcaatataatgcgcagcgctcccagcagatgcctcaagccgcacagcaagccggataccagcctgtgttatctggccagcaaggcttccagggtctgattggggtacaacaaccaccccagagccaaaacgtcataaacaatcagcagggaacacccgtgcaatctgtaatggtcagttatccaacaatgagtagttatcaggttccaatgacccagggttctcagggactgcctcagcagtcctatcagcagcctataatgttgccaaaccaagcaggccaagggagtttgccagccaccggtatgcctgtgtactgcaacgtgaccccgccaacgcctcagaacaacctgagactaattggtccacactgcccatcatccacagtacctgtgatgtccgctagttgtcggacaaattgtgcttccatgtcgaacgcaggttggcaagtgaagttctag

SEQ ID NO: 94655 - DNA, 3182 bp, Artificial Sequence
  derived and/or modified sequence
aatgtttatgcatagaaatatagctgaggtggatgtggttgctgtcagctattcaggtttgctacctgatcacctcctgaagatgtagggttgacgatgtgtcacactgtgtaagggaatcgcatggagatgggcattccgaactgttaatggggacatgggactccagttgtctctgatcacttgtgtggattttcctggcgtagaacgacagaagccgctagtaagtcgccaagacctacagcaggaattctgcaccaaagggcataaaatcttgttattttaatttgcatctgggagaatgtctgagcaaggagacctgaatcaggcaatagcagaggaaggagggactgagcaggagacggccactccagagaacggcattgttaaatcagaaagtctggatgaagaggagaaactggaactgcagaggcggctggaggctcagaatcaagaaagaagaaaatccaagtcaggagcaggaaaaggtaaactgactcgcagccttgctgtctgtgaggaatcttctgccagaccaggaggtgaaagtcttcaggatcaggaatcaattcatttacagctttccagtttttccagcctgcaagaggaggataaatctaggaaagatgactctgaaagagaaaaagaaaaggataaaaacaaagataaaacctctgaaaaacccaagatcagaatgttatcaaaagattgcagccaagaatacacggattctacaggcatagacttacacgagtttctgattaacacattaaagaataattccagggacaggatgatacttttgaaaatggagcaggaaattattgatttcattgctgacaacaataatcattataaaaagttccctcagatgtcatcgtatcagaggatgcttgtccatcgagtggcagcttattttggattggatcacaatgtggatcaaacaggaaaatctgttatcatcaacaagaccagcagcaccagaataccagagcaaaggttttgtgaacatttaaaagatgaaaaaggtgaagaatcccagaagcggtttatcttgaagcgagataactctagtattgataaagaagacaatcagtcagtttgctcccaggaaagcctttttgtggaaaacaggggcaacagagatggctcagggagaacatctgggagtcgacagagcagctcagaaaatgaactcaagtggtctgaccaccaaagggcctggagcagcacagactccgacagttccaaccgcaatctaaagcccgccatgaccaagacggcgagttttgggggcatcacggtgctgaccaggggtgacagcacttccagtactaggagtaccgggaagctgtccaaagcaggttccgagtcttccagcagtgcaggctcctcaggatcgctgtcccgcacccatccacctctccagagcacacccctagtctcaggtgtggcagctggctctccaggctgtgtgccttatccagagaatggaatagggggccaggttgctcccagcagcaccagctacatcctccttccacttgaagctgcaacaggcatcccgcctggaagcatccttcttaatccacacacaggccagccctttgtgaatcccgatggaactcctgcaatatacaacccacccaccagtcagcagcccctgcgaagcgccatggtggggcagtcccaacagcagccaccacagcagcagccctccccgcagccccaacagcaggtccagccaccgcagccacagatggcaggccctctggtcactcagtctgtccaggggctgcaggcttcctcccagtcagtgcaatatccagcagtctcttttcctccccagcacctcctacctgtgtctccaacgcagcactttcccatgagagatgatgtggcaacacagtttggccagatgaccctgagccggcagtcctcgggggagactcctgaacccccatcaggtcctgtctacccatcctcccttatgccacagccggcccagcagcccagctatgtaatcgcctctacaggccagcagcttcctacaggaggattctcaggctctggccctcccatctcccagcaggtcctccagccccctccctcaccacagggatttgtgcaacagcctccgcctgcacagatgcctgtatattattacccatctggtcagtaccctacctcaaccacgcaacagtaccggcccatggccccggttcagtacaacgctcagaggagtcaacagatgccacaggcagcacagcaagcaggttaccagccagtcttgtctggtcaacagggattccaaggcctaataggagtgcagcagccacctcagagtcagaacgtgataaataaccaacaaggaactccggtgcaaagcgtgatggtttcctacccaacaatgtcttcttatcaggtgccaatgacccagggttctcaaggactgccccagcagtcataccaacagccaatcatgctacctaaccaggcaggtcaagggtcactcccagccactggaatgcctgtttactgtaatgtcacaccgcccacccctcagaacaaccttaggctgattggcccacactgcccctccagcactgtcccagtgatgtcagctagctgcagaacaaactgtgcaagtatgagcaatgctggttggcaggtcaaattctgagagctctggctgtggtacatttcttcagatatttctcatggcctttgatggaagaggaacaaggtgggaaaactggctgaggacttaagtattcactcaacactcaaatgattgctgctggtattctgtaaaaaataaacaaagactaatatacacgttagctggttaatggtgcatatttctgtcatgtctgctaggtatgcctttatagcttagctagtgacatgaattcatcaaggtaagattttctcctaccactgaataccactgtgtagattataatatccctaatttggattagttttgtactttgtgttgagtttgtgatgctaaaagtatttaaaaattatatactaaatcacattgtaccaaagctgtaatggaaaagcaaagaagaattgatgaattgaaggaataatttatatacattatagagttttcttttttaatggatatatactgtattgtagtgtttaatcaaaataaaactatttgacct

SEQ ID NO: 94656 - protein, 813 aa, Artificial Sequence
  derived and/or modified sequence
MSEQGDLNQAIAEEGGTEQETATPENGIVKSESLDEEEKLELQRRLEAQNQERRKSKSGAGKGKLTRSLAVCEESSARPGGESLQDQESIHLQLSSFSSLQEEDKSRKDDSEREKEKDKNKDKTSEKPKIRMLSKDCSQEYTDSTGIDLHEFLINTLKNNSRDRMILLKMEQEIIDFIADNNNHYKKFPQMSSYQRMLVHRVAAYFGLDHNVDQTGKSVIINKTSSTRIPEQRFCEHLKDEKGEESQKRFILKRDNSSIDKEDNQSVCSQESLFVENSRLLEDSNICNETYKKRQLFRGNRDGSGRTSGSRQSSSENELKWSDHQRAWSSTDSDSSNRNLKPAMTKTASFGGITVLTRGDSTSSTRSTGKLSKAGSESSSSAGSSGSLSRTHPPLQSTPLVSGVAAGSPGCVPYPENGIGGQVAPSSTSYILLPLEAATGIPPGSILLNPHTGQPFVNPDGTPAIYNPPTSQQPLRSAMVGQSQQQPPQQQPSPQPQQQVQPPQPQMAGPLVTQSVQGLQASSQSVQYPAVSFPPQHLLPVSPTQHFPMRDDVATQFGQMTLSRQSSGETPEPPSGPVYPSSLMPQPAQQPSYVIASTGQQLPTGGFSGSGPPISQQVLQPPPSPQGFVQQPPPAQMPVYYYPSGQYPTSTTQQYRPMAPVQYNAQRSQQMPQAAQQAGYQPVLSGQQGFQGLIGVQQPPQSQNVINNQQGTPVQSVMVSYPTMSSYQVPMTQGSQGLPQQSYQQPIMLPNQAGQGSLPATGMPVYCNVTPPTPQNNLRLIGPHCPSSTVPVMSASCRTNCASMSNAGWQVKF

SEQ ID NO: 94657 - DNA, 2442 bp, Artificial Sequence
  derived and/or modified sequence
atgagcgagcagggcgacctgaaccaggccatcgccgaggagggcggcaccgagcaggagaccgccacccccgagaacggcatcgtgaagagcgagagcctggacgaggaggagaagctggagctgcagagaagactggaggcccagaaccaggagagaagaaagagcaagagcggcgccggcaagggcaagctgaccagaagcctggccgtgtgcgaggagagcagcgccagacccggcggcgagagcctgcaggaccaggagagcatccacctgcagctgagcagcttcagcagcctgcaggaggaggacaagagcagaaaggacgacagcgagagagagaaggagaaggacaagaacaaggacaagaccagcgagaagcccaagatcagaatgctgagcaaggactgcagccaggagtacaccgacagcaccggcatcgacctgcacgagttcctgatcaacaccctgaagaacaacagcagagacagaatgatcctgctgaagatggagcaggagatcatcgacttcatcgccgacaacaacaaccactacaagaagttcccccagatgagcagctaccagagaatgctggtgcacagagtggccgcctacttcggcctggaccacaacgtggaccagaccggcaagagcgtgatcatcaacaagaccagcagcaccagaatccccgagcagagattctgcgagcacctgaaggacgagaagggcgaggagagccagaagagattcatcctgaagagagacaacagcagcatcgacaaggaggacaaccagagcgtgtgcagccaggagagcctgttcgtggagaacagcagactgctggaggacagcaacatctgcaacgagacctacaagaagagacagctgttcagaggcaacagagacggcagcggcagaaccagcggcagcagacagagcagcagcgagaacgagctgaagtggagcgaccaccagagagcctggagcagcaccgacagcgacagcagcaacagaaacctgaagcccgccatgaccaagaccgccagcttcggcggcatcaccgtgctgaccagaggcgacagcaccagcagcaccagaagcaccggcaagctgagcaaggccggcagcgagagcagcagcagcgccggcagcagcggcagcctgagcagaacccacccccccctgcagagcacccccctggtgagcggcgtggccgccggcagccccggctgcgtgccctaccccgagaacggcatcggcggccaggtggcccccagcagcaccagctacatcctgctgcccctggaggccgccaccggcatcccccccggcagcatcctgctgaacccccacaccggccagcccttcgtgaaccccgacggcacccccgccatctacaacccccccaccagccagcagcccctgagaagcgccatggtgggccagagccagcagcagcccccccagcagcagcccagcccccagccccagcagcaggtgcagcccccccagccccagatggccggccccctggtgacccagagcgtgcagggcctgcaggccagcagccagagcgtgcagtaccccgccgtgagcttccccccccagcacctgctgcccgtgagccccacccagcacttccccatgagagacgacgtggccacccagttcggccagatgaccctgagcagacagagcagcggcgagacccccgagccccccagcggccccgtgtaccccagcagcctgatgccccagcccgcccagcagcccagctacgtgatcgccagcaccggccagcagctgcccaccggcggcttcagcggcagcggcccccccatcagccagcaggtgctgcagcccccccccagcccccagggcttcgtgcagcagcccccccccgcccagatgcccgtgtactactaccccagcggccagtaccccaccagcaccacccagcagtacagacccatggcccccgtgcagtacaacgcccagagaagccagcagatgccccaggccgcccagcaggccggctaccagcccgtgctgagcggccagcagggcttccagggcctgatcggcgtgcagcagcccccccagagccagaacgtgatcaacaaccagcagggcacccccgtgcagagcgtgatggtgagctaccccaccatgagcagctaccaggtgcccatgacccagggcagccagggcctgccccagcagagctaccagcagcccatcatgctgcccaaccaggccggccagggcagcctgcccgccaccggcatgcccgtgtactgcaacgtgaccccccccaccccccagaacaacctgagactgatcggcccccactgccccagcagcaccgtgcccgtgatgagcgccagctgcagaaccaactgcgccagcatgagcaacgccggctggcaggtgaagttctag

SEQ ID NO: 94658 - DNA, 2442 bp, Artificial Sequence
  derived and/or modified sequence
atgtcagagcaaggcgacctgaatcaggctattgcggaggaaggtgggactgaacaggaaacggccacaccagaaaacgggatcgtgaagtctgagagtctggacgaggaagaaaaactggagctgcagaggcgtttagaagctcagaaccaggaacgccggaagtccaaatccggagctgggaaagggaagctgaccagatcccttgccgtgtgcgaggaatccagcgcccgtccaggcggagaaagcttgcaagaccaggaatctatacatctgcaattatcttccttttcttctttacaggaggaggataaatcgagaaaggatgattccgagagggaaaaggaaaaagataagaacaaggataaaacgtcagaaaaacccaaaattcgcatgctatccaaggattgctctcaggagtatactgattctacgggcattgatctccatgagtttcttatcaacacattgaagaacaacagtcgtgacagaatgatcctgctgaaaatggagcaggagatcatcgactttatcgccgacaataataatcactataagaagttcccacagatgtccagttaccagagaatgctggtacaccgggtagctgcatatttcggcctagaccacaacgttgaccagactgggaagagcgtgatcatcaacaagacctcttcaacccgaattccggagcagcgcttctgcgaacatttgaaagatgagaagggtgaggagtcgcaaaaacgcttcatcctgaaaagagataatagttcaatcgacaaggaagacaaccagagcgtgtgttcacaggagtctctgtttgtggaaaactctcgactgctggaggattcaaacatctgcaacgagacatataaaaaacggcaactctttagaggaaaccgggatgggtctgggcggacctcagggagtcgacagagctcttccgagaatgaacttaagtggtccgatcaccagagggcctggagcagtactgactccgacagttcaaaccgtaatttaaagcctgcgatgacaaagacggcctccttcggtggcatcacagtgctgacaagaggggacagtacctcgtccacacgtagtaccgggaaactgagtaaggccgggtcagagtcctctagttcggcaggatcctcaggctccctcagccggacgcacccccccctccagtctactcctttggtcagcggcgtcgcagcgggatctccagggtgtgttccttatcccgaaaacggcatcggaggccaggtggccccttcttctaccagctacatcctcctcccgctagaggccgccacaggtattcccccaggctctattctgctgaacccacataccggtcagccttttgtcaaccctgatggcacacctgcaatttacaaccctccgacttctcagcagccgttgcggtccgccatggtgggccagtctcaacagcagccacctcagcagcagccgtccccacagccacaacaacaggtgcaaccaccgcagccccagatggccggacctttggtgacacagagtgtacaggggctccaggcttcctctcagagtgtgcaatatcctgcggtgtctttccccccccagcacctgctacccgtctccccaacccagcactttccaatgagagacgacgtagcaacacaatttggtcagatgacattatcaaggcaaagttctggcgaaacgcctgagccccccagtggacctgtctacccctcatctctcatgccccagcccgctcagcagcctagttatgtgatcgccagtacaggccagcaactcccgacgggaggcttttccggcagtggcccccccatctcacagcaggtgctccagccaccaccaagcccacaggggttcgtgcagcagccccccccagctcagatgccagtctattactaccctagcggtcagtatccaacctccacaacacagcagtatagacccatggctcctgtgcaatataatgctcagagaagccagcaaatgcctcaggcagcccaacaagccggataccagcccgtactttcgggccagcaggggttccagggtctgattggcgtccagcaaccacctcagtcacaaaatgtgattaataatcagcagggtacccctgtccagtccgtaatggtgtcctatcctactatgtccagctaccaggtgccgatgacccagggcagtcaaggcctccctcaacagtcataccagcaacctataatgctgccaaatcaggctggtcaggggagcctgcccgcaactgggatgccggtgtactgtaacgtgacccccccaacaccccagaacaatttaagactgatcggaccacactgtccttctagtaccgtcccagtgatgtcggcatcttgtcgcaccaattgcgcaagcatgtcaaatgcaggttggcaagtaaagttttag

SEQ ID NO: 94659 - DNA, 2442 bp, Artificial Sequence
  derived and/or modified sequence
atgtcggagcagggcgacctcaaccaggccattgcagaggagggcgggacagagcaggagactgcaacccccgaaaacggcatcgtaaaaagtgagtccctggatgaggaggagaagttggagctgcagcggcgcctggaggcccagaatcaagagcgccggaagtccaagtcgggcgctggcaagggcaaactgacccggtccttagctgtttgtgaggaatcatcggctaggcccgggggggaatctcttcaggaccaagaaagcatccacctgcagttgagctccttctcctctctgcaggaagaggataaaagtagaaaggatgacagcgaacgcgaaaaagaaaaagataaaaacaaggataagacaagtgagaagcccaagatccgtatgttgtcaaaagattgtagccaagaatacacagactccacgggtatcgacttgcatgaattcttgatcaatacccttaagaacaactctagagatcggatgattctcctgaagatggaacaggagatcatagacttcatcgccgacaataacaatcactacaaaaagtttccccagatgtctagttaccagcgcatgttggtgcacagagtggctgcctacttcggtctagaccataatgtggaccaaacaggcaagtcagtgattataaacaagacttctagcactcgcatcccagagcagcgcttctgcgagcatctcaaagacgaaaagggagaggagtctcaaaaaaggttcatacttaagagggacaattcttctatagataaagaggacaatcagtcggtatgctcacaagagagccttttcgttgagaacagccggcttttggaggatagcaatatttgcaatgagacttacaagaagcgccagctgttccgaggcaatagagacggttcaggtcgaacgtccggctcccgtcagtcatcctctgagaacgaacttaagtggagcgatcatcagcgcgcatggtcttccaccgacagcgacagttccaatcgcaatctcaagcctgccatgaccaaaaccgccagttttggaggcatcacagttcttacacggggagactcgacatccagcactagatcgacaggcaagctgagtaaagcaggctcagaatcatcatcatctgccggatcaagcggctcgctgagccgcacccatccaccactccagtctacaccgctggtgtccggcgtcgccgctggctcccctggatgcgtgccgtacccagagaacggcattggcggacaagtcgccccgtctagtacttcctatatcctgctgccattggaggccgccacaggcattccaccaggcagtatcttgctaaatcctcacaccggacagccatttgttaatcccgacggcacgccagctatttataacccccccacatcacagcagccccttagatccgctatggttggccagagccagcagcagccgccccaacaacaacccagccctcaaccgcaacagcaagtacagccgccccagccgcagatggccggccctctcgtcacccaaagcgtgcagggactgcaggcttcatcccagagcgttcagtaccccgccgtctcattcccaccacagcacctgctacccgtttcacccacgcaacatttccccatgagagatgacgtcgcaacccagtttggccagatgacactttctagacagagctctggagagactccagaacccccttccggtcctgtgtacccatcatcattaatgccccagccagcacagcagccctcgtatgtaatcgcctctaccggccagcaacttccgacaggcgggttcagcggaagtggtcctcccatcagccaacaggtcctgcagccccctccctcaccgcaaggcttcgtgcagcaaccacctccagctcaaatgcctgtttactattacccatccggccagtatcccacttctaccactcaacagtatcgtccaatggcacccgtacaatataatgcgcagcgatcacagcagatgccacaagccgcacagcaggctggatatcaaccggtcctgagtggacagcagggatttcaggggcttattggcgtgcagcagcccccccagtcccagaatgtcataaacaaccagcaaggtactccggtccagtccgtaatggtcagttatccaaccatgagctcataccaggtgcctatgacacagggtagccaagggttgccacagcaaagctaccagcaacctatcatgttacccaaccaagctgggcaggggagcctacccgccacaggcatgccagtgtactgtaatgtcacgccaccaaccccgcaaaataacttgaggctcattggccctcactgcccctcatcaacagtgcctgtcatgtcagcgtcatgcagaacaaactgtgcatcaatgtcaaatgcaggttggcaggtaaaattctag

SEQ ID NO: 94660 - DNA, 2442 bp, Artificial Sequence
  derived and/or modified sequence
atgtctgagcagggcgacctgaaccaggccatcgccgaggagggcggcacagagcaggagacagccaccccagaaaatggcatcgtgaagtctgagagcctggatgaggaggagaagctggagctgcagaggcggctggaggcccagaaccaggagaggaggaagagcaagagcggggccggcaagggcaagctgaccaggagcctggccgtgtgtgaggagagcagcgcccggcctggaggagagagcctgcaggaccaggagagcatccacctgcagctgagcagcttcagcagcctgcaggaggaggacaagagcaggaaggatgattctgagcgggagaaggagaaggacaagaacaaggacaagaccagcgagaagcccaagatccgcatgctgagcaaggactgcagccaggagtacacagacagcactggaattgacctgcacgagttcctgatcaacaccctgaagaacaacagccgggacaggatgatcctgctgaagatggagcaggagatcatcgacttcatcgctgacaacaacaaccactacaagaagttcccccagatgagcagctaccagaggatgctggtgcaccgggtggccgcctacttcggcctggaccacaacgtggaccagacaggcaagagcgtcatcatcaacaagaccagcagcacccgcatccctgagcagcgcttctgtgagcacctgaaggatgagaagggggaggagagccagaagcgcttcatcctgaagagggacaacagcagcattgacaaggaggacaaccagagcgtgtgcagccaggagagcctgtttgtggagaacagccggctgctggaggacagcaacatctgcaatgagacctacaagaagaggcagctgttccggggcaacagagatggcagcggccgcaccagcggcagccggcagagcagcagtgaaaatgagctgaagtggagcgaccaccagagggcctggagcagcacagacagcgacagcagcaacagaaacctgaagccagccatgaccaagacagccagctttggaggcatcaccgtgctgaccaggggggacagcaccagcagcaccaggagcacaggcaagctgagcaaggccggcagcgagagcagcagcagcgctggcagcagcggcagcctgagcaggacccacccccccctgcagagcacccccctggtgtctggagtggccgccggcagccctggctgtgtgccctacccagaaaatggaattggaggccaggtggcccccagcagcaccagctacatcctgctgcccctggaggccgccaccggcatccccccaggcagcatcctgctgaacccccacacaggccagccctttgtgaacccagatggcaccccagccatctacaacccccccaccagccagcagcccctgcggagcgccatggtgggccagagccagcagcagcccccccagcagcagcccagcccccagccccagcagcaggtgcagcccccccagccccagatggccggccccctggtgacccagagcgtgcagggcctgcaggccagcagccagagcgtgcagtacccagctgtgtccttccccccccagcacctgctgcctgtgagccccacccagcacttccccatgagagatgatgtggccacccagtttggccagatgaccctgagccggcagagcagtggagagaccccagagcccccatctggccctgtgtaccccagcagcctgatgccccagcctgcccagcagcccagctatgtgattgccagcacaggccagcagctgcccaccggcggcttcagcggcagcggcccccccatcagccagcaggtgctgcagcccccacccagcccccagggctttgtgcagcagcccccaccagcccagatgcctgtgtactactaccccagcggccagtaccccaccagcaccacccagcagtaccggcccatggcccctgtgcagtacaatgcccagaggagccagcagatgccccaggccgcccagcaggccggctaccagcctgtgctgagcggccagcagggcttccagggcctcatcggcgtgcagcagcccccccagagccagaatgtcatcaacaaccagcagggcacccctgtgcagagcgtgatggtgtcctaccccaccatgagcagctaccaggtgcccatgacccagggcagccagggcctgccccagcagagctaccagcagcccatcatgctgcccaaccaggccggccagggcagcctgcctgccaccggcatgcctgtgtactgcaatgtgaccccacccaccccccagaacaacctgcggctgattggcccccactgccccagcagcacagtgcctgtgatgtctgccagctgcaggaccaactgtgcctccatgagcaatgccggctggcaggtgaagttctag

SEQ ID NO: 94661 - DNA, 2442 bp, Artificial Sequence
  derived and/or modified sequence
atgagcgagcagggcgacctgaaccaggccatcgccgaggagggcgggacagagcaggaaaccgccacacccgaaaatggaattgtgaagtcagaaagtttggacgaagaagaaaagctggaactgcagaggcgattggaggctcaaaatcaggagaggaggaagtctaaatccggcgccgggaaaggcaaactgactagatctctcgcagtgtgtgaggaatccagtgccagacctgggggtgaatctctgcaggaccaggagtcaatccacctacaactcagttccttcagctccctgcaggaagaggacaaatcccgcaaggatgattctgagcgggagaaggaaaaggacaaaaacaaggacaaaacctctgagaaaccaaaaattcggatgttgagtaaggattgctcacaagaatatacagactctacaggcatagacttgcacgaattcttgattaataccctaaagaataacagcagagacagaatgatcttactcaagatggagcaggagatcattgactttatcgcggacaacaacaaccattataagaaattccctcaaatgagctcatatcagcggatgctcgtgcaccgtgtggccgcttacttcggcctggaccacaatgtggaccagaccggaaaatccgtgatcatcaacaaaacttcgagcactaggattccagagcagagattttgcgagcatctaaaagacgaaaagggcgaggaaagccagaagcggttcatcttgaagcgggacaacagctcaattgacaaggaggataaccaatcagtgtgtagccaggagtccctgttcgtggagaattctcggctattagaagactctaatatctgtaacgagacatacaaaaagcgtcagttgtttcgtggcaatcgcgatggcagcggccgcacttctggatcacggcagagttcttctgagaatgaactgaaatggtcggaccatcagagagcctggtcaagcactgatagcgactcttccaatcgtaacctgaaaccggcgatgacaaaaacagcgtcgtttggcggaattacagtgttgactaggggcgactcaacatcaagcacccgaagcacaggcaaattgagtaaggctggctctgagagcagttcatccgccggatcaagtggctctcttagtaggactcatcctcccttacaatctaccccactggtctctggtgttgccgccggcagtcccggctgcgtcccatatccagagaatggcataggggggcaagttgccccttcttctacgagctatattctgcttccactcgaggccgcgacgggtataccaccaggttccatcttacttaatccgcacactggtcagccttttgtgaaccctgatggcacccctgccatctataacccgcctaccagccaacaaccccttagatccgccatggttggccagagtcagcagcagccccctcagcaacagccaagccctcagccccagcaacaggtccagccaccccagccacagatggcagggccattagtgactcagtctgtacagggcttgcaggcaagcagtcagtcggtccagtatccagccgtgagcttcccacctcagcatctcctcccagtatcgcccacacagcacttccctatgcgagatgacgtcgccactcagtttggtcagatgacactgtccagacagagttcgggagagacacccgaacccccatctggcccagtgtatcctagctccctgatgccccagccggcgcagcaaccatcttatgtgattgcatccacaggtcagcagctgcctaccggaggattctcaggatcaggcccccccatctcacagcaggtactgcagcccccgcctagcccgcagggattcgtccagcagcctcctcccgcacagatgcccgtctactactatccctcaggtcagtatccgacttccaccacgcagcagtaccggcccatggcaccagttcaatataatgcccaacgctcacagcagatgccacaggctgcccaacaggccgggtaccaaccagtgcttagtggtcagcagggattccagggacttatcggagtgcagcaaccccctcaatcccagaacgtgattaataaccagcaaggaacacctgttcaaagcgtcatggtgagctaccctaccatgagctcctaccaagtacccatgacccagggcagtcagggacttccgcagcaatcctatcagcagccgatcatgttgcccaatcaggctggtcaggggtctctccctgccaccgggatgccggtctactgtaacgttacacccccaacaccccaaaacaatctgcgtcttattggcccccactgcccttcatcaacggtccccgtgatgagcgcctcttgcaggactaattgcgccagtatgtctaacgcaggctggcaagtgaaattctag

SEQ ID NO: 94662 - DNA, 2442 bp, Artificial Sequence
  derived and/or modified sequence
atgagcgagcagggcgacctgaaccaggccatcgccgaggagggcgggacggagcaagagacagcaactcccgaaaacggcattgtgaaaagtgagtcactggatgaggaagaaaaactggaactccaacgacgtttggaggcgcagaatcaggaaagacgaaagtcaaaatcgggtgctggtaaagggaaactaactcggagtttggccgtgtgcgaggaaagtagcgccaggcccggtggggaatctttgcaggaccaggagtctatacacctccagctttcatctttctcatctctccaggaagaggacaagagcagaaaagacgacagcgagcgggaaaaagagaaagacaagaacaaggataaaacatcagagaagcctaaaattcggatgcttagcaaagactgttcccaggaatataccgattccactggcattgacctgcatgagtttctgatcaacactctcaagaataacagccgagatcgcatgatcctgctcaagatggagcaggaaattatcgatttcattgcggacaataacaaccactataagaagtttccgcagatgtcgtcgtatcagcggatgctagtgcaccgggtagcagcttacttcgggctcgaccacaatgtagatcagaccgggaagtcagtgatcattaataaaacctcttcgacgagaattcccgaacaacgattttgtgaacacctcaaagacgaaaaaggagaagagagtcagaaacgattcatacttaagcgggataacagcagcattgataaggaggataaccagtctgtatgttcccaggaatcactgtttgtggagaatagccgcctcctcgaagattctaatatctgcaatgagacctacaaaaaaagacagctgttccgcggcaatagggatggaagcggacggacgagcggttcccgccaatctagcagcgagaatgagcttaaatggtctgaccaccagagagcatggtcatcaacagatagcgattctagcaaccggaacttaaaaccagccatgactaagactgcgagctttggaggaattaccgtactcactaggggggacagcacctcgtccaccaggtcaaccggcaaactttctaaggcaggcagcgagagcagcagctccgcaggctcctctggatcgctctccagaactcatcctcctctgcagagtacccctctcgtctcaggcgtggcagccggatcccccggctgcgtgccgtaccctgaaaacggcatcggagggcaggtcgctccttcgtcaacttcgtatatcctgcttcccttggaggctgcaaccggcatcccccctggatctattctacttaatccgcacacaggacaaccattcgtgaatccagacggcactccagccatctacaatcctcctaccagtcaacagcctttacgaagcgccatggtaggacagtcgcagcaacagccaccgcagcagcagccgagcccacagccccaacagcaggtccagcccccgcaacctcagatggccgggccgttagtgacacagagtgtacaggggctgcaggctagttctcagagcgtgcagtatcccgccgtgagctttccgcctcaacacctcctgcccgtgtctcccacacagcactttcctatgagggacgatgtagccacccagttcggtcagatgacgctgtccaggcagtccagcggcgagacccctgagcctccgtcaggtcctgtgtacccttcaagtctgatgccacagcccgcccagcagccgagttacgtgatagcaagtacgggccagcaactgccaaccggtggtttctccggatcaggcccccccatttctcagcaagtactccagcctcccccctccccccagggattcgtgcagcagccgcctcccgcccagatgccagtctattactacccctcaggtcaatatccaacatccactacgcagcagtatcgaccaatggcccccgtgcaatacaatgcacaacgctcccagcagatgcctcaggctgcacagcaagcaggatatcagcctgtgttatctgggcaacagggatttcagggattgatcggagtccaacagcctccccagtcacaaaacgtgataaacaaccagcaaggaacaccagtacagtccgtgatggtaagctacccaacaatgtcctcctatcaagtcccaatgacccagggcagccaggggttacctcaacagtcctatcagcagcccatcatgttaccaaaccaggccggccagggaagcctcccggcaactgggatgccagtttattgtaacgttacacctccgacaccacagaacaatctacgcctcataggcccgcattgcccaagctcaacagtaccagtgatgagtgcatcgtgcagaactaactgtgcatctatgtccaatgctgggtggcaagtgaagttttag

SEQ ID NO: 94663 - DNA, 3086 bp, Artificial Sequence
  derived and/or modified sequence
aggttgacgatgtgtcacactgtgtaagggaatcgcatggagatgggcattccgaactgttaatggggacatgggactccagttgtctctgatcacttgtgtggattttcctggcgtagaacgacagaagccgctagtaagtcgccaagacctacagcaggaattctgcaccaaagggcataaaatcttgttattttaatttgcatctgggagaatgtctgagcaaggagacctgaatcaggcaatagcagaggaaggagggactgagcaggagacggccactccagagaacggcattgttaaatcagaaagtctggatgaagaggagaaactggaactgcagaggcggctggaggctcagaatcaagaaagaagaaaatccaagtcaggagcaggaaaaggtaaactgactcgcagccttgctgtctgtgaggaatcttctgccagaccaggaggtgaaagtcttcaggatcaggaatcaattcatttacagctttccagtttttccagcctgcaagaggaggataaatctaggaaagatgactctgaaagagaaaaagaaaaggataaaaacaaagataaaacctctgaaaaacccaagatcagaatgttatcaaaagattgcagccaagaatacacggattctacaggcatagacttacacgagtttctgattaacacattaaagaataattccagggacaggatgatacttttgaaaatggagcaggaaattattgatttcattgctgacaacaataatcattataaaaagttccctcagatgtcatcgtatcagaggatgcttgtccatcgagtggcagcttattttggattggatcacaatgtggatcaaacaggaaaatctgttatcatcaacaagaccagcagcaccagaataccagagcaaaggttttgtgaacatttaaaagatgaaaaaggtgaagaatcccagaagcggtttatcttgaagcgagataactctagtattgataaagaagacaatcagtcagtttgctcccaggaaagcctttttgtggaaaacagtaggctcttggaagacagtaacatatgcaatgagacctataagaaaagacagctctttcggggcaacagagatggctcagggagaacatctgggagtcgacagagcagctcagaaaatgaactcaagtggtctgaccaccaaagggcctggagcagcacagactccgacagttccaaccgcaatctaaagcccgccatgaccaagacggcgagttttgggggcatcacggtgctgaccaggggtgacagcacttccagtactaggagtaccgggaagctgtccaaagcaggttccgagtcttccagcagtgcaggctcctcaggatcgctgtcccgcacccatccacctctccagagcacacccctagtctcaggtgtggcagctggctctccaggctgtgtgccttatccagagaatggaatagggggccaggttgctcccagcagcaccagctacatcctccttccacttgaagctgcaacaggcatcccgcctggaagcatccttcttaatccacacacaggccagccctttgtgaatcccgatggaactcctgcaatatacaacccacccaccagtcagcagcccctgcgaagcgccatggtggggcagtcccaacagcagccaccacagcagcagccctccccgcagccccaacagcaggtccagccaccgcagccacagatggcaggccctctggtcactcagtctgtccaggggctgcaggcttcctcccagtcagtgcaatatccagcagtctcttttcctccccagcacctcctacctgtgtctccaacgcagcactttcccatgagagatgatgtggcaacacagtttggccagatgaccctgagccggcagtcctcgggggagactcctgaacccccatcaggtcctgtctacccatcctcccttatgccacagccggcccagcagcccagctatgtaatcgcctctacaggccagcagcttcctacaggaggattctcaggctctggccctcccatctcccagcaggtcctccagccccctccctcaccacagggatttgtgcaacagcctccgcctgcacagatgcctgtatattattacccatctggtcagtaccctacctcaaccacgcaacagtaccggcccatggccccggttcagtacaacgctcagaggagtcaacagatgccacaggcagcacagcaagcaggttaccagccagtcttgtctggtcaacagggattccaaggcctaataggagtgcagcagccacctcagagtcagaacgtgataaataaccaacaaggaactccggtgcaaagcgtgatggtttcctacccaacaatgtcttcttatcaggtgccaatgacccagggttctcaaggactgccccagcagtcataccaacagccaatcatgctacctaaccaggcaggtcaagggtcactcccagccactggaatgcctgtttactgtaatgtcacaccgcccacccctcagaacaaccttaggctgattggcccacactgcccctccagcactgtcccagtgatgtcagctagctgcagaacaaactgtgcaagtatgagcaatgctggttggcaggtcaaattctgagagctctggctgtggtacatttcttcagatatttctcatggcctttgatggaagaggaacaaggtgggaaaactggctgaggacttaagtattcactcaacactcaaatgattgctgctggtattctgtaaaaaataaacaaagactaatatacacgttagctggttaatggtgcatatttctgtcatgtctgctaggtatgcctttatagcttagctagtgacatgaattcatcaaggtaagattttctcctaccactgaataccactgtgtagattataatatccctaatttggattagttttgtactttgtgttgagtttgtgatgctaaaagtatttaaaaattatatactaaatcacattgtaccaaagctgtaatggaaaagcaaagaagaattgatgaattgaaggaataatttatatacatt

SEQ ID NO: 94664 - DNA, 2442 bp, Artificial Sequence
  derived and/or modified sequence
atgtctgagcagggcgatctgaatcaggccatcgcggaggagggcggaaccgagcaagaaaccgccactccggagaacggcatcgtcaagagcgagtcactcgacgaggaggagaagctggagctgcagcggagactggaggcacagaatcaggaacgccgaaagagcaaatctggcgcaggcaaggggaaactcaccaggtctctagccgtgtgcgaggaatcttctgccaggccaggtggggagagtctgcaggaccaggagagcatacacctccagctgtcttcattctccagcctgcaagaggaggataagtcacggaaagacgatagcgagcgcgagaaggagaaagacaagaacaaggataagacttcagaaaaacctaagattagaatgctgtctaaggattgctcccaggaatatactgatagcactggaatcgatctgcatgaattcctgatcaacactctcaagaataattcaagggacagaatgattctgctgaaaatggaacaggaaattatagacttcatcgctgataataataatcactacaagaagtttccccagatgtcaagctatcagagaatgctggtgcatcgggtcgcagcctacttcggtctggatcacaatgtcgatcagaccgggaaaagcgtcattattaacaaaaccagttctactcgcatccccgagcagaggttttgtgagcacctcaaagacgaaaaaggggaggaatcacagaaacggttcatccttaaaagggacaactcctctatcgataaggaggataaccagtccgtgtgtagtcaggaatccctgtttgtcgaaaatagcagactactggaggattccaatatttgcaatgaaacctacaagaagcggcagctgtttaggggcaatcgagatggaagcggaaggacatcaggatcccgacaaagctcttccgagaacgaattaaagtggtcagatcaccagcgcgcatggagctcaaccgactccgatagcagcaataggaatttgaagccagctatgacaaaaaccgcgtccttcggtgggatcactgtcctcactcggggagactccacctcatcaacccggagcactggcaagctgagcaaagccggaagcgagagctccagttctgctggttcttctggctctctaagtcggacccaccctcctttacaatctacacctttggtaagcggcgtggccgcaggcagccctgggtgcgtaccatatccagagaacggtattggcggtcaggttgcaccctcatccacctcctatatcttgctccccctggaggctgctacagggatacccccaggatcgatcctgctcaaccctcacacgggccagccatttgtgaatcccgacgggactcccgcaatctacaatccgcctacaagccaacagccacttaggtccgccatggtggggcagagccaacaacaacccccacaacagcaaccctcgccccaaccccagcaacaggtgcagccccctcagccgcagatggcaggtcctcttgttacccagtccgtgcagggactgcaggcctctagccagtctgtgcagtacccagctgtatctttcccgccacagcacctgctaccagtgtccccaacccagcactttcccatgcgggatgatgttgccacacagttcggccagatgacgctgtctcgtcagtcaagcggggagacgccagaaccacctagtgggccagtttacccaagctccctcatgcctcagccagcccagcaacccagctatgtcattgccagcaccggtcagcagttgccgactggcggattcagcggctctggtcctccaatcagccagcaggtgttgcaacccccaccatctccacagggtttcgtgcaacagccaccacccgcacagatgcccgtatattactatccctccggacagtatcccacctctacaactcagcaatacaggcccatggctcctgtgcagtacaatgctcaacgatcccagcaaatgcctcaggcagcgcaacaggcaggctaccagcccgtgcttagtggtcagcaaggctttcaagggctgataggagtacagcagcccccacagtcccagaacgtgatcaacaatcaacaggggacccctgtgcagtcagtgatggtcagctaccctactatgagttcttaccaggttcctatgactcagggctcacagggccttccacagcaatcatatcagcaaccaattatgctgccaaatcaggcagggcagggttcccttccggcaaccggaatgccggtttattgcaatgtgaccccaccaacacctcagaataacctgcgactgatcggaccccactgtccatcctcaactgtgcctgtgatgtcggcatcctgccggaccaattgcgccagcatgtctaacgcaggctggcaagtgaagttttag

SEQ ID NO: 94665 - DNA, 2442 bp, Artificial Sequence
  derived and/or modified sequence
atgtccgaacagggtgatctcaaccaggctatcgcagaggagggcggtacagagcaagaaacggctactcctgagaacgggattgtgaagagtgagtctttggacgaagaggagaagttggagctccagcggagattggaggctcaaaatcaggagagacggaagtcgaagtcaggggctggaaagggcaaactgactcgctcattggctgtctgtgaggagtcttcagctcgcccaggcggagagtcactccaggaccaggagtctatccaccttcaactgtccagtttcagcagtctgcaggaggaggacaaatctcggaaagacgatagtgagagggagaaggaaaaagataagaacaaagacaagactagcgaaaagcccaagattcggatgctgtccaaggactgttcccaggagtataccgacagcaccggtatcgatctccatgagtttctgattaacacacttaagaacaacagtagagataggatgattttgcttaagatggagcaggaaataatagactttattgccgataacaataaccactacaagaaattcccccagatgtcttcatatcagcgtatgctcgtacaccgggtggcagcatacttcggcttagatcacaacgttgaccagaccggaaagtcggttatcattaataagacatcatctacacgcatccctgagcagcgcttttgtgagcatctgaaggacgagaagggggaggagtcccagaagaggttcatcttgaaacgagataattcttcaattgacaaagaggacaatcagtcggtttgctcacaagaaagtctgttcgtggaaaatagccgcctattagaggattccaatatatgcaacgaaacctacaaaaagcgccagttgtttcgcggaaatcgcgacggaagcgggagaacctcaggcagccgccagagtagtagcgagaatgaattgaaatggagcgatcaccagcgagcgtggtcaagcaccgatagcgactcctctaatcgaaacttgaagccagcaatgaccaaaaccgcgagttttggaggcatcactgtgctcaccaggggagatagcacttcctccaccagaagcacaggcaagctttcgaaagcaggctcggagagctcctcatccgccggatcttccggctcactcagtcggacacatccgccactgcagtcaacaccactggtgagtggcgtcgccgctggcagccctggttgcgtgccgtatccagaaaatggaattgggggtcaagtagcaccttcatctaccagctacatcctcctcccactcgaagcagccacaggcattccacccggttccatccttctaaacccccacacagggcagccctttgttaaccccgacggtacccctgctatttacaacccgcctaccagccagcaacccttacgctcggcgatggtgggtcaatctcaacagcaacctccacagcaacagccaagccctcagcctcagcagcaggtccaaccaccccagccccagatggcaggcccactcgttacacaatccgttcagggcttgcaggcctccagccagtccgttcagtatccagccgtcagttttccccctcagcatttgctgccagtttcgcccacccagcatttccctatgcgggatgatgtagccactcaatttggacagatgacactttctcggcagtcgtccggagaaacacctgagcctccttcagggcctgtctaccccagcagcctaatgccccagcctgcccagcagccttcatacgtcatcgctagtaccggccagcagctgcccacgggaggatttagcggcagcgggcctcctatctcgcaacaggtgttgcagcctcccccatctccccagggcttcgtgcagcagcctccgccagctcagatgcctgtgtattattatccttcaggtcaataccctacttctacaacacagcagtatcgtcctatggcaccagtgcagtataacgcccaaaggtcgcagcagatgcctcaagctgctcagcaggcaggctaccagccagtgctgtctgggcagcagggcttccagggtctcattggtgtccagcagccaccccaaagtcagaacgtgatcaacaaccaacagggtactccagtccaaagtgtcatggtgagctatcctaccatgtctagttaccaggtgcccatgacacagggctcgcagggcttgccacagcagagctatcagcagcctattatgctcccgaaccaggctgggcagggctccctccccgcaacaggcatgccagtttattgtaacgtaaccccaccgaccccgcagaacaacctacgcctcatcggccctcactgcccctcatcaacggtgcccgtgatgtcagcttcatgcaggaccaactgcgcctcaatgtctaacgccggatggcaggtgaaattctag

SEQ ID NO: 94666 - DNA, 3097 bp, Artificial Sequence
  derived and/or modified sequence
cagttcgatcaaggttgacgatgtgtcacactgtgtaagggaatcgcatggagatgggcattccgaactgttaatggggacatgggactccagttgtctctgatcacttgtgtggattttcctggcgtagaacgacagaagccgctagtaagtcgccaagacctacagcaggaattctgcaccaaagggcataaaatcttgttattttaatttgcatctgggagaatgtctgagcaaggagacctgaatcaggcaatagcagaggaaggagggactgagcaggagacggccactccagagaacggcattgttaaatcagaaagtctggatgaagaggagaaactggaactgcagaggcggctggaggctcagaatcaagaaagaagaaaatccaagtcaggagcaggaaaaggtaaactgactcgcagccttgctgtctgtgaggaatcttctgccagaccaggaggtgaaagtcttcaggatcaggaatcaattcatttacagctttccagtttttccagcctgcaagaggaggataaatctaggaaagatgactctgaaagagaaaaagaaaaggataaaaacaaagataaaacctctgaaaaacccaagatcagaatgttatcaaaagattgcagccaagaatacacggattctacaggcatagacttacacgagtttctgattaacacattaaagaataattccagggacaggatgatacttttgaaaatggagcaggaaattattgatttcattgctgacaacaataatcattataaaaagttccctcagatgtcatcgtatcagaggatgcttgtccatcgagtggcagcttattttggattggatcacaatgtggatcaaacaggaaaatctgttatcatcaacaagaccagcagcaccagaataccagagcaaaggttttgtgaacatttaaaagatgaaaaaggtgaagaatcccagaagcggtttatcttgaagcgagataactctagtattgataaagaagacaatcagtcagtttgctcccaggaaagcctttttgtggaaaacagtaggctcttggaagacagtaacatatgcaatgagacctataagaaaagacagctctttcggggcaacagagatggctcagggagaacatctgggagtcgacagagcagctcagaaaatgaactcaagtggtctgaccaccaaagggcctggagcagcacagactccgacagttccaaccgcaatctaaagcccgccatgaccaagacggcgagttttgggggcatcacggtgctgaccaggggtgacagcacttccagtactaggagtaccgggaagctgtccaaagcaggttccgagtcttccagcagtgcaggctcctcaggatcgctgtcccgcacccatccacctctccagagcacacccctagtctcaggtgtggcagctggctctccaggctgtgtgccttatccagagaatggaatagggggccaggttgctcccagcagcaccagctacatcctccttccacttgaagctgcaacaggcatcccgcctggaagcatccttcttaatccacacacaggccagccctttgtgaatcccgatggaactcctgcaatatacaacccacccaccagtcagcagcccctgcgaagcgccatggtggggcagtcccaacagcagccaccacagcagcagccctccccgcagccccaacagcaggtccagccaccgcagccacagatggcaggccctctggtcactcagtctgtccaggggctgcaggcttcctcccagtcagtgcaatatccagcagtctcttttcctccccagcacctcctacctgtgtctccaacgcagcactttcccatgagagatgatgtggcaacacagtttggccagatgaccctgagccggcagtcctcgggggagactcctgaacccccatcaggtcctgtctacccatcctcccttatgccacagccggcccagcagcccagctatgtaatcgcctctacaggccagcagcttcctacaggaggattctcaggctctggccctcccatctcccagcaggtcctccagccccctccctcaccacagggatttgtgcaacagcctccgcctgcacagatgcctgtatattattacccatctggtcagtaccctacctcaaccacgcaacagtaccggcccatggccccggttcagtacaacgctcagaggagtcaacagatgccacaggcagcacagcaagcaggttaccagccagtcttgtctggtcaacagggattccaaggcctaataggagtgcagcagccacctcagagtcagaacgtgataaataaccaacaaggaactccggtgcaaagcgtgatggtttcctacccaacaatgtcttcttatcaggtgccaatgacccagggttctcaaggactgccccagcagtcataccaacagccaatcatgctacctaaccaggcaggtcaagggtcactcccagccactggaatgcctgtttactgtaatgtcacaccgcccacccctcagaacaaccttaggctgattggcccacactgcccctccagcactgtcccagtgatgtcagctagctgcagaacaaactgtgcaagtatgagcaatgctggttggcaggtcaaattctgagagctctggctgtggtacatttcttcagatatttctcatggcctttgatggaagaggaacaaggtgggaaaactggctgaggacttaagtattcactcaacactcaaatgattgctgctggtattctgtaaaaaataaacaaagactaatatacacgttagctggttaatggtgcatatttctgtcatgtctgctaggtatgcctttatagcttagctagtgacatgaattcatcaaggtaagattttctcctaccactgaataccactgtgtagattataatatccctaatttggattagttttgtactttgtgttgagtttgtgatgctaaaagtatttaaaaattatatactaaatcacattgtaccaaagctgtaatggaaaagcaaagaagaattgatgaattgaaggaataatttatatacatt

SEQ ID NO: 94667 - protein, 153 aa, Artificial Sequence
  derived and/or modified sequence
MAASLVGKKIVFVTGNAKKLEEVQGPVLVEDTCLCFNALGGLPGPYIKWFLEKLKPEGLHQLLAGFEDKSAYALCTFALSTGDPSQPVRLFRGRTSGRIVAPRGCQDFGWDPCFQPDGYEQTYAEMPKAEKNAVSHRFRALLELQEYFGSLAA

SEQ ID NO: 94668 - DNA, 462 bp, Artificial Sequence
  derived and/or modified sequence
atggcggcttcactcgtgggaaagaagatagttttcgtgaccggtaacgccaagaagctggaggaagtgcaggggccagtcttggtcgaagacacgtgtctgtgcttcaatgcccttgggggcctccctgggccttatattaagtggttcctggaaaaactcaagccagaggggctccatcagctgctggccgggtttgaagacaaaagcgcctatgctttatgtacttttgctctcagcaccggagatccgtctcaaccagtaagactgtttagaggtcggacctcaggccggatagtggctccacgcggttgtcaggacttcgggtgggacccttgcttccagccggatgggtatgagcagacctatgcagaaatgcctaaagcagagaagaacgccgtgagtcaccggtttagagcactgctcgaattacaggagtatttcggctctctcgcggcatag

SEQ ID NO: 94669 - DNA, 897 bp, Artificial Sequence
  derived and/or modified sequence
ggctcagctgggtaaccggggatcaccatggcggcctcattggtggggaagaagatcgtgtttgtaacggggaacgccaagaagctggaggaggtacaggggcccgtgctggttgaggacacttgtctgtgcttcaatgcccttggagggctccccggcccctacataaagtggtttctggagaagttaaagcctgaaggtctccaccagctcctggccgggttcgaggacaagtcagcctatgcgctctgcacgtttgcactcagcaccggggacccaagccagcccgtgcgcctgttcaggggccggacctcgggccggatcgtggcacccagaggctgccaggactttggctgggacccctgctttcagcctgatggatatgagcagacgtacgcagagatgcctaaggcggagaagaacgctgtctcccatcgcttccgggccctgctggagctgcaggagtactttggcagtttggcagcttgacttctgcagctggaggaggcccctcaggccggggatctggggagggctagcccaaaacctcccgcatcgggcaggcaccccctgaagtacttccttcagggtttcccctttgtgagggtgtcgagtagcctcaccggcctgtctggaggagcagctggctctgctctgagaaactctggcaagtggacgccattctcttgcccttaggattcactgctctctcctacagccgccaggcctggggtcctgaaaggaccttgggtggtaaagctgtacttggtgggagtgagggcgtggggaggaaccatgcaaatcgccttccatggtttttaaatgcagtaaataacatttctggatgagacttgtttccaaaataaaccagctatatctgttttgaaccctgcccca

SEQ ID NO: 94670 - DNA, 462 bp, Artificial Sequence
  derived and/or modified sequence
atggccgccagcctggtgggcaagaagatcgtgtttgtgactggaaatgccaagaagctggaggaggtgcagggccctgtgctggtggaggacacctgcctgtgcttcaatgccctgggcggcctgcccggcccctacatcaagtggttcctggagaagctgaagccagagggcctgcaccagctgctggccggctttgaggacaagagcgcctatgccctgtgcacctttgccctgagcactggagaccccagccagcctgtgcggctcttccggggccgcaccagcggcagaattgtggccccccggggctgccaggactttggctgggacccctgcttccagccagatggctatgagcagacctacgccgagatgcccaaggccgagaagaatgctgtgagccaccgcttccgggccctgctggagctgcaggagtacttcggcagcctggccgcctag

SEQ ID NO: 94671 - DNA, 462 bp, Artificial Sequence
  derived and/or modified sequence
atggccgccagcctggtgggcaagaagatcgtgttcgtgaccggcaacgccaagaagttagaagaggtgcagggccctgtgttagtcgaagatacctgtctgtgtttcaatgctctcggaggcctacctggcccatacattaaatggttcctcgaaaagctcaaacccgaggggctgcatcagctcttggcagggtttgaggataaatcggcatatgccctatgcaccttcgccctgagtacgggcgatccaagccagccagttcggttatttagagggaggacttccggacgcatcgtagctcccaggggctgccaggacttcggctgggatccatgctttcagccagacggctacgaacagacttacgccgaaatgccgaaagctgagaagaatgccgtgagccatcgattccgtgccctcttagaactacaagagtactttgggtcactagccgcctag

SEQ ID NO: 94672 - DNA, 462 bp, Artificial Sequence
  derived and/or modified sequence
atggccgcttcactggttggaaagaagatcgtgtttgtgaccggaaacgctaaaaagttagaggaggtccaaggcccagtcctggtggaggatacttgtctgtgttttaacgctctggggggtctcccgggaccatacattaagtggttcttggagaagctgaaacctgaggggctccatcagcttttggctgggttcgaggataagtccgcatacgccctgtgtacattcgctctaagcactggtgaccccagccagccagtgagactgtttcgaggcagaacatcggggagaatagtcgctccaagaggctgtcaagactttggctgggacccctgcttccagccagatgggtacgagcaaacctatgccgagatgcctaaagctgagaagaatgcggtcagccaccggttccgggctctattggaattacaggagtatttcggtagcctcgcggcttag

SEQ ID NO: 94673 - DNA, 462 bp, Artificial Sequence
  derived and/or modified sequence
atggccgccagcctggtgggcaagaagatcgtgttcgtgaccggcaacgccaagaagctggaggaggtgcagggccccgtgctggtggaggacacctgcctgtgcttcaacgccctgggcggcctgcccggcccctacatcaagtggttcctggagaagctgaagcccgagggcctgcaccagctgctggccggcttcgaggacaagagcgcctacgccctgtgcaccttcgccctgagcaccggcgaccccagccagcccgtgagactgttcagaggcagaaccagcggcagaatcgtggcccccagaggctgccaggacttcggctgggacccctgcttccagcccgacggctacgagcagacctacgccgagatgcccaaggccgagaagaacgccgtgagccacagattcagagccctgctggagctgcaggagtacttcggcagcctggccgcctag

SEQ ID NO: 94674 - protein, 238 aa, Artificial Sequence
  derived and/or modified sequence
MAVEGGMKCVKFLLYVLLLAFCACAVGLIAVGVGAQLVLSQTIIQGATPGSLLPVVIIAVGVFLFLVAFVGCCGACKENYCLMITFAIFLSLIMLVEVAAAIAGYVFRDKVMSEFNNNFRQQMENYPKNNHTASILDRMQADFKCCGAANYTDWEKIPSMSKNRVPDSCCINVTVGCGINFNEKAIHKEGCVEKIGGWLRKNVLVVAAAALGIAFVEVLGIVFACCLVKSIRSGYEVM

SEQ ID NO: 94675 - protein, 236 aa, Artificial Sequence
  derived and/or modified sequence
MAVEGGMKCVKFLLYVLLLAFCACAVGLIAVGVGAQLVLSQTIIQGATPGSLLPVVIIAVGVFLFLVAFVGCCGACKENYCLMITFAIFLSLIMLVEVAAAIAGYVFRDKVMSEFNNNFRQQMENYPKNNHTASILDRMQADFKCCGAANYTDWEKIPSMSKNRVPDSCCINVTVGCGINFNEKAIHKEGCVEKIGGWLRKNVLVVAAAALGIAFVLGIVFACCLVKSIRSGYEVM

SEQ ID NO: 94676 - protein, 133 aa, Artificial Sequence
  derived and/or modified sequence
MAVEGGMKCVKFLLYVLLLAFCACAVGLIAVGVGAQLVLSQTIIQGATPGSLLPVVIIAVGVFLFLVAFVGCCGACKENYCLMITFAIFLSLIMLVEVAAAIAGYVFRDKVMSEFNNNFRQQMENYPKNNHTA

SEQ ID NO: 94677 - protein, 215 aa, Artificial Sequence
  derived and/or modified sequence
MAVEGGMKCVKFLLYVLLLAFCACAVGLIAVGVGAQLVLSQTIIQGATPGSLLPVVIIAVGVFLFLVAFVGCCGACKENYCLMITFAIFLSLIMLVEVAAAIAGYVFRDKVMSEFNNNFRQQMENYPKNNHTASILDRMQADFKCCGAANYTDWEKIPSMSKNRVPDSCCINVTVGCGINFNEKAIHKEGCVEKIGGWLRKNVLVVAAAALGIAF

SEQ ID NO: 94678 - protein, 217 aa, Artificial Sequence
  derived and/or modified sequence
MAVEGGMKCVKFLLYVLLLAFCACAVGLIAVGVGAQLVLSQTIIQGATPGSLLPVVIIAVGVFLFLVAFVGCCGACKENYCLMITFAIFLSLIMLVEVAAAIAGYVFRDKVMSEFNNNFRQQMENYPKNNHTASILDRMQADFKCCGAANYTDWEKIPSMSKNRVPDSCCINVTVGCGINFNEKAIHKEGCVEKIGGWLRKNVLVVAAAALGIAFVE

SEQ ID NO: 94679 - protein, 156 aa, Artificial Sequence
  derived and/or modified sequence
MITFAIFLSLIMLVEVAAAIAGYVFRDKVMSEFNNNFRQQMENYPKNNHTASILDRMQADFKCCGAANYTDWEKIPSMSKNRVPDSCCINVTVGCGINFNEKAIHKEGCVEKIGGWLRKNVLVVAAAALGIAFVEVLGIVFACCLVKSIRSGYEVM

SEQ ID NO: 94680 - DNA, 717 bp, Artificial Sequence
  derived and/or modified sequence
atggcggtggagggagggatgaaatgtgtgaagtttttgctgtatgtcctgctccttgcgttttgcgcctgtgccgtgggattgatcgcggtgggggtgggagctcagcttgtgctgtctcagaccattattcaaggagctacaccaggctcgctcttgcctgttgtcatcatcgcagtgggagtgtttctgttcctcgtggcatttgtcggttgttgtggagcctgtaaagagaattactgtctaatgatcacctttgctatatttctgagcctcatcatgctggtggaggtggccgcagccatcgccggttatgtgtttcgggataaggtcatgtccgagtttaataataatttcaggcagcaaatggaaaattatcctaagaacaaccacaccgctagcattctggacagaatgcaggccgatttcaagtgctgtggcgccgcaaactatactgactgggagaagataccctcaatgagcaagaatcgggttccagattcctgctgcattaatgtgactgttggatgtggtatcaatttcaatgaaaaggccatccacaaggaaggctgcgttgagaaaatcgggggttggctcaggaaaaatgtgttagttgttgccgccgcagctctgggcattgctttcgtggaggtgctgggtatcgtgtttgcctgctgtctggttaagtccatcagatccgggtatgaggtaatgtag

SEQ ID NO: 94681 - DNA, 711 bp, Artificial Sequence
  derived and/or modified sequence
atggccgtggaaggcggtatgaagtgcgtcaagtttttgttgtatgttctgctactggcgttctgcgcatgcgccgtcggacttatcgcagtaggggtaggtgctcagctcgtgctgtcccagacaattattcagggggccacccctggaagcctgctgcctgtggtgatcattgcagtcggagtgttcctgtttcttgtggcctttgttgggtgctgtggagcttgtaaagagaattattgcctgatgatcacatttgccatttttttaagcctgatcatgctagtagaagtggcggcagccattgctggctatgtctttcgcgataaggtcatgtcagagtttaataacaatttccggcagcaaatggagaactaccccaaaaacaaccacaccgctagcattctcgaccgaatgcaagcagatttcaagtgctgtggcgccgccaactatactgactgggagaaaataccctcaatgtctaagaatcgggtccctgactcatgttgcatcaacgtgacagtcggctgtggcattaattttaatgaaaaagctatacataaagagggatgcgtagagaagattgggggttggctccgtaaaaacgtcctggtcgtggcagctgcggctctgggaatagcatttgtgctcggcatcgtttttgcatgttgcctggtgaagagtatccggagcggctacgaagtgatgtag

SEQ ID NO: 94682 - DNA, 402 bp, Artificial Sequence
  derived and/or modified sequence
atggccgttgagggagggatgaagtgcgtgaaatttctactgtatgtgctgctgctcgccttttgtgcctgtgcagttggcctcatcgcagtcggtgtcggcgcccagctggttctctcccagacaatcatacagggtgccactcccggctctcttcttcctgtagtcattatagctgtgggagtctttctgtttctggttgccttcgtaggctgctgtggcgcttgcaaagagaactactgccttatgattaccttcgccatttttctgagtttgatcatgctcgtggaagtcgcagccgccatagcgggttatgtatttagagataaggtgatgtccgaattcaataataacttcagacaacagatggagaactatcccaaaaacaaccacacagcctag

SEQ ID NO: 94683 - DNA, 717 bp, Artificial Sequence
  derived and/or modified sequence
atggccgtcgaaggtggcatgaaatgcgttaaattcctcctttacgtcctgctcctagccttttgtgcctgcgccgttggcctcatcgccgttggggtgggagctcagcttgttctgtcccagaccatcattcagggggcgactccaggctctttactgcctgtagtgattattgccgtgggtgtatttctatttttagtggcattcgtcggctgttgcggcgcctgcaaagagaattactgtctgatgatcacttttgccatatttttgagcctcatcatgctggtcgaggtggcggcagcaatagccggctacgtgttcagagacaaggtcatgtctgaattcaacaataatttccgccagcagatggaaaattaccctaagaataatcacactgcttcgatcctggatagaatgcaggccgacttcaagtgttgcggggccgcaaattataccgactgggagaaaatcccctcaatgtctaaaaacagggttcccgatagctgttgcatcaacgtcactgtgggctgtggaattaatttcaacgagaaggccatacacaaagagggatgcgtggaaaagataggcgggtggcttaggaaaaacgtgcttgtggtggcagccgccgcgttggggatagcattcgttgaggtcctgggcattgtgttcgcttgttgtctcgtgaaaagcatcagatccggttatgaagttatgtag

SEQ ID NO: 94684 - DNA, 648 bp, Artificial Sequence
  derived and/or modified sequence
atggcagtcgaagggggcatgaagtgcgtgaaattcctgctgtatgtactgcttctcgcattctgtgcatgtgccgtgggccttatcgccgtgggcgttggtgcacagctcgtcctgtctcagaccataattcagggggcaacccccggaagtctgttgccagtggttataattgcagtcggcgtcttcctcttcctcgtggcttttgtcgggtgctgcggcgcttgtaaagagaattattgtttgatgattacctttgccatatttctgtcactgatcatgttggtcgaggtggcagctgctatcgctggctacgtttttagggacaaggtgatgtctgagtttaataataactttagacagcagatggaaaattatcctaagaacaaccacactgccagcatcctcgaccgaatgcaggcggattttaagtgctgtggagccgccaattacacagactgggagaaaattccatccatgagcaagaacagagttcccgattcatgctgtattaacgtaaccgtagggtgtggcatcaatttcaatgaaaaggccatccacaaagaaggatgcgtggaaaagatcggcggctggctccgtaaaaacgttctggtcgtggctgccgcagccttgggaatcgcattctag

SEQ ID NO: 94685 - DNA, 654 bp, Artificial Sequence
  derived and/or modified sequence
atggcagtggagggaggcatgaaatgtgtgaaatttctgttgtatgtgctgctgctcgccttttgtgcatgtgctgtgggccttatagccgtgggagtgggggctcagctggttctgtcccagacaatcattcagggggctacaccagggagcctcctcccagtcgttattatagcagttggagtcttcctttttctcgtagccttcgtgggctgttgcggagcttgtaaagaaaattactgcttaatgattactttcgcaatttttctttctctaattatgcttgtagaagttgctgccgctatcgccggctacgtgtttcgggataaggtaatgagtgagtttaacaataactttcgacagcaaatggaaaactaccccaaaaataatcatacagcatccattcttgatcgcatgcaggccgatttcaagtgttgtggtgccgccaactacaccgattgggagaagatcccaagcatgtcaaagaaccgagttcccgattcctgttgtatcaacgtgaccgtcgggtgtgggatcaatttcaacgagaaggccatccacaaggagggatgtgtcgaaaagatcggcggatggctgagaaagaacgtgctagtggtggcggcagcggcccttgggatcgcctttgtcgaatag

SEQ ID NO: 94686 - DNA, 717 bp, Artificial Sequence
  derived and/or modified sequence
atggctgtcgaaggcggcatgaagtgtgtgaagttcctcttatatgtgctgctactcgctttttgtgcctgtgcagtgggattgatcgccgttggcgtgggtgctcaactcgttctcagtcaaacgattatccagggggcaactccaggttctctcttgccagtggttattattgccgtcggcgtgtttctttttctggttgccttcgtaggatgctgtggcgcgtgcaaggagaactattgcctgatgatcacgttcgccatcttcctttctctgatcatgctcgttgaagttgccgcagccattgcggggtatgtttttcgggacaaggtgatgagcgagtttaataacaatttcagacagcagatggagaactaccctaagaacaaccacactgcgagcatcctggaccgtatgcaagctgacttcaaatgttgcggcgcagctaattacacagattgggaaaagattccctcaatgagtaaaaaccgggtgccagactcatgttgcatcaatgtgacggtgggatgcggcataaatttcaacgagaaagcgatccataaagaggggtgtgtcgagaaaataggaggctggctacggaagaatgtgttggtagtggctgcagccgcgcttggcatcgcctttgtggaggttctcggcattgttttcgcatgctgcctcgtgaaaagcattaggtccggctatgaggtaatgtag

SEQ ID NO: 94687 - DNA, 717 bp, Artificial Sequence
  derived and/or modified sequence
atggctgtggagggcggcatgaagtgtgtgaagttcctgctgtatgtgctgctgctggccttctgtgcctgtgctgtgggcctgattgctgtgggcgtgggcgcccagctggtgctgagccagaccatcatccagggcgccaccccaggcagcctgctgcctgtggtgatcatcgctgtgggcgtcttcctgttcctggtggcctttgtgggctgctgcggggcctgcaaggagaactactgcctgatgatcacctttgccatcttcctgagcctcatcatgctggtggaggtggccgccgccatcgccggctacgtgttccgggacaaggtgatgtctgagttcaacaacaacttccggcagcagatggagaactaccccaagaacaaccacacagccagcatcctggacaggatgcaggccgacttcaagtgctgcggggccgccaactacacagactgggagaagatccccagcatgagcaagaacagagtgcctgacagctgctgcatcaacgtgacagtgggctgcggcatcaacttcaatgagaaggccatccacaaggagggctgtgtggagaagattggaggctggctgaggaagaatgtgctggtggtggccgctgctgccctgggcatcgcctttgtggaggtgctgggcatcgtgtttgcctgctgcctggtgaagagcatccgcagcggctatgaggtgatgtag

SEQ ID NO: 94688 - DNA, 711 bp, Artificial Sequence
  derived and/or modified sequence
atggctgtggagggcggcatgaagtgtgtgaagttcctgctgtatgtgctgctgctggccttctgtgcctgtgctgtgggcctgattgctgtgggcgtgggcgcccagctggtgctgagccagaccatcatccagggcgccaccccaggcagcctgctgcctgtggtgatcatcgctgtgggcgtcttcctgttcctggtggcctttgtgggctgctgcggggcctgcaaggagaactactgcctgatgatcacctttgccatcttcctgagcctcatcatgctggtggaggtggccgccgccatcgccggctacgtgttccgggacaaggtgatgtctgagttcaacaacaacttccggcagcagatggagaactaccccaagaacaaccacacagccagcatcctggacaggatgcaggccgacttcaagtgctgcggggccgccaactacacagactgggagaagatccccagcatgagcaagaacagagtgcctgacagctgctgcatcaacgtgacagtgggctgcggcatcaacttcaatgagaaggccatccacaaggagggctgtgtggagaagattggaggctggctgaggaagaatgtgctggtggtggccgctgctgccctgggcatcgcctttgtgctgggcatcgtgtttgcctgctgcctggtgaagagcatccgcagcggctatgaggtgatgtag

SEQ ID NO: 94689 - DNA, 402 bp, Artificial Sequence
  derived and/or modified sequence
atggctgtggagggcggcatgaagtgtgtgaagttcctgctgtatgtgctgctgctggccttctgtgcctgtgctgtgggcctgattgctgtgggcgtgggcgcccagctggtgctgagccagaccatcatccagggcgccaccccaggcagcctgctgcctgtggtgatcatcgctgtgggcgtcttcctgttcctggtggcctttgtgggctgctgcggggcctgcaaggagaactactgcctgatgatcacctttgccatcttcctgagcctcatcatgctggtggaggtggccgccgccatcgccggctacgtgttccgggacaaggtgatgtctgagttcaacaacaacttccggcagcagatggagaactaccccaagaacaaccacacagcctag

SEQ ID NO: 94690 - DNA, 648 bp, Artificial Sequence
  derived and/or modified sequence
atggctgtggagggcggcatgaagtgtgtgaagttcctgctgtatgtgctgctgctggccttctgtgcctgtgctgtgggcctgattgctgtgggcgtgggcgcccagctggtgctgagccagaccatcatccagggcgccaccccaggcagcctgctgcctgtggtgatcatcgctgtgggcgtcttcctgttcctggtggcctttgtgggctgctgcggggcctgcaaggagaactactgcctgatgatcacctttgccatcttcctgagcctcatcatgctggtggaggtggccgccgccatcgccggctacgtgttccgggacaaggtgatgtctgagttcaacaacaacttccggcagcagatggagaactaccccaagaacaaccacacagccagcatcctggacaggatgcaggccgacttcaagtgctgcggggccgccaactacacagactgggagaagatccccagcatgagcaagaacagagtgcctgacagctgctgcatcaacgtgacagtgggctgcggcatcaacttcaatgagaaggccatccacaaggagggctgtgtggagaagattggaggctggctgaggaagaatgtgctggtggtggccgctgctgccctgggcatcgccttctag

SEQ ID NO: 94691 - DNA, 654 bp, Artificial Sequence
  derived and/or modified sequence
atggctgtggagggcggcatgaagtgtgtgaagttcctgctgtatgtgctgctgctggccttctgtgcctgtgctgtgggcctgattgctgtgggcgtgggcgcccagctggtgctgagccagaccatcatccagggcgccaccccaggcagcctgctgcctgtggtgatcatcgctgtgggcgtcttcctgttcctggtggcctttgtgggctgctgcggggcctgcaaggagaactactgcctgatgatcacctttgccatcttcctgagcctcatcatgctggtggaggtggccgccgccatcgccggctacgtgttccgggacaaggtgatgtctgagttcaacaacaacttccggcagcagatggagaactaccccaagaacaaccacacagccagcatcctggacaggatgcaggccgacttcaagtgctgcggggccgccaactacacagactgggagaagatccccagcatgagcaagaacagagtgcctgacagctgctgcatcaacgtgacagtgggctgcggcatcaacttcaatgagaaggccatccacaaggagggctgtgtggagaagattggaggctggctgaggaagaatgtgctggtggtggccgctgctgccctgggcatcgcctttgtggagtag

SEQ ID NO: 94692 - DNA, 717 bp, Artificial Sequence
  derived and/or modified sequence
atggccgtggagggcggcatgaagtgcgtgaagttcctgctgtacgtgcttctcctagccttttgcgcctgcgccgtcggcttaatagccgtcggcgtgggtgcccaacttgtgctgtctcagactattatccaaggcgccacaccgggcagcctattgcccgttgtgattatcgccgttggagtgtttctgtttctggtcgcatttgtgggctgttgcggagcatgtaaagagaattattgcctcatgataacgttcgccattttcctgagtctcattatgcttgtagaggtcgctgcagcgattgccggttacgtgttcagagataaggttatgtccgagtttaataacaattttcgccaacaaatggaaaactatccaaaaaataaccacactgcatccattctggataggatgcaggcggattttaaatgttgcggtgccgctaactacacagattgggaaaagatcccgagcatgtctaagaaccgcgttcccgattcatgctgtataaacgtgactgttggctgtgggataaattttaacgagaaggctatacacaaggagggttgcgtcgaaaaaattggggggtggctaaggaaaaatgtcctcgtggttgctgccgccgcattgggcatcgctttcgtggaagttcttggcatcgtgttcgcttgttgtctagtgaaatccatcaggagcgggtacgaagttatgtag

SEQ ID NO: 94693 - DNA, 711 bp, Artificial Sequence
  derived and/or modified sequence
atggccgtggagggcggcatgaagtgcgtgaagttcctgctgtacgtgctgctgctggcgttctgcgcctgcgcggtcggacttatcgctgtgggcgtcggtgctcagctcgtgctgagtcagaccattattcagggtgcaaccccaggaagcctgttgccagttgttatcattgcggttggcgtgtttctgttcttagttgcttttgtcggctgttgtggagcctgcaaggaaaactactgtctgatgattacatttgctatttttctttccttgataatgcttgtcgaggtagctgcagcaattgcaggatatgtgttcagggacaaggttatgagtgagttcaacaacaatttccggcagcaaatggagaactatccaaagaacaaccacactgctagtatattagatcgtatgcaggccgatttcaagtgctgtggagcagctaactatacagattgggagaaaatcccatccatgagcaagaatcgcgtccctgactcctgctgtattaacgtgactgttggctgtgggataaattttaatgagaaagctatccataaagaagggtgcgtcgagaaaattggcggctggctaaggaagaacgtgctggttgttgctgccgcagcgctcggcattgccttcgtccttggcatcgttttcgcctgctgtctggtcaaatcaatacgatcagggtatgaagtaatgtag

SEQ ID NO: 94694 - DNA, 402 bp, Artificial Sequence
  derived and/or modified sequence
atggccgtggagggcggcatgaagtgcgtgaagttcctgctgtacgtcttgctgcttgcattttgtgcatgtgctgttgggctcatagccgtgggcgtgggcgcgcaactggtgctgtctcagaccatcattcaaggtgctacacctggttcattactccctgtcgtaataattgcggtaggcgtgttcctctttctggtcgcattcgtcggatgctgtggggcatgtaaagaaaactactgtctaatgataacgtttgctatcttcctttctcttattatgctggtcgaggtggcagccgcgatagccggttacgtgttccgcgacaaggttatgagtgaatttaataataacttccggcagcaaatggaaaattaccccaagaacaaccacactgcatag

SEQ ID NO: 94695 - DNA, 717 bp, Artificial Sequence
  derived and/or modified sequence
atggccgtggagggcggcatgaagtgcgtgaagttcctgctgtacgtactcttgcttgcattctgtgcctgtgcagttggactcatcgccgtcggagtcggtgcccaactggtactctcgcagacaatcatccagggagctacccctgggagtttgctccctgtggtgataattgccgttggggtgttcctgtttctggtcgccttcgtgggctgctgtggcgcgtgcaaggagaattactgtctcatgatcacctttgccatttttctctctcttataatgctggtcgaggtggctgcggctatcgcaggttatgtattcagagacaaagtgatgagcgagtttaacaacaacttccggcagcaaatggaaaactatcccaagaacaaccacaccgcttccatactagacaggatgcaagccgactttaagtgttgtggcgccgcaaattacacagactgggaaaaaattccctcgatgtcaaagaacagggtccctgacagctgctgcatcaacgttaccgtcggatgcggcataaactttaacgaaaaggcgatccataaagagggttgcgtggaaaaaattgggggctggctgcgcaaaaatgtgctcgttgtcgctgccgcggctcttggcatcgctttcgtggaagtgctgggtattgttttcgcctgctgcttggtgaagtctatccgcagcgggtacgaggtcatgtag

SEQ ID NO: 94696 - DNA, 648 bp, Artificial Sequence
  derived and/or modified sequence
atggccgtggagggcggcatgaagtgcgtgaagttcctgctgtacgtgcttttgctggcattctgtgcctgcgcggtgggcctgatcgcggttggcgtgggcgcccagcttgtcttgagccagaccataatccagggtgctacacctggctccctgctaccagtggtgatcatcgcagtcggtgtgttcttatttctggtggccttcgtgggctgctgcggggcctgcaaggagaactattgcctcatgattacgttcgccatttttttgtctctcattatgctggtcgaagtagccgccgccatcgcgggatatgtcttcagagataaggtaatgtccgagttcaacaataacttccggcagcagatggagaactatccaaagaacaatcacaccgcaagcattctggatcggatgcaggccgattttaagtgctgcggtgccgccaactacaccgactgggaaaagatcccctctatgtcaaagaacagggtccccgacagctgctgcatcaatgtcaccgtagggtgtggcatcaactttaacgaaaaggccattcataaagaaggatgcgtggagaaaatcggcggttggttacgtaagaacgtcctagtcgtcgccgccgcagccctgggtattgccttctag

SEQ ID NO: 94697 - DNA, 654 bp, Artificial Sequence
  derived and/or modified sequence
atggccgtggagggcggcatgaagtgcgtgaagttcctgctgtacgtgctgcttcttgctttttgcgcatgcgctgttgggctgatcgccgtgggcgtaggcgcgcagttggtgctgtcccagaccattattcaaggagccacgcccggtagtcttttgcccgtggttatcattgccgtgggcgtcttcctgtttctggtcgctttcgttggatgttgtggagcttgcaaagagaactactgcctgatgattacatttgccatcttcctgtctttgatcatgctagtcgaggtggcagccgcaattgcaggctatgtcttcagggataaggttatgtccgagtttaataacaactttaggcaacagatggagaattaccccaaaaacaaccacactgcatcgattctggatcgaatgcaggccgacttcaaatgctgtggggctgccaattataccgactgggaaaaaattccctctatgagcaagaatcgtgttccagactcatgctgtatcaatgttactgttgggtgcgggatcaattttaatgaaaaggcaatccacaaagaaggatgcgtcgaaaagattggcgggtggctgcggaagaatgtcctagtggtggccgccgctgccttgggaatcgctttcgttgaatag

SEQ ID NO: 94698 - DNA, 717 bp, Artificial Sequence
  derived and/or modified sequence
atggccgtggagggcggcatgaagtgcgtgaagttcctgctgtacgtccttcttttagccttctgtgcctgcgcagtgggtctcatagctgtgggagttggcgcccagctagtactctcccagactatcatccagggggccacccccggcagcctactgcctgtggtcataatcgccgttggcgtgtttctttttctcgtcgcctttgtgggctgctgtggtgcgtgcaaggagaactactgccttatgatcaccttcgctatcttcctatcccttataatgctcgtggaggtggcagccgctatcgctggctacgtctttcgcgacaaggtgatgagcgaatttaataataactttaggcagcagatggaaaattacccgaagaataaccatactgccagtattctggatcgcatgcaggctgattttaagtgctgtggggccgccaattataccgattgggaaaagatcccctccatgtctaaaaatagggtccccgattcttgctgtattaacgtgacagtaggatgcggaatcaactttaatgagaaggctatacataaagaagggtgcgtggagaagatcggcggctggttgcggaaaaacgtgcttgtggtggccgccgctgctctgggaatcgcctttgttgaggtgctgggcatcgtgttcgcatgttgcctggtcaagtccatcagatccggctatgaggtcatgtag

SEQ ID NO: 94699 - DNA, 717 bp, Artificial Sequence
  derived and/or modified sequence
atggctgtggaaggaggtatgaagtgcgtcaaatttctcttgtacgtgctgctcctcgctttctgcgcgtgtgccgtcggactgatcgcagttggggtgggtgcacaactggtcctgagtcagaccattatccagggtgctaccccgggtagcctgcttcctgtcgtgatcatagccgtcggagtgtttttatttctagtagcgttcgtggggtgttgcggcgcttgcaaagagaactactgcctgatgatcacattcgctatctttctctctctgatcatgctcgtagaagttgccgcagctattgcagggtatgttttcagggacaaagtgatgtccgaatttaacaacaactttaggcagcagatggagaactatcctaaaaacaaccacacagcctctatcctagaccgaatgcaagcggacttcaagtgctgtggggctgcaaattacacagattgggaaaaaatccctagcatgagtaaaaacagggtcccagactcctgttgcatcaatgttacagtggggtgtgggatcaactttaacgaaaaggccatccataaggaaggatgcgtcgagaaaatcggcggatggttgcggaagaacgtcctggtggtcgccgctgccgcactcgggatagcctttgttgaagtcctgggcattgtttttgcttgttgtctcgtgaagtctattaggagtgggtatgaagtgatgtag

SEQ ID NO: 94700 - DNA, 711 bp, Artificial Sequence
  derived and/or modified sequence
atggccgtggaagggggaatgaaatgcgtcaaattcctgctgtatgtgctcttgctggccttttgcgcatgcgctgttgggctgatcgccgtgggggtgggagcccaactggtactttcccaaacgatcatccagggtgctacccctggtagtctcctccccgtcgtgatcatcgccgtcggcgtgtttctctttctagtagcgttcgtgggatgttgtggtgcttgcaaagagaactattgtctgatgataacttttgctatctttctcagcttgatcatgctcgtcgaggttgcggcagctattgcaggctacgtgtttcgcgacaaggtcatgtcagagtttaataataattttaggcagcagatggagaactaccccaaaaacaatcatacggccagtattctggaccgcatgcaggccgatttcaagtgctgtggagcggcaaactacactgattgggaaaagatcccatcaatgtcaaagaaccgggtgcccgatagctgctgcataaatgtaacggtgggctgcggaatcaattttaacgaaaaggcaatccataaggaggggtgtgtggagaaaatcggcggatggctgcggaaaaacgtcttggtagtggccgctgccgctctggggatcgcattcgtgttaggaatcgtattcgcctgctgcctggtgaaaagtattcggagcggctatgaggtaatgtag

SEQ ID NO: 94701 - DNA, 402 bp, Artificial Sequence
  derived and/or modified sequence
atggccgtagaaggtggaatgaaatgcgtaaagttcctgctgtatgtgcttctcctggccttttgcgcatgcgccgttgggctcatagcggtaggagtgggggcacaactggtgttatcgcagacaatcattcagggtgccacgccaggttcactgctacctgtggtgatcatcgcggttggtgtctttttattcctcgtggcattcgtcgggtgctgcggggcttgcaaggagaactactgtcttatgattacattcgccattttcctgtccctgattatgttggttgaagtcgcagccgctatcgcgggatatgtgttcagagacaaagtgatgagtgagtttaacaataatttccgccaacagatggagaattaccctaagaataatcatacagcttag

SEQ ID NO: 94702 - DNA, 717 bp, Artificial Sequence
  derived and/or modified sequence
atggctgttgaaggaggaatgaaatgcgtcaagttcttgctgtatgtgctcctcttagccttttgcgcatgcgcggtcggactaatcgccgtgggtgttggcgctcagctcgtgctctcccaaaccattatccagggtgctactccaggaagcctgctccctgttgtcattattgccgtgggcgttttcctgtttcttgtagctttcgtgggatgctgcggtgcctgtaaggagaactattgcctaatgattaccttcgcaattttcctgagcctcataatgttggtggaggtggccgcagctatagcgggatacgtgtttagagacaaagtgatgagtgagtttaacaataactttaggcagcagatggagaattatcccaaaaataatcacacggccagtattttggacaggatgcaagccgactttaaatgttgcggggcagccaactacacggactgggaaaaaatccccagtatgtctaaaaaccgcgttcctgacagttgttgtattaacgtcaccgtcggttgcgggatcaacttcaacgaaaaagccatccataaagaggggtgtgtggaaaagattggtggctggctgcggaaaaacgtcctcgtcgtagctgcggctgcacttggcattgcttttgtggaggtgctcgggatagtcttcgcctgctgtctggtcaagtctatcagatccggctacgaagtgatgtag

SEQ ID NO: 94703 - DNA, 648 bp, Artificial Sequence
  derived and/or modified sequence
atggcagtggagggaggaatgaagtgcgttaagttcctgctttatgtgctcctcctggccttctgcgcctgtgccgtcggtctgatcgccgtgggagtaggggctcagctcgtgctgtcccagactatcattcaaggtgctacaccagggtctctcttgcctgtggtcataatagccgtaggcgtgtttctgttcttggtagcatttgttggttgctgtggtgcctgtaaggagaattactgccttatgataactttcgccatatttctgtccttaattatgctcgttgaggtagcagctgccatcgccggttacgtctttagggataaggtgatgagtgaatttaataataatttccggcagcagatggaaaactaccctaaaaataatcatacagccagcatactggacaggatgcaggccgacttcaaatgttgtggcgcagctaactataccgattgggagaagatcccctcaatgagcaagaacagggtgcccgatagctgctgcataaacgtcaccgtgggttgcggcattaactttaacgagaaggccatccataaagaaggttgtgtcgagaagatcggtggatggttgcggaagaatgtactcgttgtcgcagccgctgcactgggcatcgctttctag

SEQ ID NO: 94704 - DNA, 654 bp, Artificial Sequence
  derived and/or modified sequence
atggcggtggagggaggcatgaagtgcgtcaaattcctcctgtacgttttgttactcgcgttctgtgcctgtgcagtgggcctcatcgccgtgggcgtcggagcacagcttgtgttaagtcagactattattcaaggcgcaacacccggtagtctgcttcctgtcgtcattatcgcagtcggagtcttcctgttcctcgtcgcttttgtcggctgttgtggcgcatgtaaagagaattactgtctgatgattacctttgctattttcctgtccctgatcatgctcgtggaggtggcggctgcaattgcagggtacgttttccgtgacaaggttatgtctgaatttaataacaactttaggcagcagatggagaattaccccaaaaacaatcacacggcttctattttggaccgtatgcaggcagatttcaaatgctgtggcgctgcgaactacaccgactgggagaaaatcccgagcatgtctaagaaccgagttcccgatagctgttgcatcaacgtgactgtgggttgtgggataaatttcaatgagaaggctattcacaaggaaggatgcgtggaaaaaatcgggggatggctgcgcaaaaatgtgctggtcgttgccgctgctgcactcggcatcgctttcgtcgaatag

SEQ ID NO: 94705 - DNA, 717 bp, Artificial Sequence
  derived and/or modified sequence
atggccgttgaggggggaatgaagtgcgtcaagttcttactctacgttttgctgctggcgttctgcgcatgcgctgtcggtctaatcgcagtgggagtgggcgctcagcttgttctttctcaaacaataatacaaggagctacacctggttcactgctgccagtggtgataatcgccgtgggggtgtttctgttcttagtggcttttgttgggtgttgcggtgcttgtaaagaaaactactgccttatgatcacgtttgctattttcctgagtctgatcatgctggtggaggtggcagcagccatcgcaggctacgtattccgtgataaggtgatgagcgaattcaacaataactttcgacagcagatggaaaactacccaaaaaacaatcataccgcctctattctggatcggatgcaggccgactttaagtgctgcggtgctgccaattataccgattgggagaagatcccatccatgagtaagaacagggtgccagactcttgctgtataaatgtcactgtgggatgcggtatcaattttaacgaaaaggcgatccataaagaggggtgcgtggaaaagattgggggatggctgcgcaagaacgtgcttgtggtggctgctgcagccctgggaatcgcattcgtggaggtgctcggcatagtgttcgcttgctgcctcgtcaagagcatacggagcggttatgaagtgatgtag

SEQ ID NO: 94706 - DNA, 1070 bp, Artificial Sequence
  derived and/or modified sequence
cgggggtgggcgccttcttccgggtaggggccacgtggccctggccgggcggggggctcggcccaccccgcgccgggcccagtgactcaggccgcagctgttaccgcgtcacatgagggaggccggcggccactcggcgggggaggggaccgtggctggagcccggggcggggccgcgcggcaggcggggcgggagccggggggcgcagctagagagccccggagccgcggcgggagaggaacgcgcagccagccttgggaagcccaggcccggcagccatggcggtggaaggaggaatgaaatgtgtgaagttcttgctctacgtcctcctgctggccttttgcgcctgtgcagtgggactgattgccgtgggtgtcggggcacagcttgtcctgagtcagaccataatccagggggctacccctggctctctgttgccagtggtcatcatcgcagtgggtgtcttcctcttcctggtggcttttgtgggctgctgcggggcctgcaaggagaactattgtcttatgatcacgtttgccatctttctgtctcttatcatgttggtggaggtggccgcagccattgctggctatgtgtttagagataaggtgatgtcagagtttaataacaacttccggcagcagatggagaattacccgaaaaacaaccacactgcttcgatcctggacaggatgcaggcagattttaagtgctgtggggctgctaactacacagattgggagaaaatcccttccatgtcgaagaaccgagtccccgactcctgctgcattaatgttactgtgggctgtgggattaatttcaacgagaaggcgatccataaggagggctgtgtggagaagattgggggctggctgaggaaaaatgtgctggtggtagctgcagcagcccttggaattgcttttgtcgaggttttgggaattgtctttgcctgctgcctcgtgaagagtatcagaagtggctacgaggtgatgtaggggtctggtctcctcagcctcctcatctgggggagtggaatagtatcctccaggtttttcaattaaacggatta

SEQ ID NO: 94707 - DNA, 855 bp, Artificial Sequence
  derived and/or modified sequence
cggcgggagaggaacgcgcagccagccttgggaagcccaggcccggcagccatggcggtggaaggaggaatgaaatgtgtgaagttcttgctctacgtcctcctgctggccttttgcgcctgtgcagtgggactgattgccgtgggtgtcggggcacagcttgtcctgagtcagaccataatccagggggctacccctggctctctgttgccagtggtcatcatcgcagtgggtgtcttcctcttcctggtggcttttgtgggctgctgcggggcctgcaaggagaactattgtcttatgatcacgtttgccatctttctgtctcttatcatgttggtggaggtggccgcagccattgctggctatgtgtttagagataaggtgatgtcagagtttaataacaacttccggcagcagatggagaattacccgaaaaacaaccacactgcttcgatcctggacaggatgcaggcagattttaagtgctgtggggctgctaactacacagattgggagaaaatcccttccatgtcgaagaaccgagtccccgactcctgctgcattaatgttactgtgggctgtgggattaatttcaacgagaaggcgatccataaggagggctgtgtggagaagattgggggctggctgaggaaaaatgtgctggtggtagctgcagcagcccttggaattgcttttgttttgggaattgtctttgcctgctgcctcgtgaagagtatcagaagtggctacgaggtgatgtaggggtctggtctcctcagcctcctcatctgggggagtggaatagtatcctccaggtttttcaattaaacggattattttttcagaccgaaaaga

SEQ ID NO: 94708 - DNA, 607 bp, Artificial Sequence
  derived and/or modified sequence
tggaaaatggagaagctgtgctaatagaggggggccagaaatccccactctagaatgctgtagaatgttgggagacacccaggatctctccgccccggcgctcagagggtaactctcacccacctcgtccgcttctctgaaccagagtgacccaggctgcgctccgccccgctctcctaccccgagttggcacggaggcccggcagccatggcggtggaaggaggaatgaaatgtgtgaagttcttgctctacgtcctcctgctggccttttgcgcctgtgcagtgggactgattgccgtgggtgtcggggcacagcttgtcctgagtcagaccataatccagggggctacccctggctctctgttgccagtggtcatcatcgcagtgggtgtcttcctcttcctggtggcttttgtgggctgctgcggggcctgcaaggagaactattgtcttatgatcacgtttgccatctttctgtctcttatcatgttggtggaggtggccgcagccattgctggctatgtgtttagagataaggtgatgtcagagtttaataacaacttccggcagcagatggagaattacccgaaaaacaaccacactgct

SEQ ID NO: 94709 - DNA, 1233 bp, Artificial Sequence
  derived and/or modified sequence
gtggcttcggggaagggcttcctccccttttctcagactaggatccctggaaaatggagaagctgtgctaatagaggggggccagaaatccccactctagaatgctgtagaatgttgggagacacccaggatgtgagccagggactttctggaagtgtttgttctggccccacccgaccccaggcagtccccagctgtctgcacagtcggatggggagggggcttgcacagagttggagccagaggagagagctggctcatcccctacggtaggatggggaaacctcacagaccacattgtcacccggcctcagctctccgccccggcgctcagagggtaactctcacccacctcgtccgcttctctgaaccagagtgacccaggctgcgctccgccccgctctcctaccccgagttggcacggaggcccggcagccatggcggtggaaggaggaatgaaatgtgtgaagttcttgctctacgtcctcctgctggccttttgcgcctgtgcagtgggactgattgccgtgggtgtcggggcacagcttgtcctgagtcagaccataatccagggggctacccctggctctctgttgccagtggtcatcatcgcagtgggtgtcttcctcttcctggtggcttttgtgggctgctgcggggcctgcaaggagaactattgtcttatgatcacgtttgccatctttctgtctcttatcatgttggtggaggtggccgcagccattgctggctatgtgtttagagataaggtgatgtcagagtttaataacaacttccggcagcagatggagaattacccgaaaaacaaccacactgcttcgatcctggacaggatgcaggcagattttaagtgctgtggggctgctaactacacagattgggagaaaatcccttccatgtcgaagaaccgagtccccgactcctgctgcattaatgttactgtgggctgtgggattaatttcaacgagaaggcgatccataaggagggctgtgtggagaagattgggggctggctgaggaaaaatgtgctggtggtagctgcagcagcccttggaattgcttttgtcgaggttttgggaattgtctttgcctgctgcctcgtgaagagtatcagaagtggctacgaggtgatgtaggggtctggtctcctcagcctcctcatctgggggagtggaatagtatcctccaggtttttcaattaaacggattattttt

SEQ ID NO: 94710 - DNA, 788 bp, Artificial Sequence
  derived and/or modified sequence
ccggagactggcgggccgagggtcggcgtcaggctcaagcccctgccggcgcccttggatctgtcctgggccccagaggcggcggggcggggtccgggcttcgcggccgtcgcccccacccctctcctgcgggcccggcagccatggcggtggaaggaggaatgaaatgtgtgaagttcttgctctacgtcctcctgctggccttttgcgcctgtgcagtgggactgattgccgtgggtgtcggggcacagcttgtcctgagtcagaccataatccagggggctacccctggctctctgttgccagtggtcatcatcgcagtgggtgtcttcctcttcctggtggcttttgtgggctgctgcggggcctgcaaggagaactattgtcttatgatcacgtttgccatctttctgtctcttatcatgttggtggaggtggccgcagccattgctggctatgtgtttagagataaggtgatgtcagagtttaataacaacttccggcagcagatggagaattacccgaaaaacaaccacactgcttcgatcctggacaggatgcaggcagattttaagtgctgtggggctgctaactacacagattgggagaaaatcccttccatgtcgaagaaccgagtccccgactcctgctgcattaatgttactgtgggctgtgggattaatttcaacgagaaggcgatccataaggagggctgtgtggagaagattgggggctggctgaggaaaaatgtgctggtggtagctgcagcagcccttggaattgctttt

SEQ ID NO: 94711 - DNA, 845 bp, Artificial Sequence
  derived and/or modified sequence
gcgcagccagccttgggaagcccaggtgaggccgcggggacccggcggacttcggcgcgggctgggagagaccacccgcagtcccttcctccagggctcgccccaggcccgcggagactcgtccggcgctctccagccgccctggagcaactttgcttcgaagttccctgggcccgggcagggcccggcagccatggcggtggaaggaggaatgaaatgtgtgaagttcttgctctacgtcctcctgctggccttttgcgcctgtgcagtgggactgattgccgtgggtgtcggggcacagcttgtcctgagtcagaccataatccagggggctacccctggctctctgttgccagtggtcatcatcgcagtgggtgtcttcctcttcctggtggcttttgtgggctgctgcggggcctgcaaggagaactattgtcttatgatcacgtttgccatctttctgtctcttatcatgttggtggaggtggccgcagccattgctggctatgtgtttagagataaggtgatgtcagagtttaataacaacttccggcagcagatggagaattacccgaaaaacaaccacactgcttcgatcctggacaggatgcaggcagattttaagtgctgtggggctgctaactacacagattgggagaaaatcccttccatgtcgaagaaccgagtccccgactcctgctgcattaatgttactgtgggctgtgggattaatttcaacgagaaggcgatccataaggagggctgtgtggagaagattgggggctggctgaggaaaaatgtgctggtggtagctgcagcagcccttggaattgcttttgtcgagg

SEQ ID NO: 94712 - DNA, 949 bp, Artificial Sequence
  derived and/or modified sequence
gcgggtttccgggtgggaggggccgggaatcggggccgtgaagggaagccctcgagggccggccgggagcccggaaaccgaggtcccccttcggccagttttaatccccccgccctcccctctgccccaggcccggcagccatggcggtggaaggaggaatgaaatgtgtgaagttcttgctctacgtcctcctgctggccttttgcgcctgtgcagtgggactgattgccgtgggtgtcggggcacagcttgtcctgagtcagaccataatccagggggctacccctggctctctgttgccagtggtcatcatcgcagtgggtgtcttcctcttcctggtggcttttgtgggctgctgcggggcctgcaaggagaactattgtcttatgatcacgtttgccatctttctgtctcttatcatgttggtggaggtggccgcagccattgctggctatgtgtttagagataaggtgatgtcagagtttaataacaacttccggcagcagatggagaattacccgaaaaacaaccacactgcttcgatcctggacaggatgcaggcagattttaagtgctgtggggctgctaactacacagattgggagaaaatcccttccatgtcgaagaaccgagtccccgactcctgctgcattaatgttactgtgggctgtgggattaatttcaacgagaaggcgatccataaggagggctgtgtggagaagattgggggctggctgaggaaaaatgtgctggtggtagctgcagcagcccttggaattgcttttgtcgaggttttgggaattgtctttgcctgctgcctcgtgaagagtatcagaagtggctacgaggtgatgtaggggtctggtctcctcagcctcctcatctgggggagtggaatagtatcctccaggtttttcaattaaacggattattttttcagaccgaaaa

SEQ ID NO: 94713 - DNA, 779 bp, Artificial Sequence
  derived and/or modified sequence
gcccctctccccctttccctcctcccagcgcttgggggcctgtgcagtgggactgattgccgtgggtgtcggggcacagcttgtcctgagtcagaccataatccagggggctacccctggctctctgttgccagtggtcatcatcgcagtgggtgtcttcctcttcctggtggcttttgtgggctgctgcggggcctgcaaggagaactattgtcttatgatcacgtttgccatctttctgtctcttatcatgttggtggaggtggccgcagccattgctggctatgtgtttagagataaggtgatgtcagagtttaataacaacttccggcagcagatggagaattacccgaaaaacaaccacactgcttcgatcctggacaggatgcaggcagattttaagtgctgtggggctgctaactacacagattgggagaaaatcccttccatgtcgaagaaccgagtccccgactcctgctgcattaatgttactgtgggctgtgggattaatttcaacgagaaggcgatccataaggagggctgtgtggagaagattgggggctggctgaggaaaaatgtgctggtggtagctgcagcagcccttggaattgcttttgtcgaggttttgggaattgtctttgcctgctgcctcgtgaagagtatcagaagtggctacgaggtgatgtaggggtctggtctcctcagcctcctcatctgggggagtggaatagtatcctccaggtttttcaattaaacggattattttttcagaccgaaaa

SEQ ID NO: 94714 - DNA, 870 bp, Artificial Sequence
  derived and/or modified sequence
ggcttgagaggctactgtttgtctagggagggacacatcactcttgctcccttttcctcttcccttctcctggcctaactggccagaggaaccttagtcacagctgatgcgcgcgtgggatgtgcactggaggatagtgagggggcagttctgggagagaattgagctgggagccctggaggcctgtagaaagcattattctaggcctgtgcagtgggactgattgccgtgggtgtcggggcacagcttgtcctgagtcagaccataatccagggggctacccctggctctctgttgccagtggtcatcatcgcagtgggtgtcttcctcttcctggtggcttttgtgggctgctgcggggcctgcaaggagaactattgtcttatgatcacgtttgccatctttctgtctcttatcatgttggtggaggtggccgcagccattgctggctatgtgtttagagataaggtgatgtcagagtttaataacaacttccggcagcagatggagaattacccgaaaaacaaccacactgcttcgatcctggacaggatgcaggcagattttaagtgctgtggggctgctaactacacagattgggagaaaatcccttccatgtcgaagaaccgagtccccgactcctgctgcattaatgttactgtgggctgtgggattaatttcaacgagaaggcgatccataaggagggctgtgtggagaagattgggggctggctgaggaaaaatgtgctggtggtagctgcagcagcccttggaattgcttttgtcgaggttttgggaattgtctttgcctgctgcctcgtgaagagtatcagaagtggctacgaggtgatgtaggggtctggtctcctc

SEQ ID NO: 94715 - DNA, 717 bp, Artificial Sequence
  derived and/or modified sequence
atggccgtggagggcggcatgaagtgcgtgaagttcctgctgtacgtgctgctgctggccttctgcgcctgcgccgtgggcctgatcgccgtgggcgtgggcgcccagctggtgctgagccagaccatcatccagggcgccacccccggcagcctgctgcccgtggtgatcatcgccgtgggcgtgttcctgttcctggtggccttcgtgggctgctgcggcgcctgcaaggagaactactgcctgatgatcaccttcgccatcttcctgagcctgatcatgctggtggaggtggccgccgccatcgccggctacgtgttcagagacaaggtgatgagcgagttcaacaacaacttcagacagcagatggagaactaccccaagaacaaccacaccgccagcatcctggacagaatgcaggccgacttcaagtgctgcggcgccgccaactacaccgactgggagaagatccccagcatgagcaagaacagagtgcccgacagctgctgcatcaacgtgaccgtgggctgcggcatcaacttcaacgagaaggccatccacaaggagggctgcgtggagaagatcggcggctggctgagaaagaacgtgctggtggtggccgccgccgccctgggcatcgccttcgtggaggtgctgggcatcgtgttcgcctgctgcctggtgaagagcatcagaagcggctacgaggtgatgtag

SEQ ID NO: 94716 - DNA, 711 bp, Artificial Sequence
  derived and/or modified sequence
atggccgtggagggcggcatgaagtgcgtgaagttcctgctgtacgtgctgctgctggccttctgcgcctgcgccgtgggcctgatcgccgtgggcgtgggcgcccagctggtgctgagccagaccatcatccagggcgccacccccggcagcctgctgcccgtggtgatcatcgccgtgggcgtgttcctgttcctggtggccttcgtgggctgctgcggcgcctgcaaggagaactactgcctgatgatcaccttcgccatcttcctgagcctgatcatgctggtggaggtggccgccgccatcgccggctacgtgttcagagacaaggtgatgagcgagttcaacaacaacttcagacagcagatggagaactaccccaagaacaaccacaccgccagcatcctggacagaatgcaggccgacttcaagtgctgcggcgccgccaactacaccgactgggagaagatccccagcatgagcaagaacagagtgcccgacagctgctgcatcaacgtgaccgtgggctgcggcatcaacttcaacgagaaggccatccacaaggagggctgcgtggagaagatcggcggctggctgagaaagaacgtgctggtggtggccgccgccgccctgggcatcgccttcgtgctgggcatcgtgttcgcctgctgcctggtgaagagcatcagaagcggctacgaggtgatgtag

SEQ ID NO: 94717 - DNA, 402 bp, Artificial Sequence
  derived and/or modified sequence
atggccgtggagggcggcatgaagtgcgtgaagttcctgctgtacgtgctgctgctggccttctgcgcctgcgccgtgggcctgatcgccgtgggcgtgggcgcccagctggtgctgagccagaccatcatccagggcgccacccccggcagcctgctgcccgtggtgatcatcgccgtgggcgtgttcctgttcctggtggccttcgtgggctgctgcggcgcctgcaaggagaactactgcctgatgatcaccttcgccatcttcctgagcctgatcatgctggtggaggtggccgccgccatcgccggctacgtgttcagagacaaggtgatgagcgagttcaacaacaacttcagacagcagatggagaactaccccaagaacaaccacaccgcctag

SEQ ID NO: 94718 - DNA, 648 bp, Artificial Sequence
  derived and/or modified sequence
atggccgtggagggcggcatgaagtgcgtgaagttcctgctgtacgtgctgctgctggccttctgcgcctgcgccgtgggcctgatcgccgtgggcgtgggcgcccagctggtgctgagccagaccatcatccagggcgccacccccggcagcctgctgcccgtggtgatcatcgccgtgggcgtgttcctgttcctggtggccttcgtgggctgctgcggcgcctgcaaggagaactactgcctgatgatcaccttcgccatcttcctgagcctgatcatgctggtggaggtggccgccgccatcgccggctacgtgttcagagacaaggtgatgagcgagttcaacaacaacttcagacagcagatggagaactaccccaagaacaaccacaccgccagcatcctggacagaatgcaggccgacttcaagtgctgcggcgccgccaactacaccgactgggagaagatccccagcatgagcaagaacagagtgcccgacagctgctgcatcaacgtgaccgtgggctgcggcatcaacttcaacgagaaggccatccacaaggagggctgcgtggagaagatcggcggctggctgagaaagaacgtgctggtggtggccgccgccgccctgggcatcgccttctag

SEQ ID NO: 94719 - DNA, 654 bp, Artificial Sequence
  derived and/or modified sequence
atggccgtggagggcggcatgaagtgcgtgaagttcctgctgtacgtgctgctgctggccttctgcgcctgcgccgtgggcctgatcgccgtgggcgtgggcgcccagctggtgctgagccagaccatcatccagggcgccacccccggcagcctgctgcccgtggtgatcatcgccgtgggcgtgttcctgttcctggtggccttcgtgggctgctgcggcgcctgcaaggagaactactgcctgatgatcaccttcgccatcttcctgagcctgatcatgctggtggaggtggccgccgccatcgccggctacgtgttcagagacaaggtgatgagcgagttcaacaacaacttcagacagcagatggagaactaccccaagaacaaccacaccgccagcatcctggacagaatgcaggccgacttcaagtgctgcggcgccgccaactacaccgactgggagaagatccccagcatgagcaagaacagagtgcccgacagctgctgcatcaacgtgaccgtgggctgcggcatcaacttcaacgagaaggccatccacaaggagggctgcgtggagaagatcggcggctggctgagaaagaacgtgctggtggtggccgccgccgccctgggcatcgccttcgtggagtag

SEQ ID NO: 94720 - protein, 261 aa, Artificial Sequence
  derived and/or modified sequence
MAQNLKDLAGRLPAGPRGMGTALKLLLGAGAVAYGVRESVFTVEGGHRAIFFNRIGGVQQDTILAEGLHFRIPWFQYPIIYDIRARPRKISSPTGSKDLQMVNISLRVLSRPNAQELPSMYQRLGLDYEERVLPSIVNEVLKSVVAKFNASQLITQRAQVSLLIRRELTERAKDFSLILDDVAITELSFSREYTAAVEAKQVALSKNPGYIKLRKIRAAQNISKTIATSQNRIYLTADNLVLNLQDESFTRGSDSLIKGKK

SEQ ID NO: 94721 - protein, 213 aa, Artificial Sequence
  derived and/or modified sequence
MAQNLKDLAGRLPAGPRGMGTALKLLLGAGAVAYGVRESVFTVEGGHRAIFFNRIGGVQQDTILAEGLHFRIPWFQYPIIYDIRARPRKISSPTGSKDLQMVNISLRVLSRPNAQELPSMYQRLGLDYEERVLPSIVNEVLKSVVAKFNASQLITQRAQVSLLIRRELTERAKDFSLILDDVAITELSFSREYTAAVEAKQVGESQEPWGEGF

SEQ ID NO: 94722 - DNA, 786 bp, Artificial Sequence
  derived and/or modified sequence
atggcccagaacctgaaggacctggccggcagactgcccgccggccccagaggcatgggcaccgccctgaagctgctgctgggcgccggcgccgtggcctacggcgtgagagagagcgtgttcaccgtggagggcggccacagagccatcttcttcaacagaatcggcggcgtgcagcaggacaccatcctggccgagggcctgcacttcagaatcccctggttccagtaccccatcatctacgacatcagagccagacccagaaagatcagcagccccaccggcagcaaggacctgcagatggtgaacatcagcctgagagtgctgagcagacccaacgcccaggagctgcccagcatgtaccagagactgggcctggactacgaggagagagtgctgcccagcatcgtgaacgaggtgctgaagagcgtggtggccaagttcaacgccagccagctgatcacccagagagcccaggtgagcctgctgatcagaagagagctgaccgagagagccaaggacttcagcctgatcctggacgacgtggccatcaccgagctgagcttcagcagagagtacaccgccgccgtggaggccaagcaggtggccctgagcaagaaccccggctacatcaagctgagaaagatcagagccgcccagaacatcagcaagaccatcgccaccagccagaacagaatctacctgaccgccgacaacctggtgctgaacctgcaggacgagagcttcaccagaggcagcgacagcctgatcaagggcaagaagtag

SEQ ID NO: 94723 - DNA, 786 bp, Artificial Sequence
  derived and/or modified sequence
atggcccagaatttaaaggatcttgccggtaggctgccagccggcccgcggggtatggggactgctctgaaactgctgctgggggccggtgccgttgcttacggagtaagagaaagtgtgtttacagtcgagggcggtcatcgagccattttctttaatcgcatcggaggagtgcagcaagataccattttagccgagggcctgcatttccgcattccctggttccagtatccaattatctatgatatcagggcacggccgaggaaaatttccagtccaaccggcagtaaggatctccagatggtaaatatttcccttcgcgtgctctcccgaccaaacgcccaagagctgcccagcatgtatcagaggctgggactggattatgaagagcgcgttttgccctctatcgtgaacgaggtgctcaagtccgtggttgccaaatttaatgcaagccagttgattactcagcgagctcaggtatctctgcttatccgtcgggaattgaccgagcgcgccaaggatttcagtctgatcctggacgacgttgccataaccgaacttagtttttctcgagagtacactgccgccgtcgaagcaaagcaagtggcattgtccaagaacccaggttacatcaagctgagaaagatcagagctgcacagaatatctcaaagaccatagctacatctcagaaccgaatttatctgactgctgacaatctagttcttaatctgcaagacgaaagtttcacccgaggcagcgattccctcattaaaggtaaaaaatag

SEQ ID NO: 94724 - DNA, 786 bp, Artificial Sequence
  derived and/or modified sequence
atggcccagaacctgaaggacctggccggccgcctgcctgctggcccccggggcatgggcacagccctgaagctgctgctgggcgctggagctgtggcctacggcgtgcgggagagcgtcttcaccgtggagggcggccaccgggccatcttcttcaacagaattggaggagtgcagcaggacaccatcctggccgagggcctgcacttccgcatcccctggttccagtaccccatcatctatgacatccgggcccggcccaggaagatcagcagccccaccggcagcaaggacctgcagatggtgaacatcagcctgcgggtgctgagccggcccaatgcccaggagctgcccagcatgtaccagaggctgggcctggactatgaggagcgggtgctgcccagcatcgtgaatgaggtgctgaagtctgtggtggccaagttcaatgccagccagctgatcacccagagggcccaggtgtccctgctgatcagaagagagctgacagagcgggccaaggacttcagcctcatcctggatgatgtggccatcacagagctgtccttcagccgggagtacacagctgctgtggaggccaagcaggtggccctgagcaagaaccctggctacatcaagctgaggaagatccgggccgcccagaacatcagcaagaccatcgccaccagccagaaccgcatctacctgacagctgacaacctggtgctgaacctgcaggatgagagcttcacccggggcagtgacagcctcatcaagggcaagaagtag

SEQ ID NO: 94725 - DNA, 786 bp, Artificial Sequence
  derived and/or modified sequence
atggcccagaacctgaaggacctggccggccggctgcccgccggcccccgggggatgggcactgcgctgaagctgctcttaggagcaggggccgtcgcatacggcgtccgtgagtcagtgtttaccgtggaggggggtcatagagcgatctttttcaataggatcggcggggtccagcaggatacaatcctcgcggaagggctgcacttcagaatcccttggtttcagtatcctattatctatgacattcgcgctcgccccagaaagatttctagcccaaccggcagcaaggatttgcagatggtcaatatttccttgcgagttctgagccgaccgaatgcacaggagctgccttccatgtaccaacgtctaggcctcgattacgaagaacgagtcctgcccagtatagtgaacgaggtgctgaagagcgtggtcgctaagttcaacgcctcccaactgatcacccaacgcgcccaggtttctctgcttattcggcgagagctgaccgagagggcgaaagatttctcgctgatcttggacgacgtcgccatcactgaactgtccttttcccgtgagtacacagccgccgtcgaggccaagcaagttgctctctcaaagaatcctggttatatcaagcttagaaagatacgtgccgcacagaatatcagcaaaacaatagccacatcccagaaccgcatctatctcaccgccgacaatcttgtattgaatttgcaggacgagtcgttcactcgtggttccgactccttgattaagggcaaaaagtag

SEQ ID NO: 94726 - DNA, 786 bp, Artificial Sequence
  derived and/or modified sequence
atggctcagaacctcaaggacctcgcaggcaggctacctgctgggcctcgcggaatgggtaccgctctgaaactgctcctgggtgcaggggctgttgcgtatggagtgagggaaagcgtgttcaccgtcgagggcggtcaccgggcaattttcttcaataggatcggcggagtccagcaggacacaatcttggctgagggtctccatttccggatcccatggtttcagtatcctattatctacgacatacgagctcgaccaagaaaaatctcctctccaactggaagtaaggacctgcagatggtgaacatcagtctgcgcgtactgtctcgacccaacgctcaggagctcccaagtatgtatcagaggctcggcttggactacgaggagagagtgttgccttccatcgtgaacgaggtgctgaaatccgtcgttgccaaatttaacgcaagtcagttaataactcaacgggcacaggtgtccttgttgattaggagagaactgacagaaagggccaaggatttttcactgatactggatgatgtcgctatcactgagttgtctttcagtagggaatatacagccgcagtggaagcaaagcaggtcgccctgtcgaaaaatcccggatatattaaactgagaaagatacgggctgcgcaaaacatttctaagactatcgcgaccagtcagaatagaatttatctgacagccgacaatctagtactgaatctgcaggacgagtcttttactaggggaagcgatagcttgatcaaggggaaaaagtag

SEQ ID NO: 94727 - DNA, 902 bp, Artificial Sequence
  derived and/or modified sequence
gccagccttacgggcccgaaccctcgtgtgaagggtgcagtacctaagccggagcggggtagaggcgggccggcacccccttctgacctccagtgccgccggcctcaagatcagacatggcccagaacttgaaggacttggcgggacggctgcccgccgggccccggggcatgggcacggccctgaagctgttgctgggggccggcgccgtggcctacggtgtgcgcgaatctgtgttcaccgtggaaggcgggcacagagccatcttcttcaatcggatcggtggagtgcagcaggacactatcctggccgagggccttcacttcaggatcccttggttccagtaccccattatctatgacattcgggccagacctcgaaaaatctcctcccctacaggctccaaagacctacagatggtgaatatctccctgcgagtgttgtctcgacccaatgctcaggagcttcctagcatgtaccagcgcctagggctggactacgaggaacgagtgttgccgtccattgtcaacgaggtgctcaagagtgtggtggccaagttcaatgcctcacagctgatcacccagcgggcccaggtatccctgttgatccgccgggagctgacagagagggccaaggacttcagcctcatcctggatgatgtggccatcacagagctgagctttagccgagagtacacagctgctgtagaagccaaacaagtggcactgagcaagaaccctggctacatcaaacttcgcaagattcgagcagcccagaatatctccaagacgatcgccacatcacagaatcgtatctatctcacagctgacaaccttgtgctgaacctacaggatgaaagtttcaccaggggaagtgacagcctcatcaagggtaagaaatga

SEQ ID NO: 94728 - DNA, 786 bp, Artificial Sequence
  derived and/or modified sequence
atggcccagaacctcaaagatctagccggaagactgcccgctggtccccggggaatgggaaccgctctcaaactgttgctgggcgcaggagcagtggcgtacggagtgcgggagtccgtgttcacggtcgagggagggcatagagcaatttttttcaaccgcataggcggcgtacagcaggacacgatcctggcagaagggttgcacttcaggataccatggttccaatatcccatcatctatgacatccgagcacggccacgcaaaatcagttctccaaccggctcaaaggacctgcagatggtgaacataagtctgcgtgttctgagccgcccaaatgcccaggagttaccgtccatgtaccagagacttgggctcgattacgaagagagggtcttaccttctattgtgaatgaggtgctgaagagcgtggtggccaagttcaacgcgagccaattaatcactcaacgtgcccaggtgtctctgctgataagacgcgaactgactgagagagctaaagatttttcacttatcctcgacgacgttgctataactgaactgtccttctcgcgggagtatactgccgccgtggaggcaaaacaagtggctctgtcaaagaacccgggctatataaagctgaggaagattcgcgcagcccaaaacatatcaaagacaattgccacaagccagaaccgtatttacctcaccgctgacaatctcgttttgaacctgcaggacgagagtttcacccggggctccgatagcctgattaagggcaagaaatag

SEQ ID NO: 94729 - DNA, 642 bp, Artificial Sequence
  derived and/or modified sequence
atggcgcagaacttaaaagatctcgccggaaggctaccagctggcccaagaggcatgggaaccgctctgaaacttctgcttggagccggtgctgtagcttacggtgtacgggagagtgtatttacagtggagggtggtcacagggctatcttcttcaaccgtattggcggagttcagcaggacacaatcctggccgagggcctgcattttcgcattccctggtttcaataccctatcatatatgatatccgggctagaccccgtaagatcagcagccctactgggtcaaaggatcttcagatggtgaatataagccttagggtgctgtcaagacctaacgcacaggagctgccatcaatgtaccagagattgggactcgattacgaagagcgtgtgttgccctccatcgttaacgaggtgctgaaatcagtggtggcgaagttcaacgcctcgcagctgatcacacaacgcgctcaggttagtctgctgatacgccgcgaattgaccgagcgagccaaggacttctctcttatcctagacgatgtggccatcacagaactatcattctcacgagaatataccgccgccgtcgaggccaagcaggttggggagagtcaagagccctggggggagggattttag

SEQ ID NO: 94730 - DNA, 642 bp, Artificial Sequence
  derived and/or modified sequence
atggcccagaacctgaaggacctggccggccgcctgcctgctggcccccggggcatgggcacagccctgaagctgctgctgggcgctggagctgtggcctacggcgtgcgggagagcgtcttcaccgtggagggcggccaccgggccatcttcttcaacagaattggaggagtgcagcaggacaccatcctggccgagggcctgcacttccgcatcccctggttccagtaccccatcatctatgacatccgggcccggcccaggaagatcagcagccccaccggcagcaaggacctgcagatggtgaacatcagcctgcgggtgctgagccggcccaatgcccaggagctgcccagcatgtaccagaggctgggcctggactatgaggagcgggtgctgcccagcatcgtgaatgaggtgctgaagtctgtggtggccaagttcaatgccagccagctgatcacccagagggcccaggtgtccctgctgatcagaagagagctgacagagcgggccaaggacttcagcctcatcctggatgatgtggccatcacagagctgtccttcagccgggagtacacagctgctgtggaggccaagcaggtgggggagagccaggagccctggggcgagggcttctag

SEQ ID NO: 94731 - DNA, 786 bp, Artificial Sequence
  derived and/or modified sequence
atggcccagaacctgaaggacctggccggccggctgcccgccggccctaggggaatgggtactgctcttaagctgctcctaggagctggcgccgtcgcctacggcgtcagggaaagcgtctttactgtggagggcggccaccgggccattttcttcaatcggatcggtggagttcagcaggatactatcctggccgaaggactccactttcgcattccatggtttcaatatcccataatttacgatatccgcgcccgaccacgcaagatttcttcccccactggttccaaagatcttcagatggtgaatatctcactaagggtactttctcggccgaacgctcaggagcttccctcaatgtaccagaggctgggtttggactatgaggaaagagtcctgccatcgatagtcaatgaggtgttaaaatccgtggtggctaagtttaacgcctcacagcttattactcagagggctcaagtttcccttcttatccggcgtgagctcacagagcgagccaaggattttagtcttattctcgacgatgtggcaatcacggagctctctttttctagggagtatacagccgcggtggaagcaaaacaggtggccctttctaaaaatccgggttacattaagctgaggaagatccgcgctgctcagaacatttccaagaccattgccactagccagaaccgcatatacttgacagccgacaatctggtcctgaacctgcaagatgagtcctttacacgagggtccgacagtcttattaagggtaaaaagtag

SEQ ID NO: 94732 - DNA, 642 bp, Artificial Sequence
  derived and/or modified sequence
atggcccagaacctgaaggacctggccggccggctgcccgccggcccgagggggatgggtaccgccttgaagctgctactgggcgctggggctgtcgcttatggcgttcgcgagagtgttttcacggtggaaggtgggcacagggccatcttctttaacaggatcggtggcgtacagcaggataccattttagccgaagggttgcactttcgcattccatggttccagtacccgattatctatgacattcgggcccgccctaggaagatcagctccccaacgggttcaaaagacttgcagatggtcaacatctcactaagggtcctctctagaccaaatgcgcaggaactgccttccatgtatcagcggcttggcttggactatgaggagcgagtcttgccctctatagtgaacgaggtcctcaagagtgtggtggctaagttcaacgccagtcagctgatcacgcaaagggctcaagtcagtttactgatcagaagggaactcacggaacgcgcaaaagattttagccttatactggatgatgtggctatcacagagctgagcttcagtcgggaatatactgctgccgtggaggcaaagcaggttggtgagtcccaggagccatggggtgagggtttctag

SEQ ID NO: 94733 - DNA, 786 bp, Artificial Sequence
  derived and/or modified sequence
atggcacagaaccttaaagatttagcagggaggctgcccgctggaccaaggggcatgggcacagcactgaagctgctgctcggagccggtgccgttgcgtacggagtgagggagtctgtatttactgtagagggtggccacagggcgatattctttaatcggattgggggagttcagcaggataccatcctggcagaaggacttcattttcggataccgtggtttcaataccccattatttacgacatacgggctcggcctagaaagatcagctccccaacaggaagcaaggacctgcaaatggtcaacatctcgcttcgtgtattgtctcgccctaacgcacaggaattgccgtctatgtatcagcgacttggcttggattacgaggaaagagtcctgccatctatcgtgaatgaggtgctgaaatccgtggtcgccaaattcaacgcgtcccagctcatcacacagagggcccaggtgagcctgctcatccggagggagctcaccgaaagggcaaaagacttctctctaatcctggatgacgtcgctatcactgagttgtcctttagcagagaatacacagctgcagtggaggcaaaacaggtcgctctttctaagaatccaggttatattaagctgcgaaagatccgggctgcacagaatatttcgaagacaatagcgaccagccaaaatcggatctatctcaccgctgataacctagtgctgaatctccaagatgaatctttcacccggggatccgactcactcataaagggcaaaaagtag

SEQ ID NO: 94734 - DNA, 642 bp, Artificial Sequence
  derived and/or modified sequence
atggcacaaaacctgaaggacctggccggtcgacttcccgctggaccacggggtatggggactgcattaaagctcctactcggagccggagcggttgcctacggcgtgcgggagagcgtctttactgtagagggaggacacagggctatttttttcaaccgcatcggcggagtgcagcaggacacgatactggcggagggtctccacttcaggataccgtggtttcaataccctattatttacgacatcagagcgcgtccccgaaaaattagtagccccacaggtagcaaagacctacagatggtgaacatttctctgagagtcctgtctcggcctaacgcccaggagctgcccagcatgtaccagaggcttgggctcgactatgaagagcgggtcttaccctctatagtgaacgaagttctcaagtccgtggttgccaagtttaatgctagccagttaatcacccagcgggctcaggtgtctctcctcatcagacgtgagctcacagagcgggcaaaggacttcagcttgattttggatgatgttgcaatcaccgaactgtcctttagtagggaatacaccgccgctgtcgaagccaagcaggtgggagagagccaggagccttggggagaaggcttctag

SEQ ID NO: 94735 - DNA, 642 bp, Artificial Sequence
  derived and/or modified sequence
atggcccagaacctgaaggacctggccggcagactgcccgccggccccagaggcatgggcaccgccctgaagctgctgctgggcgccggcgccgtggcctacggcgtgagagagagcgtgttcaccgtggagggcggccacagagccatcttcttcaacagaatcggcggcgtgcagcaggacaccatcctggccgagggcctgcacttcagaatcccctggttccagtaccccatcatctacgacatcagagccagacccagaaagatcagcagccccaccggcagcaaggacctgcagatggtgaacatcagcctgagagtgctgagcagacccaacgcccaggagctgcccagcatgtaccagagactgggcctggactacgaggagagagtgctgcccagcatcgtgaacgaggtgctgaagagcgtggtggccaagttcaacgccagccagctgatcacccagagagcccaggtgagcctgctgatcagaagagagctgaccgagagagccaaggacttcagcctgatcctggacgacgtggccatcaccgagctgagcttcagcagagagtacaccgccgccgtggaggccaagcaggtgggcgagagccaggagccctggggcgagggcttctag

SEQ ID NO: 94736 - protein, 176 aa, Artificial Sequence
  derived and/or modified sequence
MRIFAVFIFMTYWHLLNAPYNKINQRILVVDPVTSEHELTCQAEGYPKAEVIWTSSDHQVLSGKTTTTNSKREEKLFNVTSTLRINTTTNEIFYCTFRRLDPEENHTAELVIPELPLAHPPNERTHLVILGAILLCLGVALTFIFRLRKGRMMDVKKCGIQDTNSKKQSDTHLEET

SEQ ID NO: 94737 - DNA, 531 bp, Artificial Sequence
  derived and/or modified sequence
atgagaatcttcgccgtgttcatcttcatgacctactggcacctgctgaacgccccctacaacaagatcaaccagagaatcctggtggtggaccccgtgaccagcgagcacgagctgacctgccaggccgagggctaccccaaggccgaggtgatctggaccagcagcgaccaccaggtgctgagcggcaagaccaccaccaccaacagcaagagagaggagaagctgttcaacgtgaccagcaccctgagaatcaacaccaccaccaacgagatcttctactgcaccttcagaagactggaccccgaggagaaccacaccgccgagctggtgatccccgagctgcccctggcccacccccccaacgagagaacccacctggtgatcctgggcgccatcctgctgtgcctgggcgtggccctgaccttcatcttcagactgagaaagggcagaatgatggacgtgaagaagtgcggcatccaggacaccaacagcaagaagcagagcgacacccacctggaggagacctag

SEQ ID NO: 94738 - DNA, 531 bp, Artificial Sequence
  derived and/or modified sequence
atgcggatctttgcagtgtttattttcatgacttattggcaccttttgaacgctccttacaataagattaatcagcggatactcgtcgtggatcccgtaacaagtgaacacgagctgacatgtcaggctgaagggtaccctaaggctgaggttatctggacatccagcgaccaccaggtgctatcaggaaaaacaactaccacaaatagcaagcgcgaggagaagcttttcaatgtgacatctacactgcgaattaatacgacaacgaatgagattttttactgtacattcagaagacttgatccggaggagaatcacacagccgagctcgttattccggagctgccactggcacatccgcccaacgagcgcacacacctagttattctcggcgctatacttctttgtcttggtgtagcattaacctttatcttccgcctacgcaaaggccgcatgatggatgtcaagaagtgcgggatccaagatacgaattcgaaaaaacagtccgacacccacctcgaagaaacttag

SEQ ID NO: 94739 - DNA, 531 bp, Artificial Sequence
  derived and/or modified sequence
atgaggatctttgctgtgttcatcttcatgacctactggcacctgctgaatgccccctacaacaagatcaaccagaggatcctggtggtggaccctgtgaccagcgagcacgagctgacctgccaggccgagggctaccccaaggccgaggtgatctggaccagcagtgaccaccaggtgctgagcggcaagaccaccaccaccaacagcaagcgggaggagaagctgttcaacgtgaccagcaccctgcgcatcaacaccaccaccaatgagatcttctactgcaccttccggcggctggaccctgaggagaaccacacagctgagctggtgattcctgagctgcccctggcccaccccccaaatgaaagaacccacctggtgatcctgggcgccatcctgctgtgcctgggcgtggccctgaccttcatcttccggctgaggaaaggaaggatgatggatgtgaagaagtgtggcatccaggacaccaacagcaagaagcagagcgacacccacctggaggagacctag

SEQ ID NO: 94740 - DNA, 531 bp, Artificial Sequence
  derived and/or modified sequence
atgcggatcttcgccgtgttcatcttcatgacctactggcacctgttaaacgctccctacaataagattaaccaaagaattctggtggttgacccggtgactagcgaacacgagctgacctgccaagctgaaggctatcccaaggcggaagtgatttggacaagcagtgaccaccaggtactctccggaaaaaccacgacaacaaatagcaagcgtgaggagaaactgtttaacgttacatctaccttgcgcatcaacaccacaactaatgagatattttactgcacatttcgcagactggacccagaagaaaatcacaccgcggaattagttatccccgagctgcctctggctcatccccccaacgagcgcacccatcttgtgatccttggtgccattcttctctgcctgggggtggccttaacttttatcttcaggttacgaaaaggacggatgatggacgtcaagaaatgcggtattcaagacacaaattccaagaaacagtccgacactcacttggaagagacctag

SEQ ID NO: 94741 - DNA, 531 bp, Artificial Sequence
  derived and/or modified sequence
atgcggatttttgccgtgtttatatttatgacatattggcatctactgaatgccccatataacaagattaaccagcggatcttagtcgtagaccccgtgaccagtgaacacgagctcacttgccaggcggaagggtatccgaaagccgaggtcatctggacaagcagcgatcatcaggtgctgtcgggaaagaccaccaccaccaactccaagcgggaggaaaagctttttaacgtgactagtactttgcgtattaacaccaccacaaatgagattttttactgtacgttccggaggctggaccccgaagaaaaccacacagctgagctcgtcattccagaacttccactcgctcaccccccaaatgagcgcacccacctggttatccttggagcgattctgctctgccttggggtggctctgacatttatattcagacttcgaaaggggagaatgatggacgtcaaaaagtgcgggatccaggatacaaattccaaaaaacagtccgacactcatctggaagagacatag

SEQ ID NO: 94742 - DNA, 3343 bp, Artificial Sequence
  derived and/or modified sequence
ggcgcaacgctgagcagctggcgcgtcccgcgcggccccagttctgcgcagcttcccgaggctccgcaccagccgcgcttctgtccgcctgcagggcattccagaaagatgaggatatttgctgtctttatattcatgacctactggcatttgctgaacgccccatacaacaaaatcaaccaaagaattttggttgtggatccagtcacctctgaacatgaactgacatgtcaggctgagggctaccccaaggccgaagtcatctggacaagcagtgaccatcaagtcctgagtggtaagaccaccaccaccaattccaagagagaggagaagcttttcaatgtgaccagcacactgagaatcaacacaacaactaatgagattttctactgcacttttaggagattagatcctgaggaaaaccatacagctgaattggtcatcccagaactacctctggcacatcctccaaatgaaaggactcacttggtaattctgggagccatcttattatgccttggtgtagcactgacattcatcttccgtttaagaaaagggagaatgatggatgtgaaaaaatgtggcatccaagatacaaactcaaagaagcaaagtgatacacatttggaggagacgtaatccagcattggaacttctgatcttcaagcagggattctcaacctgtggtttaggggttcatcggggctgagcgtgacaagaggaaggaatgggcccgtgggatgcaggcaatgtgggacttaaaaggcccaagcactgaaaatggaacctggcgaaagcagaggaggagaatgaagaaagatggagtcaaacagggagcctggagggagaccttgatactttcaaatgcctgaggggctcatcgacgcctgtgacagggagaaaggatacttctgaacaaggagcctccaagcaaatcatccattgctcatcctaggaagacgggttgagaatccctaatttgagggtcagttcctgcagaagtgccctttgcctccactcaatgcctcaatttgttttctgcatgactgagagtctcagtgttggaacgggacagtatttatgtatgagtttttcctatttattttgagtctgtgaggtcttcttgtcatgtgagtgtggttgtgaatgatttcttttgaagatatattgtagtagatgttacaattttgtcgccaaactaaacttgctgcttaatgatttgctcacatctagtaaaacatggagtatttgtaaggtgcttggtctcctctataactacaagtatacattggaagcataaagatcaaaccgttggttgcataggatgtcacctttatttaacccattaatactctggttgacctaatcttattctcagacctcaagtgtctgtgcagtatctgttccatttaaatatcagctttacaattatgtggtagcctacacacataatctcatttcatcgctgtaaccaccctgttgtgataaccactattattttacccatcgtacagctgaggaagcaaacagattaagtaacttgcccaaaccagtaaatagcagacctcagactgccacccactgtccttttataatacaatttacagctatattttactttaagcaattcttttattcaaaaaccatttattaagtgcccttgcaatatcaatcgctgtgccaggcattgaatctacagatgtgagcaagacaaagtacctgtcctcaaggagctcatagtataatgaggagattaacaagaaaatgtattattacaatttagtccagtgtcatagcataaggatgatgcgaggggaaaacccgagcagtgttgccaagaggaggaaataggccaatgtggtctgggacggttggatatacttaaacatcttaataatcagagtaattttcatttacaaagagaggtcggtacttaaaataaccctgaaaaataacactggaattccttttctagcattatatttattcctgatttgcctttgccatataatctaatgcttgtttatatagtgtctggtattgtttaacagttctgtcttttctatttaaatgccactaaattttaaattcatacctttccatgattcaaaattcaaaagatcccatgggagatggttggaaaatctccacttcatcctccaagccattcaagtttcctttccagaagcaactgctactgcctttcattcatatgttcttctaaagatagtctacatttggaaatgtatgttaaaagcacgtatttttaaaatttttttcctaaatagtaacacattgtatgtctgctgtgtactttgctatttttatttattttagtgtttcttatatagcagatggaatgaatttgaagttcccagggctgaggatccatgccttctttgtttctaagttatctttcccatagcttttcattatctttcatatgatccagtatatgttaaatatgtcctacatatacatttagacaaccaccatttgttaagtatttgctctaggacagagtttggatttgtttatgtttgctcaaaaggagacccatgggctctccagggtgcactgagtcaatctagtcctaaaaagcaatcttattattaactctgtatgacagaatcatgtctggaacttttgttttctgctttctgtcaagtataaacttcactttgatgctgtacttgcaaaatcacattttctttctggaaattccggcagtgtaccttgactgctagctaccctgtgccagaaaagcctcattcgttgtgcttgaacccttgaatgccaccagctgtcatcactacacagccctcctaagaggcttcctggaggtttcgagattcagatgccctgggagatcccagagtttcctttccctcttggccatattctggtgtcaatgacaaggagtaccttggctttgccacatgtcaaggctgaagaaacagtgtctccaacagagctccttgtgttatctgtttgtacatgtgcatttgtacagtaattggtgtgacagtgttctttgtgtgaattacaggcaagaattgtggctgagcaaggcacatagtctactcagtctattcctaagtcctaactcctccttgtggtgttggatttgtaaggcactttatcccttttgtctcatgtttcatcgtaaatggcataggcagagatgatacctaattctgcatttgattgtcactttttgtacctgcattaatttaataaaatattcttatttattttgttacttggtacaccagcatgtccattttcttgtttattttgtgtttaataaaatgttcagtttaacatcccagtggagaaagtt

SEQ ID NO: 94743 - protein, 76 aa, Artificial Sequence
  derived and/or modified sequence
MARGQQKIQSQQKNAKKQAGQKKKQGHDQKAAAKAALIYTCTVCRTQMPDPKTFKQHFESKHPKTPLPPELADVQA

SEQ ID NO: 94744 - protein, 42 aa, Artificial Sequence
  derived and/or modified sequence
MARGQQKIQSQQKNAKKQAGQKKKQGHDQKAAAKAALIYTCT

SEQ ID NO: 94745 - DNA, 2755 bp, Artificial Sequence
  derived and/or modified sequence
cagaaaggcacatgggcggggctgcgaggagcaggcggggcgggggcgccgaggagagcggcgcggcgtgcgcgggcacgaggcgtagtggtctcccctaaggctgaggcggcggcgggcgcgcggcggcggcgggcgtgcgaggctgttgtgctcccggctctcgtgtttcccctcctgagcgggtggaggaggcccaagcggtgctgggcgcgctcccccttcctttccctccggcgtcctctcccggccctctcgcgctgcactgtctctccgacgcaagactgtcccggcccggatatggctcgtggacagcagaaaattcagtctcagcagaaaaatgccaaaaagcaagctggacaaaagaagaaacaaggacatgaccaaaaggctgctgccaaagctgccttaatatatacctgcactgtctgtaggacacaaatgccagaccctaagaccttcaagcagcactttgagagcaagcatcctaagactccacttcctccagaattagctgatgttcaggcataaggttgtttacaggtgaattcatgacacctttgactcttctactgtctcagaccttaggtaacatacctgcagctgcttttctaacaaactgttgatcagcaaaaataaaggggctacagaaacactcatttttatgctgttccctcttgggcttcatgcaaagacaattctgtgtaaatgtacagttgactctgatttggaaatatgaaaatcagtccatccttgttataaaaaatttttttacaattgtaattatattgatgttcatattgtgtaaaataactcatttaataaaatagtactttgatttacgacatcacaggataaatggttttagaaattctgttctaactttccacattatttgccttataaaaatctaatgaattcatcagctagaattgcaagtgcaattcttatatccctttctctgctcagtggcaggttcctcagttaaactagagcagactgattcattaaaattgtgcatacgattttatgggcagctgatgatctaggtgaaaaatgacttatctgctgccttagtatattgcggttatgtgtcattgtacccctctgatcatttcctgtgtttgagttggaatatttaaaattgcagtatgacctggctctaactgccagtcaggtgtaccctgtagataactgatagcttcctaaaagcggttggattgtcagtgagcccttgtgaaaggttaggttctaatgtatatgccgtaatgaaataatcattaagcctattgtttaatgcaaaatatggaacaaatgtgaactggtaaaggtcgatcttgatactatattctttgaaaattcttgaagttctttaatttgaaattgaaacattaatttttgaggtttttggaagttactatttggccatttttacaaatggattttgcattaacaggaagattggaatgacttgtggctggattaattcccagaaccctctccctcctttcttttctaagtgagttgttgattttaggagtttgctttgtgctgttacctaaaatcagagactggtgtacagtatgacttccatctgaacttgaaaagtattaaaatgggtcaatattcacattcttttagatctcaggatgggaaaatgggtttgttcagatggatatggtaaatcttacccaattaaggaaggctaattttagagttcttctaatttgcttgtgtcaactcttaacttgtaaaactgctgttaactcggtttaaatttttaaattaatataatagaaagaacactaaaatacttactggtaactgcttagagccatttatctgatcctgtggattacagaatgcattccctcttctgctgtagcttatcattgctttgttttgtagctctgcatattttgcccaccttgtcttccctgtaagtttaagacgtttccaaggaaaagcttcagggctgatagtttcttagcaattcctattcttatgcccttactttaaaatagtccttttattttgtgtattttatttcctaagtttcagatgtaatatctgttgtttcctaacatgtcgattaccagaacgttagaattttacctaatttcttgtggatattgcagaagttctggttaaatcacaacttaaaagtttttaaaagtgctttgagcatatgtatatgtttagtgacaaatcatataaaaccattcacaagttttggttttttttttttcgtttgttttagtgactaattcaggatgaaagtttttttgttcttgtatttaacccttttttataagcagctgaagacaccatatttaacactatatctcagtgatagggaaatagctgcattgatcttacatgagcataatcatccttatacttcatgaggggattattagtacaatccccattttactgtgtttgagttaaaaaccaaacatccctgtaatttaatttgaagattctttaacagattgcagcaaagttcattataaaactgttatggtgtcttcaaagacttgataaaataacactgagagagaattggtccatttgtatgctgtatttctattacttgccaaaaggaatggggttaagattaaacttgtttccattctcttcacatggatatacatccccatgtttaactgacacactgggggctcagttgtgtgctgtaatgtcttattaaagaagatattaaagaaaactaaactagtctaaaaaaaaaaaa

SEQ ID NO: 94746 - DNA, 231 bp, Artificial Sequence
  derived and/or modified sequence
atggccagaggccagcagaagatccagagccagcagaagaacgccaagaagcaggccggccagaagaagaagcagggccacgaccagaaggccgccgccaaggccgccctgatctacacctgcaccgtgtgcagaacccagatgcccgaccccaagaccttcaagcagcacttcgagagcaagcaccccaagacccccctgccccccgagctggccgacgtgcaggcctag

SEQ ID NO: 94747 - DNA, 231 bp, Artificial Sequence
  derived and/or modified sequence
atggctcgcggccaacagaagatccagtctcagcagaaaaatgcgaagaagcaggctggccagaagaagaaacagggccatgatcagaaagccgctgccaaagcagcgctcatttatacctgcaccgtttgccgtacacagatgcctgacccaaagacctttaagcagcactttgagagtaaacaccccaagacgcccctgcctcccgagttggccgacgttcaggcctag

SEQ ID NO: 94748 - DNA, 231 bp, Artificial Sequence
  derived and/or modified sequence
atggctcgcggacagcaaaagattcaaagtcagcagaaaaatgcaaagaagcaagccggacagaagaagaaacaggggcacgaccagaaagcagccgctaaggctgctctgatctatacatgtacagtctgtcggacccaaatgcccgatccgaagaccttcaagcaacacttcgagtctaagcacccaaagacaccattgccacccgaacttgcggatgtccaggcttag

SEQ ID NO: 94749 - DNA, 231 bp, Artificial Sequence
  derived and/or modified sequence
atggccagaggtcagcagaagattcagtctcaacagaagaacgcgaagaagcaggcaggccagaaaaagaaacagggccatgaccagaaagctgcagccaaagccgccctgatctacacctgtacagtgtgtagaacgcagatgccagaccctaagacatttaagcaacatttcgaatcgaaacaccctaaaacccccctgccccctgaactcgcagacgtgcaggcatag

SEQ ID NO: 94750 - DNA, 231 bp, Artificial Sequence
  derived and/or modified sequence
atggcgcgcggacagcagaagatccagtcacagcagaagaatgcaaagaagcaggccggccagaagaagaaacagggccatgatcagaaagcagcagcaaaggctgctctaatctatacatgcacagtgtgtcggactcagatgcctgatcccaagaccttcaaacagcacttcgagtctaagcacccaaagactccattgccccccgaacttgccgatgtacaagcgtag

SEQ ID NO: 94751 - DNA, 231 bp, Artificial Sequence
  derived and/or modified sequence
atggcccgggggcaacaaaagatccagtcccagcagaagaacgccaagaaacaagcaggccaaaagaaaaagcaaggtcacgaccagaaggcggccgctaaagccgccttgatctatacctgcactgtttgccggacccagatgccagatcccaagacgtttaaacagcacttcgagagcaagcacccaaagacccctctcccccccgagctcgccgatgtccaggcctag

SEQ ID NO: 94752 - DNA, 231 bp, Artificial Sequence
  derived and/or modified sequence
atggcgcgcggccaacagaaaatccagtcccagcagaagaatgcgaagaaacaggcagggcagaaaaagaaacagggtcacgaccaaaaagcagctgcaaaagccgccttaatctacacctgcactgtgtgtagaacccaaatgcctgaccccaagaccttcaagcagcacttcgaaagtaagcatccaaagacacccctgcccccagagctcgcagatgtgcaggcatag

SEQ ID NO: 94753 - DNA, 231 bp, Artificial Sequence
  derived and/or modified sequence
atggcgcggggacagcagaaaattcagtcccagcagaagaacgccaagaagcaggccgggcagaaaaagaagcagggccatgaccaaaaggccgctgcaaaagcagctcttatctatacctgtaccgtgtgcagaacccagatgcctgatcctaagacttttaaacagcacttcgagagcaagcacccaaagaccccattgccgcccgaactagctgatgtccaggcatag

SEQ ID NO: 94754 - DNA, 231 bp, Artificial Sequence
  derived and/or modified sequence
atggcccggggccagcagaagatccagagccagcagaagaatgccaagaagcaggccggccagaagaagaagcagggccatgaccagaaggccgccgccaaggccgccctgatctacacctgcaccgtgtgcaggacccagatgccagaccccaagaccttcaagcagcactttgagagcaagcaccccaagacccccctgcccccagagctggctgatgtgcaggcctag

SEQ ID NO: 94755 - DNA, 231 bp, Artificial Sequence
  derived and/or modified sequence
atggcccggggccagcagaagatccagagccagcagaagaacgccaaaaaacaggcaggccaaaaaaagaagcaggggcacgatcagaaagccgctgccaaggccgctctgatttatacctgcaccgtgtgtaggactcagatgccggaccctaaaacgttcaaacaacacttcgagagtaaacatccaaaaactcccctgccacctgagctggcggacgttcaagcatag

SEQ ID NO: 94756 - DNA, 231 bp, Artificial Sequence
  derived and/or modified sequence
atggcccggggccagcagaagatccagagccagcagaagaacgccaagaaacaggccgggcagaaaaagaagcagggtcacgaccagaaagcagccgctaaggcagccctcatatacacctgcacggtgtgcagaacacagatgccagacccgaagacatttaagcagcatttcgagtctaagcacccaaaaacaccactgcctcccgagctcgccgatgttcaagcctag

SEQ ID NO: 94757 - DNA, 231 bp, Artificial Sequence
  derived and/or modified sequence
atggcccggggccagcagaagatccagagccagcagaagaacgccaagaaacaagccggccagaaaaaaaaacaggggcatgatcagaaggctgctgctaaggccgctctcatatacacatgtacggtctgccgcactcaaatgccagatccaaagaccttcaaacagcattttgagtccaagcaccctaaaactccacttccacctgaattagccgatgtccaggcctag

SEQ ID NO: 94758 - DNA, 231 bp, Artificial Sequence
  derived and/or modified sequence
atggcccggggccagcagaagatccagagccagcagaagaacgccaagaagcaggcgggccagaaaaagaagcagggtcacgaccagaaggctgcagccaaagctgccctcatttacacatgtacagtatgcaggacccagatgccagaccctaagacctttaaacaacactttgagtctaagcacccaaaaacccctctcccccccgaactcgccgacgtgcaggcatag

SEQ ID NO: 94759 - DNA, 231 bp, Artificial Sequence
  derived and/or modified sequence
atggcccggggccagcagaagatccagagccagcagaagaacgccaaaaaacaggctggacagaaaaaaaagcagggccacgatcaaaaagctgccgccaaggccgctctcatctatacctgcactgtctgtaggacacaaatgcctgatcctaaaacgttcaagcagcatttcgaaagcaaacaccccaaaacccctctgcctcccgagctggctgatgtgcaggcctag

SEQ ID NO: 94760 - DNA, 231 bp, Artificial Sequence
  derived and/or modified sequence
atggcccggggccagcagaagatccagagccagcagaagaacgccaagaagcaggccgggcagaagaaaaaacagggccatgatcagaaggctgcggccaaggctgctctaatttacacctgcaccgtctgcagaacacaaatgccagatccaaaaacctttaaacagcactttgaaagtaaacaccctaaaactccgctgccccctgagcttgctgatgtgcaggcctag

SEQ ID NO: 94761 - DNA, 231 bp, Artificial Sequence
  derived and/or modified sequence
atggcccggggccagcagaagatccagagccagcagaagaacgccaagaagcaggctggacaaaagaagaagcaagggcacgaccagaaagccgcagctaaagctgctctcatctacacatgcacggtttgccgtacgcaaatgccggatccaaagacatttaagcagcatttcgaatctaagcacccaaagacacctctacctcctgaactggctgacgtgcaggcatag

SEQ ID NO: 94762 - DNA, 231 bp, Artificial Sequence
  derived and/or modified sequence
atggcccgtggacaacagaaaattcagtcgcagcagaagaatgcgaaaaaacaggccggacagaaaaaaaagcagggacacgatcagaaagccgcagcaaaggcagcgttaatttatacatgtaccgtgtgtcgaacacagatgccagatccaaagaccttcaaacagcacttcgagagcaagcaccccaaaactccactgccacctgaactagccgacgtgcaggcttag

SEQ ID NO: 94763 - DNA, 231 bp, Artificial Sequence
  derived and/or modified sequence
atggcgaggggccagcagaagatacagtcgcagcaaaagaacgccaaaaagcaggctggccagaaaaagaaacaggggcacgatcagaaggctgccgctaaggcggctctgatctacacttgtaccgtgtgcaggactcaaatgcctgaccctaagacattcaaacagcatttcgagtcaaaacaccccaagacgcctcttcccccagaactggccgacgtgcaagcctag

SEQ ID NO: 94764 - DNA, 231 bp, Artificial Sequence
  derived and/or modified sequence
atggcgcgaggccagcagaaaatccagtcacagcaaaagaacgccaagaagcaagccggtcaaaagaaaaaacaagggcacgatcaaaaggccgctgctaaggccgctctgatatacacatgcactgtctgcagaacacagatgcccgaccctaaaacgtttaaacaacatttcgagagcaagcacccgaagacccctttgccccctgagttagccgatgtgcaggcctag

SEQ ID NO: 94765 - DNA, 231 bp, Artificial Sequence
  derived and/or modified sequence
atggcaagagggcagcagaagatacagtcacagcaaaagaacgcaaagaaacaggcagggcagaaaaaaaagcagggacacgatcagaaggctgcggctaaagctgctctgatatacacctgtacagtctgcagaacccagatgcctgaccctaagacatttaaacaacattttgaatctaagcaccccaagacccctttacctcctgagctggcagacgtgcaggcctag

SEQ ID NO: 94766 - DNA, 231 bp, Artificial Sequence
  derived and/or modified sequence
atggctcgcggtcagcagaagatccaatcccaacagaagaacgccaagaagcaggccggtcagaagaaaaaacaaggacacgaccagaaagctgccgcaaaagcggcactgatctacacctgtaccgtctgtaggacacagatgccagatcccaaaaccttcaagcaacatttcgaaagcaagcatcccaagacaccacttcctcccgaattggctgacgtgcaggcttag

SEQ ID NO: 94767 - DNA, 231 bp, Artificial Sequence
  derived and/or modified sequence
atggccagaggacagcagaaaatccagagtcaacagaaaaacgccaaaaaacaagctggccagaagaaaaagcaagggcacgaccagaaagccgctgcgaaggctgccctgatctacacctgcactgtgtgtcggacgcagatgcccgatccaaaaactttcaagcagcactttgagtccaaacaccccaagactccactccctccggagctcgccgacgtgcaagcctag

SEQ ID NO: 94768 - DNA, 231 bp, Artificial Sequence
  derived and/or modified sequence
atggctcggggacaacagaagatccagtctcagcagaaaaatgcaaagaaacaagctggccagaaaaaaaagcagggccacgatcaaaaagctgcggctaaagcggcactgatttatacctgcacagtctgtaggactcagatgccagacccaaagacctttaaacagcacttcgagtccaaacaccccaagacccctttgccaccagaacttgcagacgtacaggcttag

SEQ ID NO: 94769 - DNA, 2615 bp, Artificial Sequence
  derived and/or modified sequence
gggcgcgcggcggcggcgggcgtgcgaggctgttgtgctcccggctctcgtgtttcccctcctgagcgggtggaggaggcccaagcggtgctgggcgcgctcccccttcctttccctccggcgtcctctcccggccctctcgcgctgcactgtctctccgacgcaagactgtcccggcccggatatggctcgtggacagcagaaaattcagtctcagcagaaaaatgccaaaaagcaagctggacaaaagaagaaacaaggacatgaccaaaaggctgctgccaaagctgccttaatatatacctgcactgtctgtaggacacaaatgccagaccctaagaccttcaagcagcactttgagagcaagcatcctaagactccacttcctccagaattagctgatgttcaggcataaggttgtttacaggtgaattcatgacacctttgactcttctactgtctcagaccttaggtaacatacctgcagctgcttttctaacaaactgttgatcagcaaaaataaaggggctacagaaacactcatttttatgctgttccctcttgggcttcatgcaaagacaattctgtgtaaatgtacagttgactctgatttggaaatatgaaaatcagtccatccttgttataaaaaatttttttacaattgtaattatattgatgttcatattgtgtaaaataactcatttaataaaatagtactttgatttacgacatcacaggataaatggttttagaaattctgttctaactttccacattatttgccttataaaaatctaatgaattcatcagctagaattgcaagtgcaattcttatatccctttctctgctcagtggcaggttcctcagttaaactagagcagactgattcattaaaattgtgcatacgattttatgggcagctgatgatctaggtgaaaaatgacttatctgctgccttagtatattgcggttatgtgtcattgtacccctctgatcatttcctgtgtttgagttggaatatttaaaattgcagtatgacctggctctaactgccagtcaggtgtaccctgtagataactgatagcttcctaaaagcggttggattgtcagtgagcccttgtgaaaggttaggttctaatgtatatgccgtaatgaaataatcattaagcctattgtttaatgcaaaatatggaacaaatgtgaactggtaaaggtcgatcttgatactatattctttgaaaattcttgaagttctttaatttgaaattgaaacattaatttttgaggtttttggaagttactatttggccatttttacaaatggattttgcattaacaggaagattggaatgacttgtggctggattaattcccagaaccctctccctcctttcttttctaagtgagttgttgattttaggagtttgctttgtgctgttacctaaaatcagagactggtgtacagtatgacttccatctgaacttgaaaagtattaaaatgggtcaatattcacattcttttagatctcaggatgggaaaatgggtttgttcagatggatatggtaaatcttacccaattaaggaaggctaattttagagttcttctaatttgcttgtgtcaactcttaacttgtaaaactgctgttaactcggtttaaatttttaaattaatataatagaaagaacactaaaatacttactggtaactgcttagagccatttatctgatcctgtggattacagaatgcattccctcttctgctgtagcttatcattgctttgttttgtagctctgcatattttgcccaccttgtcttccctgtaagtttaagacgtttccaaggaaaagcttcagggctgatagtttcttagcaattcctattcttatgcccttactttaaaatagtccttttattttgtgtattttatttcctaagtttcagatgtaatatctgttgtttcctaacatgtcgattaccagaacgttagaattttacctaatttcttgtggatattgcagaagttctggttaaatcacaacttaaaagtttttaaaagtgctttgagcatatgtatatgtttagtgacaaatcatataaaaccattcacaagttttggttttttttttttcgtttgttttagtgactaattcaggatgaaagtttttttgttcttgtatttaacccttttttataagcagctgaagacaccatatttaacactatatctcagtgatagggaaatagctgcattgatcttacatgagcataatcatccttatacttcatgaggggattattagtacaatccccattttactgtgtttgagttaaaaaccaaacatccctgtaatttaatttgaagattctttaacagattgcagcaaagttcattataaaactgttatggtgtcttcaaagacttgataaaataacactgagagagaattggtccatttgtatgctgtatttctattacttgccaaaaggaatggggttaagattaaacttgtttccattctcttcacatggatattcatccccatgtttaactgacacactgggggctcagttgtgtgctgtaatgtcttattaaagaagatattaaagaaaa

SEQ ID NO: 94770 - DNA, 604 bp, Artificial Sequence
  derived and/or modified sequence
ctttgcagccccctcggaaaaccacactgagagttgcattaaaaaccagcatatatggctcgtggacagcagaaaattcagtctcagcagaaaaatgccaaaaagcaagctggacaaaagaagaaacaaggacatgaccaaaaggctgctgccaaagctgccttaatatatacctgcactgtctgtaggacacaaatgccagaccctaagaccttcaagcagcactttgagagcaagcatcctaagactccacttcctccagaattagctgatgttcaggcataaggttgtttacaggtgaattcatgacacctttgactcttctactgtctcagaccttaggtaacatacctgcagctgcttttctaacaaactgttgatcagcaaaaataaaggggctacagaaacactcatttttatgctgttccctcttgggcttcatgcaaagacaattctgtgtaaatgtacagttgactctgatttggaaatatgaaaatcagtccatccttgttataaaaaatttttttacaattgtaattatattgatgttcatattgtgtaaaataactcatttaataaaatagtactttgatttacgacatca

SEQ ID NO: 94771 - DNA, 501 bp, Artificial Sequence
  derived and/or modified sequence
agcctgggaggagcgggaaaagggtcgcagcgcctgaggcccggccgccgcccgagtggatgagcgagcgagcgacttgtgaaacacgccgcggcccggtcaccaaccaggaccgggatcacgtggctcccagggctgggtgaagaagccgcccggaccgagcgcgccggagaggaggggcgcctggggacagaaggcgacgtcccctgaaatatggctcgtggacagcagaaaattcagtctcagcagaaaaatgccaaaaagcaagctggacaaaagaagaaacaaggacatgaccaaaaggctgctgccaaagctgccttaatatatacctgcactgtctgtaggacacaaatgccagaccctaagaccttcaagcagcactttgagagcaagcatcctaagactccacttcctccagaattagctgatgttcaggcataaggttgtttacaggtgaattcatgacacctttgactcttctactgtctcagaccttag

SEQ ID NO: 94772 - DNA, 959 bp, Artificial Sequence
  derived and/or modified sequence
cagaaaggcacatgggcggggctgcgaggagcaggcggggcgggggcgccgaggagagcggcgcggcgtgcgcgggcacgaggcgtagtggtctcccctaaggctgaggcggcggcgggcgcgcggcggcggcgggcgtgcgaggctgttgtgctcccggctctcgtgtttcccctcctgagcgggtggaggaggcccaagcggtgctgggcgcgctcccccttcctttccctccggcgtcctctcccggccctctcgcgctgcactgtctctccgacgcaagactgtcccggcccggagtctcactgtcgcccaggctgcagtgcagtggtgccatcacgcgtcactgcaacctctgcctcccggattcaagcaattctccacctcagcctcccaagtagctggaattacagatatggctcgtggacagcagaaaattcagtctcagcagaaaaatgccaaaaagcaagctggacaaaagaagaaacaaggacatgaccaaaaggctgctgccaaagctgccttaatatatacctgcactgtctgtaggacacaaatgccagaccctaagaccttcaagcagcactttgagagcaagcatcctaagactccacttcctccagaattagctgatgttcaggcataaggttgtttacaggtgaattcatgacacctttgactcttctactgtctcagaccttaggtaacatacctgcagctgcttttctaacaaactgttgatcagcaaaaataaaggggctacagaaacactcatttttatgctgttccctcttgggcttcatgcaaagacaattctgtgtaaatgtacagttgactctgatttggaaatatgaaaatcagtccatccttgttataaaaaatttttttacaattgtaattatattgatgttcatattgtgtaaaataactcatttaataaaatagtactttgatttacg

SEQ ID NO: 94773 - DNA, 3502 bp, Artificial Sequence
  derived and/or modified sequence
gcgggaaggggatgagttcgggcgcctgccaggccctgcaggtggccgggtcgcaggccagccgcggaagcggagcggtaaccttacccccggcgacagccgccggtcagctgccagagtgtggcgctcccggtggacgcaggggccgggtttcgggcagtctcggcctccaggaggcgcgtcttggtccagggtccgtgaggactggctagatgggggctgcgtggcctttggtggcagggaggaggagggggtctccgaggcgggagaggcgggtttgggaaggaaggtgcgccaggctgaagctggggtcggagaagtgttgggtggagacctcactgtgggtgcgttcctcctctcctctccccaaaacgatggtgttaaaagctagggtcaggatgtggagcgctgcctgggcctcttcctttccgatggttatggagaatgagcctacttcctggacccaaaatccttttcttctgttactcatttatgttggttttaaaaggagctttggggcagagcttacttgttgcctcctacgagagcgcctcattttagaactcgtttcttccactacttccctctttgcagccccctcggaaaaccacactgagagttgcattaaaaaccagcatgtaggtatttgtaagtgactttttccctccagtttgtcgcatttaatcaaggagcggttgtagctgcctacgattttgtagaaaattgtgttggcttgagagcaagtcctaagttgagctgtccaaaagcaggtggttggttcgtttgaatttctgctttcagaaaggaaatcgatggggcgtgttgtcagaagttaggggcctacctcatgcatttagcttattttattccatttcctttacctggtgttaagttttctgtcttcagaataagaacaagtgactactgtctttattaagtctcttcggtctttttggttgctgtttggtgacaatggaaaatgggttgaatctattgtgtaatgttatattttagggaaagtcctaagtgcaaaagttaaaaataattttgtgtgtctaatgacattgctttgtacgagtcacaacatggaaatatcaaaatagctagtaacttctagaaagcaaaggaacttctgaaattagtggcttaccatttttgaagattttttttaacataaaacaagatttcccacaaaatcagtgtattaagatacataaaatacattgtgtcgaagagttaagatgtgtgagaagactggctattttgttacaaggtcctgatagtaagacattgagacaaaaaaccttgcaaaacattggtatacataaaggctgatcacgtgactactgtcgtccaaataatacataagtatccaaacctgtttccatgggaataggtttgtaagcttgcggtaacatcggacttaaatacacttttaaaaaaaatgtgccatttggcttagaattaataattttttttaaagcaaaaatggaagcttagtcttcaaggactgataacagctggtaatatttaccattgtttggtgggaatggggttctcatattaggctagcacgctaaacattttcaattacgaaaatgtattaggctcgtgtgctaccctaatataaaaaccccatatttcctcagttgaaatagtcagctgactatcctgaaaagcattgaccctcttttatattttatctgactttcagttcatttttttaatgctagtgggaacttctccaatcagtgtatttttttagtttccttttttggggaacaggaggagctcagtaatttttatgaaatgctttgacctcatatccattaactaattatggtcctagtcagaagaagctagcacccttccctggtgaagttgatacaaatccattgtatgttcctgtcctgcaatgatttacattcagttacagtactagtcaaaactatatatatatgaattctacttaggatccaattttgatatatttaaaaagcaattgagactcatgatagactttatgagcaggtttaacttgtgtggtcgaataaaagcctttaatttaaatggaaaagtaaaagtaacttttttcagtgacttgatttttttttttgttttaatccatttgggttcacgtcagatcatcggtaacaaaaagtggtatctttcagctttgtaaaagaaccctcttaaccaagttcattccctcaaatgggaactaacgtctagagagcaaagaaacttctggaattagtggcttgctgataatctcattttataatttgttcagcaatccagcaagaccaactttttaaaaaaattaataacagtagttttatgaaaactaagtaagaaaacagtttccacctatttctgaggtctcctttagaaggagtaacagacagcttttatttctcttaaagttataaaaatcacaatcgcaagtcacaatgaatactgggaagggaaattacttttgcagagtgatcaagtaaatgatagcgggggctaaacttttttagtaaacttgtgaagattacatacagtaaagtgcataaatcttgagtgtacaattcaatgaatttttataagtaaacacacttgattcaagaacattttcaggaccccataagtccccttcatgtcctgtcttcccagtcattacccataacccccaaggtgacccctttcactatagattagctttgcctgttttgaactttaaataatgtatattccccacaactggcttctttcctttaacattgagatacaaccaagttgttacttgtaacaattttttgtttgtgtgtttgtttatttatttttgagaccagagtctcactgtcgcccaggctgcagtgcagtggtgccatcacgcgtcactgcaacctctgcctcccggattcaagcaattctccacctcagcctcccaagtagctggaattacagatatggctcgtggacagcagaaaattcagtctcagcagaaaaatgccaaaaagcaagctggacaaaagaagaaacaaggacatgaccaaaaggctgctgccaaagctgccttaatatatacctgcactgtctgtaggacacaaatgccagaccctaagaccttcaagcagcactttgagagcaagcatcctaagactccacttcctccagaattagctgatgttcaggcataaggttgtttacaggtgaattcatgacacctttgactcttctactgtctcagaccttaggtaacatacctgcagctgcttttctaacaaactgttgatcagcaaaaataaaggggctacagaaacactcatttttatgctgttccctcttgggcttcatgcaaagacaattctgtgtaaatgtacagttgactctgatttggaaatatgaaaatcagtccatccttgttataaaaaatttttttacaattgtaattatattgatgttcatattgtgtaaaataactcatttaataaaatagtactttgatttacga

SEQ ID NO: 94774 - DNA, 782 bp, Artificial Sequence
  derived and/or modified sequence
ctccgacgcaagactgtcccggcccggatatggctcgtggacagcagaaaattcagtctcagcagaaaaatgccaaaaagcaagctggacaaaagaagaaacaaggacatgaccaaaaggctgctgccaaagctgccttaatatatacctgcactgtctgtaggacacaaatgccagaccctaagaccttcaagcagcactttgagagcaagcatcctaagactccacttcctccagaattagctgatgttcaggcataaggttgtttacagggtttcccaaactctcgattgcctcttgcaagcagatgacctgggagcaaatgttatggcagaacgatggactcctagcaagggccgaagcgtgccctgtgaagactggaaagaatatatgcttgtcagagatttggtaacctcatcaagaccttaaactgcagtttaagagggtggaaaaattactcaagtgaaactataagccctgttattcgtaagaaaacgtatgacacagagcaattggagaatctcttaatttgcatgcaaaaataacaggaggaaaaagtaaggaatgttatatctgatttcaagtgtgaatatgaagcaaaggaacttgagatgttaacacctgaaagaaatcaagatttcctagatacccctgaaacacagggctcaggactagaatatggaagccctgagagaacagatagcagaggagcattatatgtccaaaatgtctgaaagtgcacagaaagccagaagcctgcacgaagaggtgggatggagaat

SEQ ID NO: 94775 - DNA, 732 bp, Artificial Sequence
  derived and/or modified sequence
gaggagagcggcgcggcgtgcgcgggcacgaggcgtagtggtctcccctaaggctgaggcggcggcgggcgcgcggcggcggcgggcgtgcgaggctgttgtgctcccggctctcgtgtttcccctcctgagcgggtggaggaggcccaagcggtgctgggcgcgctcccccttcctttccctccggcgtcctctcccggccctctcgcgctgcactgtctctccgacgcaagactgtcccggcccggccccctcggaaaaccacactgagagttgcattaaaaaccagcatagtctcactgtcgcccaggctgcagtgcagtggtgccatcacgcgtcactgcaacctctgcctcccggattcaagcaattctccacctcagcctcccaagtagctggaattacagatatggctcgtggacagcagaaaattcagtctcagcagaaaaatgccaaaaagcaagctggacaaaagaagaaacaaggacatgaccaaaaggctgctgccaaagctgccttaatatatacctgcactgtctgtaggacacaaatgccagaccctaagaccttcaagcagcactttgagagcaagcatcctaagactccacttcctccagaattagctgatgttcaggcataaggttgtttacaggtgaattcatgacacctttgactcttctactgtctcagaccttaggtaacatacctgcagctgcttttctaacaaactgt

SEQ ID NO: 94776 - protein, 300 aa, Artificial Sequence
  derived and/or modified sequence
MVLLWLTLLLIALPCLLQTKEGGKPWAGAENLTCWIHDVDFLSCSWAVGPGAPADVQYDLYLNVANRRQQYECLHYKTDAQGTRIGCRFDDISRLSSGSQSSHILVRGRSAAFGIPCTDKFVVFSQIEILTPPNMTAKCNKTHSFMHWKMRSHFNRKFRYELQIQKRMQPVITEQVRDRTSFQLLNPGTYTVQIRARERVYEFLSAWSTPQRFECDQEEGANTRAWRTSLLIALGTLLALVCVFVICRRYLVMQRLFPRIPHMKDPIGDSFQNDKLVVWEAGKAGLEECLVTEVQVVQKT

SEQ ID NO: 94777 - protein, 164 aa, Artificial Sequence
  derived and/or modified sequence
MVLLWLTLLLIALPCLLQTKEGGKPWAGAENLTCWIHDVDFLSCSWAVGPGAPADVQYDLYLNVANRRQQYECLHYKTDAQGTRIGCRFDDISRLSSGSQSSHILVRGRSAAFGIPCTDKFVVFSQIEILTPPNMTAKCNKTHSFMHWKMRSHFNRKFRYELQI

SEQ ID NO: 94778 - DNA, 903 bp, Artificial Sequence
  derived and/or modified sequence
atggtgctgctgtggctgacactgctgctaattgccctgccttgccttctgcagacaaaggaaggtggtaagccctgggcaggtgctgagaatctgacatgctggattcacgatgtggacttcctttcttgcagttgggccgttggccctggtgcccccgcagacgtgcaatacgacctctacttgaacgtggccaataggcgtcagcaatatgaatgtttgcactacaaaacagacgcccaaggcactagaatcggttgtcgctttgatgatattagtagacttagctctggcagccagtcctcgcacatcttagtacgcggccggtcggctgccttcggtatcccgtgtactgataagtttgtggtgtttagtcaaatcgagatcctgacaccgccaaatatgaccgctaagtgcaataaaacccattcttttatgcattggaaaatgcgctctcactttaaccggaaatttagatatgagctccaaatccagaagaggatgcaaccagtaattaccgagcaagtccgagatcgcacctctttccaacttcttaaccctgggacgtacaccgttcagattagagcgagagaaagagtgtatgagttcctgagcgcatggtctaccccccagaggttcgagtgtgaccaggaggagggggctaataccagggcatggcgaacctccctgttaattgctctgggaaccttattagccctggtgtgtgtttttgtgatttgtcgtcgctacctagtcatgcagcggctgtttccccggataccgcatatgaaagatcctattggcgatagcttccagaatgacaaactcgttgtatgggaggcaggtaaggcggggctggaggagtgcctggttactgaggtccaggtcgtccagaaaacctag

SEQ ID NO: 94779 - DNA, 495 bp, Artificial Sequence
  derived and/or modified sequence
atggtactgctttggctgaccctcctactcattgcactgccctgccttctgcagaccaaagagggcgggaaaccatgggctggggcggagaacctcacgtgttggattcatgacgttgattttttatcctgttcttgggcagttgggcctggcgctccagccgacgttcaatatgacctgtacttaaacgtggccaatcgaagacagcaatatgagtgcctccactacaagactgatgcccaagggactcgtattggttgtaggtttgacgacatatccagacttagttctggcagccagagcagccatatcctcgttcgcgggaggagtgcagcattcggtattccgtgtaccgataaatttgttgtgttttcacagatcgagatcttgactccccctaatatgaccgcgaaatgcaacaaaacccactcattcatgcactggaaaatgcggtctcacttcaaccgtaaatttcggtacgagctccagatctag

SEQ ID NO: 94780 - DNA, 903 bp, Artificial Sequence
  derived and/or modified sequence
atggtcctcctttggctcacgctgctcctgatcgccctgccctgtctcctgcaaacgaaggaaggtgggaagccttgggcaggtgcggagaatctgacctgctggattcatgacgtggatttcttgagctgcagctgggcggtaggcccgggggcccccgcggacgtccagtacgacctgtacttgaacgttgccaacaggcgtcaacagtacgagtgtcttcactacaaaacggatgctcagggaacacgtatcgggtgtcgtttcgatgacatctctcgactctccagcggttctcaaagttcccacatcctggtgcggggcaggagcgcagccttcggtatcccctgcacagataagtttgtcgtcttttcacagattgagatattaactccacccaacatgactgcaaagtgtaataagacacattcctttatgcactggaaaatgagaagtcatttcaatcgcaaatttcgctatgagcttcagatacaaaagagaatgcagcctgtaatcacagaacaggtcagagacagaacctccttccagctactcaatcctggaacgtacacagtacaaataagagcccgggaaagagtgtatgaattcttgagcgcctggagcaccccccagcgcttcgagtgcgaccaggaggagggcgcaaacacacgtgcctggcggacgtcgctgctgatcgcgctggggacgctgctggccctggtctgtgtcttcgtgatctgcagaaggtatctggtgatgcagagactctttccccgcatccctcacatgaaagaccccatcggtgacagcttccaaaacgacaagctggtggtctgggaggcgggcaaagccggcctggaggagtgtctggtgactgaagtacaggtcgtgcagaaaacttga

SEQ ID NO: 94781 - DNA, 662 bp, Artificial Sequence
  derived and/or modified sequence
cttcggggaaagctgctttcagcgcacacgggaagatatcagaaacatcctaggatcaggacaccccagatcttctcaactggaaccacgaaggctgtttcttccacacagtactttgatctccatttaagcaggcacctctgtcctgcgttccggagctgcgttcccgatggtcctcctttggctcacgctgctcctgatcgccctgccctgtctcctgcaaacgaaggaaggtgggaagccttgggcaggtgcggagaatctgacctgctggattcatgacgtggatttcttgagctgcagctgggcggtaggcccgggggcccccgcggacgtccagtacgacctgtacttgaacgttgccaacaggcgtcaacagtacgagtgtcttcactacaaaacggatgctcagggaacacgtatcgggtgtcgtttcgatgacatctctcgactctccagcggttctcaaagttcccacatcctggtgcggggcaggagcgcagccttcggtatcccctgcacagataagtttgtcgtcttttcacagattgagatattaactccacccaacatgactgcaaagtgtaataagacacattcctttatgcactggaaaatgagaagtcatttcaatcgcaaatttcgctatgagcttcagatac

SEQ ID NO: 94782 - DNA, 903 bp, Artificial Sequence
  derived and/or modified sequence
atggtgctgctgtggctgaccctgctgctgattgccctgccctgcctgctgcagaccaaggagggcggcaagccctgggccggggctgagaacctgacctgctggattcatgatgtggacttcctgagctgctcctgggccgtgggccctggggccccagcagatgtgcagtatgacctgtacctgaatgtggccaacagacggcagcagtatgagtgcctgcactacaagacagatgcccagggcaccagaattggctgccgctttgatgacatcagccggctgagcagcggcagccagagcagccacatcctggtgcggggccgctctgctgccttcggcatcccctgcacagacaagtttgtggtgttcagccagatcgagatcctgaccccacccaacatgacagccaagtgcaacaagacccacagcttcatgcactggaagatgaggagccacttcaacaggaagttccgctatgagctgcagatccagaagaggatgcagcccgtcatcacagagcaggtgcgggacaggaccagcttccagctgctgaaccctggcacctacacagtgcagatccgggcccgggagcgggtgtatgagttcctgagcgcctggagcaccccccagagatttgaatgtgaccaggaggagggcgccaacacccgggcctggaggaccagcctgctgattgccctgggcaccctgctggccctggtgtgtgtgtttgtgatctgccgccgctacctggtgatgcagaggctcttcccccgcatcccccacatgaaggaccccatcggggacagcttccagaatgacaagctggtggtgtgggaggccggcaaggccggcctggaggagtgcctggtgacagaggtgcaggtggtgcagaagacctag

SEQ ID NO: 94783 - DNA, 495 bp, Artificial Sequence
  derived and/or modified sequence
atggtgctgctgtggctgaccctgctgctgattgccctgccctgcctgctgcagaccaaggagggcggcaagccctgggccggggctgagaacctgacctgctggattcatgatgtggacttcctgagctgctcctgggccgtgggccctggggccccagcagatgtgcagtatgacctgtacctgaatgtggccaacagacggcagcagtatgagtgcctgcactacaagacagatgcccagggcaccagaattggctgccgctttgatgacatcagccggctgagcagcggcagccagagcagccacatcctggtgcggggccgctctgctgccttcggcatcccctgcacagacaagtttgtggtgttcagccagatcgagatcctgaccccacccaacatgacagccaagtgcaacaagacccacagcttcatgcactggaagatgaggagccacttcaacaggaagttccgctatgagctgcagatctag

SEQ ID NO: 94784 - DNA, 903 bp, Artificial Sequence
  derived and/or modified sequence
atggtgctgctgtggctgaccctgctgctgatcgccctgccctgcctgctgcaaactaaggagggaggtaaaccttgggctggcgcagagaacttaacatgttggatacacgatgtggattttctttcgtgttcgtgggctgtagggcctggggctccagctgacgtacagtacgacttgtacttaaatgtcgccaacaggaggcaacaatacgagtgcctacactacaagaccgacgctcaggggactagaatcgggtgcaggtttgacgatatttctcggctgtcgtctggatctcaatcaagtcacattctcgttaggggcagatcagcagcatttggtatcccctgtactgacaaattcgtagtgttttcgcagatagaaatcctcacccctcctaacatgaccgccaaatgtaataaaacccactcctttatgcactggaaaatgcgcagccactttaataggaagtttcgatatgagctgcagatacagaagcgtatgcagccggtaattacagagcaggtgagggaccgtacctcttttcagctcctaaatcccggtacatataccgtacagatccgcgcccgcgagcgggtctacgagtttctatcggcttggtccacaccacaacgctttgaatgtgatcaggaggaaggggccaatactagagcatggaggacatcactgcttatcgcattgggtacattgcttgctctagtttgtgtgttcgtgatttgccggcggtatctggtcatgcagaggctgttcccccgtatcccacatatgaaggaccccatcggcgacagcttccaaaatgataaactcgtggtgtgggaggccgggaaggccgggctggaggaatgtctcgtaacagaggtgcaagttgtacagaagacttag

SEQ ID NO: 94785 - DNA, 495 bp, Artificial Sequence
  derived and/or modified sequence
atggtgctgctgtggctgaccctgctgctgatcgccctgccctgcctgctgcagaccaaggaaggagggaagccttgggcaggggcagaaaatctcacttgttggattcacgatgtggactttctgagctgttcctgggcagtcggtcccggagcacctgcggatgtccagtatgatctatatctgaacgtcgccaacagaagacagcagtatgagtgccttcactacaaaactgacgcccagggcaccaggataggttgccggtttgacgacatcagccgcctgagctccggttcacagagctctcacatcctggttcgtggaagatccgcagcctttggtattccttgtaccgacaaattcgtggtctttagccaaattgagatcttaactcctcccaatatgaccgcaaagtgcaacaaaactcactcgttcatgcactggaaaatgcgaagtcattttaatcgcaaattccggtacgagcttcaaatttag

SEQ ID NO: 94786 - DNA, 903 bp, Artificial Sequence
  derived and/or modified sequence
atggtgctgctgtggctcactctccttctcattgccctgccctgtctcctccagacgaaggagggcggtaagccatgggctggggctgagaaccttacctgctggatccacgacgtggatttcctcagctgttcctgggctgttggcccaggggcacccgctgatgtccaatacgatctctacctgaatgtggctaaccgccgacagcaatacgaatgtctccattacaaaaccgacgcccaggggaccaggattggttgtaggtttgatgatatctcccgcctgagctccgggagccagtctagtcacattctggtgcgcggtagatcggcagcatttggaattccttgcaccgacaagtttgtggtgttttctcagatcgaaatcctcacacccccaaatatgactgccaagtgtaataagacgcatagctttatgcattggaaaatgagatcgcactttaacaggaagttccggtacgagctgcagatccagaagcggatgcagcctgttataacggaacaggtgagggataggacctcattccagctcctgaaccccggaacctacacagttcagattcgcgctagggaaagagtttacgagttcctgtcagcatggtccacccctcagcggttcgagtgcgaccaggaggaaggggctaacacgcgtgcatggcggacatcattacttatagctctaggcacactactggccctggtctgtgtatttgtgatctgccgcagataccttgtgatgcaacgcttgttcccaagaatcccccatatgaaagaccccatcggggattcattccagaacgataaactggtcgtgtgggaagcgggaaaagccggattggaggagtgcttggtcaccgaggtgcaggtggtgcagaagacctag

SEQ ID NO: 94787 - DNA, 495 bp, Artificial Sequence
  derived and/or modified sequence
atggtgttgctgtggctgactctcttgctcattgcactgccatgtctgctgcagacaaaagaaggtggcaagccctgggccggagctgagaacctcacctgctggatccacgacgtagacttcctgagctgctcatgggccgtaggcccaggagcccctgcagacgtacagtatgatctttacctaaacgtggccaatcggcgtcaacagtacgagtgtctgcattataagacagatgctcaagggacaaggattggatgccgcttcgacgatatatcccgactctctagtggtagccaatccagtcacattctcgttaggggcaggtctgccgcatttggtattccttgtaccgataaatttgtggtgttttctcagatagaaatcctcacccctcccaacatgacagcaaagtgcaacaagacccacagctttatgcactggaagatgagaagccactttaatcgtaagtttaggtacgaactgcaaatctag

SEQ ID NO: 94788 - DNA, 903 bp, Artificial Sequence
  derived and/or modified sequence
atggtgctgctgtggctgaccctgctgctgatcgccctgccctgcctgctgcagaccaaggagggcggcaagccctgggccggcgccgagaacctgacctgctggatccacgacgtggacttcctgagctgcagctgggccgtgggccccggcgcccccgccgacgtgcagtacgacctgtacctgaacgtggccaacagaagacagcagtacgagtgcctgcactacaagaccgacgcccagggcaccagaatcggctgcagattcgacgacatcagcagactgagcagcggcagccagagcagccacatcctggtgagaggcagaagcgccgccttcggcatcccctgcaccgacaagttcgtggtgttcagccagatcgagatcctgaccccccccaacatgaccgccaagtgcaacaagacccacagcttcatgcactggaagatgagaagccacttcaacagaaagttcagatacgagctgcagatccagaagagaatgcagcccgtgatcaccgagcaggtgagagacagaaccagcttccagctgctgaaccccggcacctacaccgtgcagatcagagccagagagagagtgtacgagttcctgagcgcctggagcaccccccagagattcgagtgcgaccaggaggagggcgccaacaccagagcctggagaaccagcctgctgatcgccctgggcaccctgctggccctggtgtgcgtgttcgtgatctgcagaagatacctggtgatgcagagactgttccccagaatcccccacatgaaggaccccatcggcgacagcttccagaacgacaagctggtggtgtgggaggccggcaaggccggcctggaggagtgcctggtgaccgaggtgcaggtggtgcagaagacctag

SEQ ID NO: 94789 - DNA, 495 bp, Artificial Sequence
  derived and/or modified sequence
atggtgctgctgtggctgaccctgctgctgatcgccctgccctgcctgctgcagaccaaggagggcggcaagccctgggccggcgccgagaacctgacctgctggatccacgacgtggacttcctgagctgcagctgggccgtgggccccggcgcccccgccgacgtgcagtacgacctgtacctgaacgtggccaacagaagacagcagtacgagtgcctgcactacaagaccgacgcccagggcaccagaatcggctgcagattcgacgacatcagcagactgagcagcggcagccagagcagccacatcctggtgagaggcagaagcgccgccttcggcatcccctgcaccgacaagttcgtggtgttcagccagatcgagatcctgaccccccccaacatgaccgccaagtgcaacaagacccacagcttcatgcactggaagatgagaagccacttcaacagaaagttcagatacgagctgcagatctag

SEQ ID NO: 94790 - protein, 625 aa, Artificial Sequence
  derived and/or modified sequence
PLVSSKMASGGSGGVSVPALWSEVNRYGQNGDFTRALKTVNKILQINKDDVTALHCKVVCLIQNGSFKEALNVINTHTKVLANNSLSFEKAYCEYRLNRIENALKTIESANQQTDKLKELYGQVLYRLERYDECLAVYRDLVRNSQDDYDEERKTNLSAVVAAQSNWEKVVPENLGLQEGTHELCYNTACALIGQGQLNQAMKILQKAEDLCRRSLSEDTDQNVFDSKKKVKLTNAEGVEFKLSKKQLQAIEFNKALLAMYTNQAEQCRKISASLQSQSPEHLLPVLIQAAQLCREKQHTKAIELLQEFSDQHPENAAEIKLTMAQLKISQGNISKACLILRSIEELKHKPGMVSALVTMYSHEEDIDSAIEVFTQAIQWYQNHQPKSPAHLSLIREAANFKLKYGRKKEAISDLQQLWKQNPKDIHTLAQLISAYSLVDPEKAKALSKHLPSSDSMSLKVDVEALENSAGATYIRKKGGKVTGDSQPKEQGQGDLKKKKKKKKGKLPKNYDPKVTPDPERWLPMRERSYYRGRKKGKKKDQIGKGTQGATAGASSELDASKTVSSPPTQDLAVLQQYLPLQVTSYPQDTRNLQGLQQQKRNSNRKRRKVEKVAGDENILVAGCF

SEQ ID NO: 94791 - protein, 610 aa, Artificial Sequence
  derived and/or modified sequence
MASGGSGGVSVPALWSEVNRYGQNGDFTRALKTVNKILQINKDDVTALHCKVVCLIQNGSFKEALNVINTHTKVLANNSLSFEKAYCEYRLNRIENALKTIESANQQTDKLKELYGQVLYRLERYDECLAVYRDLVRNSQDDYDEERKTNLSAVVAAQSNWEKVVPENLGLQEGTHELCYNTACALIGQGQLNQAMKILQKAEDLCRRSLSEDTDQNVFDSKKKVKLTNAEGVEFKLSKKQLQAIEFNKALLAMYTNQAEQCRKISASLQSQSPEHLLPVLIQAAQLCREKQHTKAIELLQEFSDQHPENAAEIKLTMAQLKISQGNISKACLILRSIEELKHKPGMVSALVTMYSHEEDIDSAIEVFTQAIQWYQNHQPKSPAHLSLIREAANFKLKYGRKKEAISDLQQLWKQNPKDIHTLAQLISAYSLVDPEKAKALSKHLPSSDSMSLKVDVEALENSAGATYIRKKGGKVTGDSQPKEQGQGDLKKKKKKKKGKLPKNYDPKVTPDPERWLPMRERSYYRGRKKGKKKDQIGKGTQGATAGASSELDASKTVSSPPTSPRPGSAATVSASTSNIIPPRHQKPAGAPATKKKQQQKKKKGGKGGW

SEQ ID NO: 94792 - DNA, 1878 bp, Artificial Sequence
  derived and/or modified sequence
cccctcgtcagcagcaagatggcctccggcgggtcaggcggcgtgtctgtcccagcactatggtccgaggtgaataggtacggacaaaacggcgacttcacccgggcacttaagacagtgaacaaaatcctgcagatcaacaaggacgacgtgaccgccctgcattgtaaggttgtgtgcctaattcagaatgggagctttaaggaggctctcaacgtaatcaacacccataccaaggtgctcgctaataacagtctttctttcgaaaaggcgtattgcgaatacagactgaacagaatcgagaatgcactaaaaacgatagagtccgcgaatcagcaaacggataagcttaaggaactgtacgggcaggtgctgtaccggctggaaagatacgatgaatgtctcgcagtgtacagagatttggtgcgcaacagtcaagacgactacgacgaggagcggaaaaccaaccttagcgccgtagtggcggctcagagcaactgggagaaggtggtgccagaaaacctgggcctgcaggaaggtacccatgagttgtgttacaatacagcctgtgcacttatcggccaggggcagctgaatcaagctatgaaaatcctgcagaaggctgaggacctgtgcagaagatcactgtcagaagataccgaccaaaatgttttcgattccaagaagaaggtgaagcttaccaatgccgaaggagtagaatttaaactgagtaagaaacaactccaagcaattgagtttaacaaagctctgctggcaatgtacactaatcaagcggagcaatgtcggaagataagcgcaagcctgcagtcccagtcccccgagcatctcttgccagtcctgatccaggcggctcagctctgcagggaaaaacaacacaccaaggcgatagaactgctgcaggaattctcggatcagcaccctgagaacgctgccgaaattaagttgaccatggcccagctgaaaatcagtcagggcaatatctccaaagcttgccttatcttacggtccattgaagaactgaagcataaacccggtatggtgagtgcccttgtaactatgtattcccacgaggaggacatagattccgctatcgaggtgttcactcaagctatccagtggtaccagaatcaccaacccaagtcgcccgctcatctgtccctaatcagagaagccgctaatttcaagctcaagtacggtagaaaaaaagaagccatctccgatctccagcaactgtggaagcagaatccaaaggacattcacacattggcgcagctgatatctgcttactcactggttgatcccgagaaagcaaaggctctgtctaaacacctcccctcctccgacagtatgtctctcaaagttgacgtggaggcgttggagaacagtgccggggcgacctacatacgcaaaaagggcgggaaggtaacgggtgacagtcagcctaaagagcagggccagggagacctcaagaaaaagaagaaaaagaagaaaggaaaactgccaaaaaactacgaccctaaagtgacgcctgatccagagagatggctgcctatgcgagagagatcctactatcgggggcggaagaaagggaaaaagaaggatcagataggaaagggcactcaaggggccacagctggtgcttcctctgagctagatgcctccaaaacagtaagtagcccacctacacaggatctagccgttcttcagcagtatttgcctctgcaagtgacctcctacccccaggacacgcgaaacttgcaggggctccaacagcagaagcggaactccaatcggaagcggcggaaagtcgaaaaggtggcaggcgacgagaatatattagtagctgggtgcttctag

SEQ ID NO: 94793 - DNA, 1833 bp, Artificial Sequence
  derived and/or modified sequence
atggccagcgggggttccggtggagtgtctgtgccggctctatggagcgaggtgaatcggtacggccagaacggggatttcactagagccttaaaaaccgttaataaaatcctgcagataaacaaggacgacgtgacagcactccattgtaaggtggtttgtctgattcagaatggatcttttaaggaagccctgaacgtgataaacacacatacgaaggtccttgctaataacagccttagctttgagaaggcttactgcgagtataggctgaacaggatcgaaaatgctctgaagaccattgaatcagcaaaccagcagactgacaagctgaaggaattgtatggtcaggttttgtatcgcctcgagcggtatgacgaatgtttagccgtgtaccgggaccttgtgcggaactcccaagatgactacgacgaagaacgcaaaaccaacctctctgcagtggttgccgcacaatccaactgggaaaaagtggtccctgaaaacctcggccttcaggagggtacgcacgagctgtgttacaacacagcttgcgctctcatcggtcaggggcagttaaatcaggcgatgaaaatcctccagaaggccgaggacttatgtcgccgctcgctctccgaagatacagaccagaacgtgtttgattccaaaaaaaaagtgaagttaactaatgcagaaggcgtcgagttcaagctcagcaagaagcagctgcaggctatcgagtttaacaaggctctactcgctatgtatacaaatcaggccgaacagtgtcgtaagatttcagcttcgttacaatcccagtcgcctgagcatctgttgcccgtcctgattcaggccgcgcagctttgtagggagaagcagcatacgaaggcaattgagcttctccaagaattctctgaccagcaccctgaaaacgccgcggagataaagctgactatggcacagctcaagattagtcagggtaatatcagtaaagcatgtctaatattacggtctatcgaggaactcaagcacaaaccaggaatggtttcagccctggttaccatgtacagtcatgaggaagacattgacagcgctatcgaagtgtttacccaagctattcagtggtaccagaaccatcagcctaaaagcccagctcatctctccctgattcgtgaggctgctaactttaagttaaaatacggccgcaagaaagaggcgattagcgatctgcagcagctgtggaagcagaaccctaaggacattcataccttggctcaacttatatctgcttactccctggtggatcctgaaaaggctaaagcactcagcaaacacctgccttcaagtgactcaatgtccttgaaagtcgatgtggaagccttggaaaattccgcaggtgcgacatacatacgaaaaaaaggaggcaaggtcaccggggactctcagcccaaagagcaggggcagggagatcttaaaaagaaaaaaaagaagaagaaaggaaagctgccaaaaaactacgatcctaaggtcacacctgatcccgaacggtggctgcctatgagggaaagaagttattaccgagggagaaagaaggggaagaagaaggaccagataggaaaggggacccagggagctaccgccggcgcatcttctgaattggacgcatcaaaaaccgtgtcctcccctccaacgtccccaagaccaggttcagctgccacagtgagcgctagcactagcaatataataccccctcgtcatcagaaaccagcaggtgcgcctgccacaaagaaaaaacagcaacaaaagaagaagaaagggggtaaaggcgggtggtag

SEQ ID NO: 94794 - DNA, 1878 bp, Artificial Sequence
  derived and/or modified sequence
cccctggtgagcagcaagatggccagcggcggcagcggcggcgtgtctgtgcctgccctgtggagcgaggtgaacagatatggccagaatggagacttcacccgggccctgaagacagtgaacaagatcctgcagatcaacaaggatgatgtgacagccctgcactgcaaggtggtgtgcctgatccagaatggcagcttcaaggaggccctgaatgtcatcaacacccacaccaaggtgctggccaacaacagcctgagctttgagaaggcctactgtgagtaccgcctgaacagaattgaaaatgccctgaagaccattgaaagtgccaaccagcagacagacaagctgaaggagctgtatggccaggtgctgtaccgcctggagagatatgatgaatgtctggccgtgtacagagacctggtgaggaacagccaggatgattatgatgaggagaggaagaccaacctgtctgctgtggtggccgcccagagcaactgggagaaggtggtgcctgagaacctgggcctgcaggagggcacccatgagctgtgctacaacacagcctgtgccctgattggccagggccagctgaaccaggccatgaagatcctgcagaaggccgaggacctgtgcagaagaagcctgtctgaggacacagaccagaatgtgtttgacagcaagaagaaggtgaagctgaccaatgctgagggcgtggagttcaagctgagcaagaagcagctgcaggccatcgagttcaacaaggccctgctggccatgtacaccaaccaggccgagcagtgcaggaagatcagcgccagcctgcagagccagagccctgagcacctgctgcctgtgctgatccaggccgcccagctgtgccgggagaagcagcacaccaaggccatcgagctgctgcaggagttcagtgaccagcacccagaaaatgctgctgagatcaagctgaccatggcccagctgaagatcagccagggcaacatcagcaaggcctgcctgatcctgcggagcattgaggagctgaagcacaagccaggcatggtgtctgccctggtgaccatgtacagccatgaagaagatattgattctgccatcgaggtgttcacccaggccatccagtggtaccagaaccaccagcccaagagccctgcccacctgagcctcatccgggaggccgccaacttcaagctgaagtatggcaggaagaaggaggccatcagtgacctgcagcagctgtggaagcagaaccccaaggacatccacaccctggcccagctgatcagcgcctacagcctggtggaccctgagaaggccaaggccctgagcaagcacctgcccagcagtgacagcatgagcctgaaggtggatgtggaggccctggagaacagcgctggggccacctacatcaggaagaagggcggcaaggtgactggagacagccagcccaaggagcagggccagggcgacctgaagaagaagaagaagaagaagaagggcaagctgcccaagaactatgaccccaaggtgaccccagaccctgagcgctggctgcccatgagggagaggagctactaccggggcaggaagaagggcaagaagaaggaccagatcggcaagggcacccagggcgccacagctggggccagcagcgagctggatgccagcaagacagtgagcagcccccccacccaggacctggccgtgctgcagcagtacctgcccctgcaggtgaccagctacccccaggacaccaggaacctgcagggcctgcagcagcagaagaggaacagcaacaggaagaggaggaaggtggagaaggtggccggagatgagaacatcctggtggccggctgcttctag

SEQ ID NO: 94795 - DNA, 1833 bp, Artificial Sequence
  derived and/or modified sequence
atggccagcggcggcagcggcggcgtgtctgtgcctgccctgtggagcgaggtgaacagatatggccagaatggagacttcacccgggccctgaagacagtgaacaagatcctgcagatcaacaaggatgatgtgacagccctgcactgcaaggtggtgtgcctgatccagaatggcagcttcaaggaggccctgaatgtcatcaacacccacaccaaggtgctggccaacaacagcctgagctttgagaaggcctactgtgagtaccgcctgaacagaattgaaaatgccctgaagaccattgaaagtgccaaccagcagacagacaagctgaaggagctgtatggccaggtgctgtaccgcctggagagatatgatgaatgtctggccgtgtacagagacctggtgaggaacagccaggatgattatgatgaggagaggaagaccaacctgtctgctgtggtggccgcccagagcaactgggagaaggtggtgcctgagaacctgggcctgcaggagggcacccatgagctgtgctacaacacagcctgtgccctgattggccagggccagctgaaccaggccatgaagatcctgcagaaggccgaggacctgtgcagaagaagcctgtctgaggacacagaccagaatgtgtttgacagcaagaagaaggtgaagctgaccaatgctgagggcgtggagttcaagctgagcaagaagcagctgcaggccatcgagttcaacaaggccctgctggccatgtacaccaaccaggccgagcagtgcaggaagatcagcgccagcctgcagagccagagccctgagcacctgctgcctgtgctgatccaggccgcccagctgtgccgggagaagcagcacaccaaggccatcgagctgctgcaggagttcagtgaccagcacccagaaaatgctgctgagatcaagctgaccatggcccagctgaagatcagccagggcaacatcagcaaggcctgcctgatcctgcggagcattgaggagctgaagcacaagccaggcatggtgtctgccctggtgaccatgtacagccatgaagaagatattgattctgccatcgaggtgttcacccaggccatccagtggtaccagaaccaccagcccaagagccctgcccacctgagcctcatccgggaggccgccaacttcaagctgaagtatggcaggaagaaggaggccatcagtgacctgcagcagctgtggaagcagaaccccaaggacatccacaccctggcccagctgatcagcgcctacagcctggtggaccctgagaaggccaaggccctgagcaagcacctgcccagcagtgacagcatgagcctgaaggtggatgtggaggccctggagaacagcgctggggccacctacatcaggaagaagggcggcaaggtgactggagacagccagcccaaggagcagggccagggcgacctgaagaagaagaagaagaagaagaagggcaagctgcccaagaactatgaccccaaggtgaccccagaccctgagcgctggctgcccatgagggagaggagctactaccggggcaggaagaagggcaagaagaaggaccagatcggcaagggcacccagggcgccacagctggggccagcagcgagctggatgccagcaagacagtgagcagcccccccaccagccccaggcctggcagcgctgccaccgtgtctgccagcaccagcaacatcatcccccccaggcaccagaagccagctggggccccagccaccaagaagaagcagcagcagaagaagaagaagggcggcaaaggaggctggtag

SEQ ID NO: 94796 - DNA, 1878 bp, Artificial Sequence
  derived and/or modified sequence
cccctggtgagcagcaagatggccagcggcggcagcggcggcgtgtcagttccagccctgtggagcgaagtaaacaggtacggacagaatggcgactttacaagagccctgaaaaccgttaataagatcttacagattaacaaggatgatgtgaccgctctgcactgcaaagttgtctgcctcatccagaatggcagcttcaaggaggccctgaacgtgattaatacacataccaaggtgctggccaataactccttgtccttcgaaaaggcatattgcgaatatcgtctgaacaggatagagaacgcactgaagacaattgaatctgctaatcagcagaccgacaaactgaaagagttatatggacaagtgctgtataggctcgagcgctatgacgagtgcctagccgtgtacagggatttggttcggaacagccaagacgactatgacgaggagagaaagactaacctctctgctgtggttgccgcgcagtctaactgggagaaggtggttcctgagaacctcggtctgcaggaggggacgcatgagttgtgctataataccgcttgtgctctgatcggtcagggtcagctgaaccaggccatgaagattttacagaaggccgaagacctctgtagaagatccctgtcagaggatacggaccagaacgtctttgatagcaaaaagaaggtcaaactaacgaatgcagaaggagtcgagttcaaactgtcgaagaagcagctgcaggctattgaattcaacaaagccctgctggccatgtatactaaccaggcagaacagtgccggaaaatcagcgcatctctgcagtctcagtcccctgagcaccttttgcccgtgctgattcaggccgcccagctctgtcgggaaaaacagcataccaaggctatcgagttactccaagaattttccgaccaacatccagagaatgccgccgagataaaactgacaatggctcagctgaagatcagccaaggcaacattagtaaagcctgcttaatcctccgttcaattgaagagttgaaacataaaccaggaatggtgtcggccctggttactatgtactctcacgaggaagatattgattctgccattgaagtgtttacacaagccatacagtggtatcaaaaccaccagccaaagagccccgcccatcttagcctgatcagggaggccgcgaatttcaaactgaagtacggtcggaagaaggaggcgatcagcgatctgcaacagctgtggaaacaaaatccaaaggatatccacaccctcgctcagctcatttccgcatactctctcgtggaccctgaaaaagccaaggcgctgtctaagcatctcccttcaagtgactcaatgtcgctgaaggtggatgtggaggctctggagaattccgccggcgcaacctacattaggaaaaagggtgggaaggtgaccggcgattctcagccgaaggaacagggccaaggcgatctgaagaagaagaaaaaaaagaagaaagggaagctcccaaagaattacgatcctaaggtgacaccagatcctgaacgttggctcccaatgcgcgagcgctcatattatcggggccgcaaaaaggggaagaaaaaggaccagataggaaagggaacacagggcgcaacggctggtgccagcagcgaactcgacgcatccaaaaccgtcagctcaccacctacacaggatctggcggttctgcagcagtatctgcccctccaagttacgagttatccccaggatacacggaacttgcagggcctgcagcagcaaaagagaaactctaatcgcaagagaagaaaagtggaaaaggttgctggcgacgaaaatattcttgtggccgggtgtttttag

SEQ ID NO: 94797 - DNA, 1833 bp, Artificial Sequence
  derived and/or modified sequence
atggccagcggcggcagcggcggcgtgagcgtgcccgccctgtggtctgaggtgaaccgctatggacagaacggcgacttcacacgggctctgaaaaccgtgaataagatactccaaattaacaaagatgatgttacagcgttgcattgcaaggtggtttgcctaatccagaacggtagtttcaaggaggctctgaatgtaatcaacacccacaccaaagtgctggcgaacaattctctcagttttgagaaggcctactgcgagtataggctcaacaggatcgagaatgctctgaaaacaatcgagagcgccaaccagcagaccgataagttaaaggaattgtacggccaagtgctgtaccgcctggagcgttatgacgagtgcttagctgtgtacagagacctggtgcggaactctcaagatgactacgacgaggagcgtaagactaacctgtctgcagtggtggctgcacaaagcaactgggagaaggtcgtgccagagaacctgggcttgcaggaaggcacccatgaactatgttacaatacggcctgcgccctgatcggtcaggggcagctgaatcaggccatgaaaatcctgcaaaaggccgaagatctttgtcgtcgatccctgagcgaagataccgaccagaatgtttttgactctaagaagaaggtgaagctgacaaacgcagagggagtggaattcaagctatctaagaagcagctgcaagctattgaatttaataaagctctgctggccatgtataccaatcaggccgaacagtgtagaaagatcagcgcaagtctccaaagtcagagccctgaacacttgctaccagttttgattcaggccgctcagttatgtagggaaaaacagcataccaaggccatcgagctgctgcaggagtttagtgatcagcaccctgaaaatgcagctgaaattaagcttacaatggcgcagcttaaaatctcccaggggaatatctccaaggcatgccttatcctgagatccatagaggagctaaagcataaaccaggaatggtcagcgccctggtgacaatgtacagtcacgaggaggacatcgattctgcaattgaagtgtttacacaggccatccagtggtaccagaatcatcagcccaaatcaccagcccacctgagtctgattagggaggccgccaacttcaagctgaaatacggtagaaaaaaagaggcaatctccgatctccagcagctatggaagcagaatccaaaggatatccataccctagcccaactgatatccgcctattccctggtggatccagagaaagctaaagcgttatccaagcacctgccctcatcggattccatgagtctgaaagtggatgtagaagccctcgaaaactcggccggagctacatacattcgaaaaaagggcggaaaagtgacaggcgattctcagccaaaagagcaaggccagggggatctgaaaaagaaaaaaaagaaaaagaagggcaaactccctaaaaactatgatcctaaagttacccctgaccccgagcgctggttacctatgcgggagcggtcgtattaccggggcagaaaaaaaggcaaaaaaaaggaccagattgggaagggcacacaaggtgccacggccggggccagctcggagctggatgcctcaaagaccgtgagttcacctcccacttcccctcggccgggctcagccgcgaccgtgtccgcgtccaccagtaatattattcctcctagacatcagaaaccggccggagccccggcaacaaagaagaagcagcagcagaaaaagaagaaaggaggtaagggcggctggtag

SEQ ID NO: 94798 - DNA, 1878 bp, Artificial Sequence
  derived and/or modified sequence
ccactggtctcaagcaagatggccagcggtggaagtggcggtgtctcagtgcccgctctgtggtccgaggtcaaccgctatgggcagaacggagacttcactagggccctgaagaccgtgaacaaaatcctgcagatcaacaaggacgatgtgaccgcattgcactgtaaggtcgtgtgcttaatccagaatggttcttttaaggaggcactcaatgtgatcaatacccatacaaaagttctggccaacaacagtctctcttttgagaaagcctattgtgaataccgcctcaacaggatcgaaaatgcccttaagacaattgagtccgcaaatcagcaaacagacaaactcaaggagctgtatgggcaggtactctatcgacttgaacggtatgatgagtgcttagcagtataccgggatctagttaggaatagtcaagatgactacgacgaggagcggaagaccaatctcagcgccgtcgtggcagcacaatctaactgggagaaggtggtgcccgagaatctggggctgcaggagggaactcatgagctttgctacaacaccgcctgtgcattgatcgggcagggccaactcaatcaagcgatgaagatccttcaaaaggccgaagacctgtgtcgcagatccctgtcagaagataccgaccagaatgtgttcgactccaagaaaaaagttaaactgaccaatgccgagggtgtagagtttaagctttctaagaagcaactgcaggctattgaatttaataaagccctgctggccatgtacaccaatcaggcggagcagtgtaggaagatctctgccagtcttcagtcccagtcccccgaacacctcctgccagtgctgatacaagcagctcaactgtgtcgcgagaaacagcacacgaaggcaatcgagctcctccaggagttttcagatcagcaccctgaaaacgccgcagaaatcaagctaactatggcccaactgaagatcagtcagggaaacatcagcaaggcatgcctcatcttacgttccatagaagaactgaagcataagccaggtatggtcagtgctcttgttacaatgtactcacacgaagaagatatcgatagcgctattgaagtgtttacacaggccattcagtggtatcagaaccaccagccaaagtctccggctcatctgagtttgatcagagaagcagcgaacttcaagcttaaatacggcagaaaaaaggaagccatttcagacctgcagcagctgtggaaacagaaccccaaggacatccacactcttgcccagctcatttcagcctatagtctcgtggaccctgaaaaggccaaggctttgtctaaacacctgccttcatctgacagcatgtccctgaaagtcgacgttgaagcgctggaaaactccgcaggagcaacttacattagaaagaagggagggaaggtcaccggggattcgcagcccaaggaacaaggacagggggatctgaaaaagaagaagaagaagaagaaaggtaaactgcccaagaattacgatccaaaggtgacacccgatcccgagcggtggctgccaatgcgagaaagaagctattataggggacggaaaaaggggaaaaagaaggatcagattggcaaaggcacccagggagccactgctggagcttcgagtgaattggacgctagcaagacagtttcaagccctcccactcaagacctagccgtactgcagcagtatctgcctctgcaggtcacttcttacccccaggatacaaggaaccttcaggggctgcaacagcagaaacggaacagcaataggaaaaggcgaaaagtcgagaaggtggctggtgacgaaaatatcctggtagcgggttgcttttag

SEQ ID NO: 94799 - DNA, 1833 bp, Artificial Sequence
  derived and/or modified sequence
atggcctcagggggaagcggcggagtgtctgtcccagcactgtggtctgaggtaaatcgctacggtcagaatggggacttcacacgcgctctgaagaccgtgaacaaaatcctacagatcaacaaggacgacgtcacagccctgcactgtaaggtggtgtgtctgatacagaacggtagcttcaaagaggccctgaatgtgatcaacacgcacaccaaggtcctcgctaataactccctgagtttcgagaaggcttactgcgagtacaggctgaataggatcgagaatgctttaaagactatcgaatcagctaaccagcagactgataaacttaaagaactttacggccaggtgctgtaccgactcgaacgatatgacgaatgccttgccgtgtaccgcgacctggtgagaaactcacaggatgactatgatgaagaacggaagaccaacctgagcgccgttgtcgctgcccagtccaattgggagaaagtggtaccagagaacttagggctgcaggaaggcacacacgagctctgctacaatacggcctgcgctctaattggacagggacagctgaaccaggcgatgaaaatactccagaaggcagaggacctgtgtcgccgaagcctatccgaggacaccgaccagaatgtatttgactctaaaaaaaaggtgaaacttacaaacgccgaaggtgttgaattcaagctctctaagaagcaacttcaagccatcgagttcaacaaagctcttctggccatgtacacgaatcaggcggagcagtgtcggaagattagcgcctcactgcagtcacagtctccggaacatctgctgccagtgctcattcaagcagctcagttatgtagagagaagcagcacaccaaggctatagaactgctccaggagtttagtgaccagcatccagagaacgctgccgagatcaaactcactatggcacaattgaagattagccaggggaacataagcaaggcttgcttgatcctacgctccattgaagagctaaaacacaaacccggaatggtcagtgctctggtgaccatgtattctcatgaggaagacatcgactccgcaattgaagtgtttacacaggccattcagtggtaccaaaatcaccagccaaaaagtccagctcacctcagcctgattagagaggcagcaaacttcaaactgaaatacgggagaaagaaggaggccatcagcgacttgcagcaactctggaagcagaatcccaaagacatccatactctagcacagttaatttcggcctattcacttgtggatcccgaaaaggctaaagccctctctaaacacttaccaagctccgattctatgtctctgaaggttgatgtcgaagctctggaaaactccgcgggtgccacttacatacgaaagaagggcggtaaagtaaccggggactcccagcctaaggagcaagggcaaggagacctaaagaagaagaagaagaagaaaaaagggaagctgccaaagaattatgatccgaaggtcacccccgatcccgaacgctggttacccatgcgtgaacgaagctattatcggggacgtaaaaagggtaagaaaaaagatcagataggaaagggcacgcagggagccacggcgggtgcttcaagtgagctcgacgcatctaagactgtgtctagcccccctacaagcccgcgacctggcagcgcagcgactgtctccgccagcacttccaacatcattcccccacgccaccagaagcctgcaggtgccccagccaccaagaagaagcagcaacagaaaaagaagaagggcggtaagggcggttggtag

SEQ ID NO: 94800 - DNA, 3688 bp, Artificial Sequence
  derived and/or modified sequence
gggcagaggtctccccgccccgcccctcgtctcctccaagatggcgagcggcggcagcgggggggtgtcagtacctgcgctgtggagtgaagtgaaccggtatggccagaacggcgacttcacgcgcgctctcaagaccgtcaataagatactacagatcaacaaagatgacgtaactgccctgcattgtaaagtggtatgccttatccagaatggaagtttcaaggaagctttgaatgtcatcaatactcacaccaaagtgttagccaataactctctctcctttgaaaaggcatattgcgagtacaggctgaacagaattgagaatgccttgaagacaatagaaagtgccaaccagcagacagacaaactgaaggagctttatggacaagtgttataccgtttggaacgctatgatgaatgcttagcagtgtatagagatctcgtccgaaactcccaagatgattatgatgaggagaggaaaacaaacctttcagcagttgttgcagctcaaagcaattgggaaaaagtggttccagagaacctgggcctccaagaaggcacacatgagctgtgctacaacactgcatgtgcactgataggccaaggccagctgaaccaggccatgaaaatcctacaaaaagctgaagatctttgccgccgttcattatcagaagacactgaccaaaatgtctttgactccaagaagaaagtgaaattaaccaatgcggaaggagtagagtttaagctttccaagaaacaactacaagctatagaatttaacaaagctttacttgctatgtacacaaaccaggctgaacaatgccgcaaaatatctgccagtttacagtcccaaagtcccgagcatctcttacctgtgttaatccaagctgcccagctctgccgtgaaaagcagcacacaaaagcaatagagctgcttcaggaattttcagatcagcatccagaaaatgcagctgaaattaagctgaccatggcacagttgaaaatttctcaaggtaatatttctaaagcatgtctaatattgagaagcatagaggagttaaagcataaaccaggcatggtatctgcattagttaccatgtatagccatgaagaagatattgatagtgccattgaggtcttcacacaagctatccagtggtatcaaaaccatcagccaaaatctcctgctcatttgtccttgataagagaagctgcaaacttcaaactcaaatatgggcggaagaaggaggcaattagtgacctacaacagctgtggaaacaaaatccaaaagatattcacaccctggcacagcttatttctgcttactcacttgtagatccagagaaagccaaagctcttagtaaacacttgccatcgtcagatagtatgtctctaaaagtagatgttgaggctcttgaaaattctgctggtgctacatacattcggaagaagggtggaaaagttactggagatagtcaaccaaaggaacaaggacagggagatttgaaaaagaagaaaaagaaaaagaagggaaaattgcctaagaattatgacccaaaagttaccccagatccagaaagatggctgccaatgcgagaacgttcttactaccggggaagaaagaagggtaaaaagaaggatcagattggaaaagggacccagggagcaactgcaggagcttcatctgaactggatgccagtaaaactgtgagcagcccacccacccaagacctggcagtgctgcaacagtatctgcctctacaagtaacatcatacccccaagacaccagaaacctgcaggggctccagcaacaaaaaagaaacagcaacagaaaaagaagaaaggtggaaaaggtggctggtgatgagaatattcttgttgcaggctgtttttaaactagtgtcagtgacactaggaatataataaaggtaacacagcaagaagcacagaactactccctcttcatctccatattttcataatttcttgtgtttcaaatagggaaacatcttcctcaaagtctgcctagtgagatatggcctactggttgcctcatagctttgtacagattatgaggactgaaaataattgggcatttacccatcttggtatctgttgtatcctttatctgtgtgtgctgatttgatcttttttcagtttcacataccttatctaaggtttcccaggatttaaacagaaactacttctatgatttcagctggagtctgaagatacttgtttctgttcaagtcccactttaaattatgtcttaggagactgaaagtggaatcttctgagcattcctaaatatctgcttagaaatatcatgtgataaagagggaccttcttaatacactgatgttcttcactaaatggatggccacaagaaaaataaagtaaatgtcttaaataatttaaccataaattttctgtcatgtgatactggaatatgggatacttttcatgtttatatatatatatatatgtatatatatatacatatatatatatatataaacatgaaatatatatatatggctcctttgtgccccatgtcattttcagattatggtagcatgctgatacagcaccatgaaagaactcaaggaaaatatatcaatgtaagaagttcactcttagacccagtgttctgaggtcacatgggtttggactgtctcaatcagaaagattaatgactgttatcaagaacatgaacattggcttcctccatagagaagaaatcagtatctgagttgcataccaggcagtattaaaatctaacaggtctgtttggcccattgatagatactcaaatggtgtctccttctggttatggattttgaccattgattacctttctcaatgtaatgaagtattttacagtcaatttgtggtgtaaatgttgctcttgtctttccttgcttacaaactactttcacattgaacagctgtgagacagacatattgagatgcctgcccttgttagtattcattttatgctgcccaagatatcatttaatttagacttaacaagtatttccttgtgattatattactctgtccttgttaataaagtgctgctgtgtttgactctgaacatactaccaaaacttcttcaaagagttttttatgaaagactttcctcctttacaagaaagaaatggggtgctgcctttctgtttagtaaaagcagaatttgcagtggcatctaaagagatcttttttaaataaaaattatgtattgtggcataatcctttttttgagctctacagagaacagtcttttggtaatagtggcaggtatttattccttctgaatatataccccattataggaataactgttacttatttaggattccatcattgaaaattttgacccaaggcacagcagtgaaatttatagttctcaatttagttgtcattattgacaggcattggtattattagtcattgctaagcaactaaaacttcatcagttcaaataagttttaattgtcaaatgaagtataaacacatgaactttctagaaatatttcctcttttggataggtctttaaccagttcatatatatactttgtcaaatatatggatgtgtatgtgtacatttataagaaccagtatggatacatccattcactgtggtacattttaaaataaaatattttagcagtgaatatgg

SEQ ID NO: 94801 - DNA, 2473 bp, Artificial Sequence
  derived and/or modified sequence
gcccctcgtctcctccaagatggcgagcggcggcagcgggggggtgtcagtacctgcgctgtggagtgaagtgaaccggtatggccagaacggcgacttcacgcgcgctctcaagaccgtcaataagatactacagatcaacaaagatgacgtaactgccctgcattgtaaagtggtatgccttatccagaatggaagtttcaaggaagctttgaatgtcatcaatactcacaccaaagtgttagccaataactctctctcctttgaaaaggcatattgcgagtacaggctgaacagaattgagaatgccttgaagacaatagaaagtgccaaccagcagacagacaaactgaaggagctttatggacaagtgttataccgtttggaacgctatgatgaatgcttagcagtgtatagagatctcgtccgaaactcccaagatgattatgatgaggagaggaaaacaaacctttcagcagttgttgcagctcaaagcaattgggaaaaagtggttccagagaacctgggcctccaagaaggcacacatgagctgtgctacaacactgcatgtgcactgataggccaaggccagctgaaccaggccatgaaaatcctacaaaaagctgaagatctttgccgccgttcattatcagaagacactgaccaaaatgtctttgactccaagaagaaagtgaaattaaccaatgcggaaggagtagagtttaagctttccaagaaacaactacaagctatagaatttaacaaagctttacttgctatgtacacaaaccaggctgaacaatgccgcaaaatatctgccagtttacagtcccaaagtcccgagcatctcttacctgtgttaatccaagctgcccagctctgccgtgaaaagcagcacacaaaagcaatagagctgcttcaggaattttcagatcagcatccagaaaatgcagctgaaattaagctgaccatggcacagttgaaaatttctcaaggtaatatttctaaagcatgtctaatattgagaagcatagaggagttaaagcataaaccaggcatggtatctgcattagttaccatgtatagccatgaagaagatattgatagtgccattgaggtcttcacacaagctatccagtggtatcaaaaccatcagccaaaatctcctgctcatttgtccttgataagagaagctgcaaacttcaaactcaaatatgggcggaagaaggaggcaattagtgacctacaacagctgtggaaacaaaatccaaaagatattcacaccctggcacagcttatttctgcttactcacttgtagatccagagaaagccaaagctcttagtaaacacttgccatcgtcagatagtatgtctctaaaagtagatgttgaggctcttgaaaattctgctggtgctacatacattcggaagaagggtggaaaagttactggagatagtcaaccaaaggaacaaggacagggagatttgaaaaagaagaaaaagaaaaagaagggaaaattgcctaagaattatgacccaaaagttaccccagatccagaaagatggctgccaatgcgagaacgttcttactaccggggaagaaagaagggtaaaaagaaggatcagattggaaaagggacccagggagcaactgcaggagcttcatctgaactggatgccagtaaaactgtgagcagcccacccacctccccaagacctggcagtgctgcaacagtatctgcctctacaagtaacatcatacccccaagacaccagaaacctgcaggggctccagcaacaaaaaagaaacagcaacagaaaaagaagaaaggtggaaaaggtggctggtgatgagaatattcttgttgcaggctgtttttaaactagtgtcagtgacactaggaatataataaaggtaacacagcaagaagcacagaactactccctcttcatctccatattttcataatttcttgtgtttcaaatagggaaacatcttcctcaaagtctgcctagtgagatatggcctactggttgcctcatagctttgtacagattatgaggactgaaaataattgggcatttacccatcttggtatctgttgtatcctttatctgtgtgtgctgatttgatcttttttcagtttcacataccttatctaaggtttcccaggatttaaacagaaactacttctatgatttcagctggagtctgaagatacttgtttctgttcaagtcccactttaaattatgtcttaggagactgaaagtggaatcttctgagcattcctaaatatctgcttagaaatatcatgtgataaagagggaccttcttaatacactgatgttcttcactaaatggatggccacaagaaaaataaagtaaatgtcttaaataatttaaccataaattttctgtcatgtgatactggaatatgggatacttttcatgtttatatatatatatatat

SEQ ID NO: 94802 - DNA, 1878 bp, Artificial Sequence
  derived and/or modified sequence
cccctggtgagcagcaagatggccagcggcggcagcggcggcgtgagcgtgcccgccctgtggagcgaggtgaacagatacggccagaacggcgacttcaccagagccctgaagaccgtgaacaagatcctgcagatcaacaaggacgacgtgaccgccctgcactgcaaggtggtgtgcctgatccagaacggcagcttcaaggaggccctgaacgtgatcaacacccacaccaaggtgctggccaacaacagcctgagcttcgagaaggcctactgcgagtacagactgaacagaatcgagaacgccctgaagaccatcgagagcgccaaccagcagaccgacaagctgaaggagctgtacggccaggtgctgtacagactggagagatacgacgagtgcctggccgtgtacagagacctggtgagaaacagccaggacgactacgacgaggagagaaagaccaacctgagcgccgtggtggccgcccagagcaactgggagaaggtggtgcccgagaacctgggcctgcaggagggcacccacgagctgtgctacaacaccgcctgcgccctgatcggccagggccagctgaaccaggccatgaagatcctgcagaaggccgaggacctgtgcagaagaagcctgagcgaggacaccgaccagaacgtgttcgacagcaagaagaaggtgaagctgaccaacgccgagggcgtggagttcaagctgagcaagaagcagctgcaggccatcgagttcaacaaggccctgctggccatgtacaccaaccaggccgagcagtgcagaaagatcagcgccagcctgcagagccagagccccgagcacctgctgcccgtgctgatccaggccgcccagctgtgcagagagaagcagcacaccaaggccatcgagctgctgcaggagttcagcgaccagcaccccgagaacgccgccgagatcaagctgaccatggcccagctgaagatcagccagggcaacatcagcaaggcctgcctgatcctgagaagcatcgaggagctgaagcacaagcccggcatggtgagcgccctggtgaccatgtacagccacgaggaggacatcgacagcgccatcgaggtgttcacccaggccatccagtggtaccagaaccaccagcccaagagccccgcccacctgagcctgatcagagaggccgccaacttcaagctgaagtacggcagaaagaaggaggccatcagcgacctgcagcagctgtggaagcagaaccccaaggacatccacaccctggcccagctgatcagcgcctacagcctggtggaccccgagaaggccaaggccctgagcaagcacctgcccagcagcgacagcatgagcctgaaggtggacgtggaggccctggagaacagcgccggcgccacctacatcagaaagaagggcggcaaggtgaccggcgacagccagcccaaggagcagggccagggcgacctgaagaagaagaagaagaagaagaagggcaagctgcccaagaactacgaccccaaggtgacccccgaccccgagagatggctgcccatgagagagagaagctactacagaggcagaaagaagggcaagaagaaggaccagatcggcaagggcacccagggcgccaccgccggcgccagcagcgagctggacgccagcaagaccgtgagcagcccccccacccaggacctggccgtgctgcagcagtacctgcccctgcaggtgaccagctacccccaggacaccagaaacctgcagggcctgcagcagcagaagagaaacagcaacagaaagagaagaaaggtggagaaggtggccggcgacgagaacatcctggtggccggctgcttctag

SEQ ID NO: 94803 - DNA, 1833 bp, Artificial Sequence
  derived and/or modified sequence
atggccagcggcggcagcggcggcgtgagcgtgcccgccctgtggagcgaggtgaacagatacggccagaacggcgacttcaccagagccctgaagaccgtgaacaagatcctgcagatcaacaaggacgacgtgaccgccctgcactgcaaggtggtgtgcctgatccagaacggcagcttcaaggaggccctgaacgtgatcaacacccacaccaaggtgctggccaacaacagcctgagcttcgagaaggcctactgcgagtacagactgaacagaatcgagaacgccctgaagaccatcgagagcgccaaccagcagaccgacaagctgaaggagctgtacggccaggtgctgtacagactggagagatacgacgagtgcctggccgtgtacagagacctggtgagaaacagccaggacgactacgacgaggagagaaagaccaacctgagcgccgtggtggccgcccagagcaactgggagaaggtggtgcccgagaacctgggcctgcaggagggcacccacgagctgtgctacaacaccgcctgcgccctgatcggccagggccagctgaaccaggccatgaagatcctgcagaaggccgaggacctgtgcagaagaagcctgagcgaggacaccgaccagaacgtgttcgacagcaagaagaaggtgaagctgaccaacgccgagggcgtggagttcaagctgagcaagaagcagctgcaggccatcgagttcaacaaggccctgctggccatgtacaccaaccaggccgagcagtgcagaaagatcagcgccagcctgcagagccagagccccgagcacctgctgcccgtgctgatccaggccgcccagctgtgcagagagaagcagcacaccaaggccatcgagctgctgcaggagttcagcgaccagcaccccgagaacgccgccgagatcaagctgaccatggcccagctgaagatcagccagggcaacatcagcaaggcctgcctgatcctgagaagcatcgaggagctgaagcacaagcccggcatggtgagcgccctggtgaccatgtacagccacgaggaggacatcgacagcgccatcgaggtgttcacccaggccatccagtggtaccagaaccaccagcccaagagccccgcccacctgagcctgatcagagaggccgccaacttcaagctgaagtacggcagaaagaaggaggccatcagcgacctgcagcagctgtggaagcagaaccccaaggacatccacaccctggcccagctgatcagcgcctacagcctggtggaccccgagaaggccaaggccctgagcaagcacctgcccagcagcgacagcatgagcctgaaggtggacgtggaggccctggagaacagcgccggcgccacctacatcagaaagaagggcggcaaggtgaccggcgacagccagcccaaggagcagggccagggcgacctgaagaagaagaagaagaagaagaagggcaagctgcccaagaactacgaccccaaggtgacccccgaccccgagagatggctgcccatgagagagagaagctactacagaggcagaaagaagggcaagaagaaggaccagatcggcaagggcacccagggcgccaccgccggcgccagcagcgagctggacgccagcaagaccgtgagcagcccccccaccagccccagacccggcagcgccgccaccgtgagcgccagcaccagcaacatcatcccccccagacaccagaagcccgccggcgcccccgccaccaagaagaagcagcagcagaagaagaagaagggcggcaagggcggctggtag

SEQ ID NO: 94804 - DNA, 1074 bp, Artificial Sequence
  derived and/or modified sequence
cgccgtccacaccccagcggccctgacgctgtcccctccgcgaccctcgcctctggaaaaagtgacaggcaaggccacgcccccgcgagggccggcctggagcccgcagcccccagggcctgggacgagatcctgaaggagctagacgagtgctacgagcgcttcagtcgcgagacagacggggcgcagaagcggcggatgctgcactgtgtgcagcgcgcgctgatccgcagccaggagctgggcgacgagaagatccagatcgtgagccagatggtggagctggtggagaaccgcacgcggcaggtggacagccacgtggagctgttcgaggcgcagcaggagctgggcgacacagcgggcaacagcggcaaggctggcgcggacaggcccaaaggcgaggcggcagcgcaggctgacaagcccaacagcaagcgctcacggcggcagcgcaacaacgagaaccgtgagaacgcgtccagcaaccacgaccacgacgacggcgcctcgggcacacccaaggagaagaaggccaagacctccaagaagaagaagcgctccaaggccaaggcggagcgagaggcgtcccctgccgacctccccatcgaccccaacgaacccacgtactgtctgtgcaaccaggtctcctatggggagatgatcggctgcgacaacgacgagtgccccatcgagtggttccacttctcgtgcgtggggctcaatcataaacccaagggcaagtggtactgtcccaagtgccggggggagaacgagaagaccatggacaaagccctggagaaatccaaaaaagagagggcttacaacaggtagtttgtggacaggcgcctggtgtgaggaggacaaaataaaccgtgtatttattacattgctgcctttgttgaggtgcaaggagtgtaaaatgtatatttttaaagaatgttagtaaaggaaccattcctttcatagggatggcagtgattctgtttgccttttgttttcattggtacacgtgtaacaagaaagtggtctgtggatcagcattttagaaactacaaatataggtttgattcaaca

SEQ ID NO: 94805 - protein, 74 aa, Artificial Sequence
  derived and/or modified sequence
MERAQCLRKGILSFERSLEQRSLILSPRLEYSGAITAHCSLDLLDSTNPPASAFWVVETTDTEDEREKKREITE

SEQ ID NO: 94806 - protein, 104 aa, Artificial Sequence
  derived and/or modified sequence
TCISFFLFLKKSLALLPRLEYSGTILAHCNLCLLGSSNSHASASQVAGITGMCHHVWLIFVFLVETGFHHVAQAGLELLVSSSSPALASQSTEITGMSQCAWPL

SEQ ID NO: 94807 - protein, 98 aa, Artificial Sequence
  derived and/or modified sequence
LECSGTVLAHCNLCLLASQAAGITGTSHHAQLIFVFLVETWFHHVGQAGLELLTSGDPPASVSENAGITGVSHRAWPGPQFFNLEQGFSMLVRLVSNS

SEQ ID NO: 94808 - protein, 114 aa, Artificial Sequence
  derived and/or modified sequence
WCTPLIPATEVETGRWVEPRSSRLGFFLVELLSFDLGNRARLHLKKKKKKKSLGKIYFFLRWSLALLPRLGCSGAISAHCKLHLLGSHHSPASASRVAGITGARHHTRLIFFFL

SEQ ID NO: 94809 - protein, 126 aa, Artificial Sequence [sequence omitted]

SEQ ID NO: 94810 - protein, 108 aa, Artificial Sequence
  derived and/or modified sequence
QIKSKFFFFLRRSLALSPRLECSGGISAHCKLRLPGSRHSPASASQVAGTTGARHYARLIFLFLIETGFHYVGQAGLELLTSGDLPTSASQSAGITGVSHCTQPEDIF

SEQ ID NO: 94811 - protein, 131 aa, Artificial Sequence [sequence omitted]

SEQ ID NO: 94812 - protein, 86 aa, Artificial Sequence
  derived and/or modified sequence
GTISAHCNLCLLGSSDSPASASQVAAGITGACHLAQLIFIFLIETGFHHAVQAGLKLLTLSDLPASASQSVGITGASHRADPKVFL

SEQ ID NO: 94813 - protein, 139 aa, Artificial Sequence [sequence omitted]

SEQ ID NO: 94814 - protein, 126 aa, Artificial Sequence
  derived and/or modified sequence
RHQAQLIFLYDLFLYVYFLKDRVLLCHPGWSAMTRSRLTATSASQVAGTIGMCHHARLIFFFFFVFLVEMGFHCVSQHGLELLTLDPPASASQSARIIGLNHCTQPTFCIFSRDGDSPCWPDWSRT

SEQ ID NO: 94815 - protein, 103 aa, Artificial Sequence
  derived and/or modified sequence
FFFFLRRSLALSPRLECSGGISAHCKLRLLGSRHSPASASQVAGTTGARHYARLIFLFLIETGFHYVGQAGLELLTSGDLPTSASQSAGITGVSHCTQPEDIF

SEQ ID NO: 94816 - protein, 118 aa, Artificial Sequence
  derived and/or modified sequence
WCAPVAPATREVEVGGSLEPNRSRLQSAKIAPLHYSLGNRTRLCLKKKKKKSLFNKVCLFLRRSLTLSPRLEHSGMISAHCNLRLPGSSYSPVSASQVAGITGACHHTQLIFVFLVET

SEQ ID NO: 94817 - protein, 117 aa, Artificial Sequence [sequence omitted]

SEQ ID NO: 94818 - protein, 118 aa, Artificial Sequence [sequence omitted]

SEQ ID NO: 94819 - protein, 70 aa, Artificial Sequence
  derived and/or modified sequence
ISAHCNLCLLGSSNSLASASQVAGITGAHHQAQLIFVFLVETEFHHVGQAGLKLLTNEWLPVCLPKCWDY

SEQ ID NO: 94820 - protein, 130 aa, Artificial Sequence
  derived and/or modified sequence
MEGREVYLWYSVDSRGDFLVFLCPIFFSFSFSEVESLSPRLECSGTISAHCNLCLLGSSYSPASASRVTGITGMCHHAQLIFVFLVEMEFRHVGQTSFELLASSSPPASASQSAGITGVSHCAWPLAQYL

SEQ ID NO: 94821 - protein, 132 aa, Artificial Sequence
  derived and/or modified sequence
MRNMIPQDNENPPQQGEANQNDFALVAQAGVQWLDLGPQLPLLPGFKQFFCLSLLSSCGYSWSLALSPRLECSGAISAYGKLRLPGSCHSPASASRVARTTGARHHTRLIFVFLVETRFHRVSQDGLDLLTS

SEQ ID NO: 94822 - protein, 128 aa, Artificial Sequence
  derived and/or modified sequence
MLQEALTEASFLKLVIFFFFFSFLRRSLALSPRLECSGAISAHCNLRLLGSSYSLASASRVSGITGSRHHAQLFFVFLVETGFHHIGQAGLELLTSGDPPTSASQSVGITGVSHRAQQMRIIFIFIKL

SEQ ID NO: 94823 - protein, 722 aa, Artificial Sequence
  derived and/or modified sequence
MKVVPEKNAVRILWGRERGARAMGAQRLLQELVEDKTRWMKWEGKRVELPDSPRSTFLLAFSPDRTLLASTHVNHNIYITEVKTGKCVHSLIGHRRTPWCVTFHPTISGLIASGCLDGEVRIWDLHGGSESWFTDSNNAIASLAFHPTAQLLLIATANEIHFWDWSRREPFAVVKTASEMERVRLVRFDPLGHYLLTAIVNPSNQQGDDEPEIPIDGTELSHYRQRALLQSQPVRRTPLLHNFLHMLSSRSSGIQTEPFHPPEQASSTQQDQGLLNRPSAFSTVQSSTAGNTLRNLSLGPTRRSLGGPLSSHPSRYHREIAPGLTGSEWTRTVLSLNSRSEAESMPPPRTSASSVSLLSVLRQQEGGSQASVYTSATEGRGFPASGLATESDGGNGSSQNNSGSIRHELQCDLRRFFLEYDRLQELDQSLSGEAPQTQQAQEMLNNNIESERPGPSHQPTPHSSENNSNLSRGHLNRCRACHNLLTFNNDTLRWERTTPNYSSGEASSSWQVPSSFESVPSSGSQLPPLERTEGQTPSSSRLELSSSASPQEERTVGVAFNQETGHWERIYTQSSRSGTVSQEALHQDMPEESSEEDSLRRRSLALSPRLEYSGAILAHCKLRLPGSCHSPASASQVAGTTGAHHHARLIFAFLVEMEFHHVSQAGLELLTSGDLPTSASQSAGITGVSHRAWPRLLESSLISLSRYDGAGSREHPIYPDPA

SEQ ID NO: 94824 - DNA, 3122 bp, Artificial Sequence
  derived and/or modified sequence
gagtaactagagcaacagttgttctccctcgctggagtggtgaataggagccgggaggaggggactgttagggtcgggctgcctcagtctccacagtaattaagaggaaattgagttggatacagcggacatgaggcctggaatgggtaccccaaacccatgcatcttaagtgtctgggtccccacgcccccttctgcctgccaggagtactctgtgcagccatcctgtaactgcttcagtccagagaaggatagcatccatccctccctccagctcgcctctctgctgaggctttctcctctccactcagcatttgcaacagcttctctcctggcacttgtctgggaatatcaagttaaaaattacaacacccaattttgataactttagttgagagaaacaacctctagtgaagactgataagtaacttattgcccgtagtcccatgttcctttgtctccaccaagaggaattaccagcccagcagttctgccctcactagagtcccgtccaggagcttgagaggagaggatttttagggctggactgcctcagtctgcacagtaataagttgagttagacacagtggacatgaggacctggactcagatatctgaagaatccttattatttttttgttggcttgttttgagacagagtcaccctgttgcccaggctggagtgcattggcgcaatcttggctcactgcaacctctgcctcccaggttcaagtgattcttcttcctcagcctcccaggtagctaggattacagacatgcgccaccacgctcagctatttttcgtatttttagtggagatggggtttcaccatgttggtcaggctggtcttgaacaccagcctcagcctccccaagtgctgggattacaggcatgagccacagtgcccggccaaaatccttaatgtttttgttttttggtttttttttttgagacagtcttgctctgtcacccaggctggagtgcagtggcacaatcttggctcactgcaagctccgcctccggggttcatgccattctcccgcctcagcctcccgagtagctgggactacaggcgcctgccaccacgcccggctgattttttgtattttttagtagaggcagggtttcaccgtgttaggatggtctcgatctcctgacctcgtgatccgcccgcctcggcctcccaaagtgctgggattacaggcgtgagccaccgcgcccgggctatccttaatgttgatattagtggttagcacatgttttggaggaggacttcacactttttaaactatgctccctcgtattttctataagcagtcttaaattctttctggaataaagcaagattgatcagtatttctcaaggaggattatttggcaggcagtagctactgctcagagaacttggtattgttacatgcatcctggaagtatctgtgcctatttctagacggcctcagacgacttttttctgagtcctggacccttgaatctgcagccaagcaagctcttgggtccctcccaagtctcatgtttagtaaagccctgtgagaataattttattggtggaggagtcaagatgatacttccctcacctgcatcagaggaaaccacatcagaaacaatccacctagaaaaacactgcatacaggaaagctgacaacttgccctgagaaatcacagctttggtgcaagaggtgaagccgaactggtaaaagatcaaagtgaattcagagatcaaactgtactagggaaaggagcagaggctgagatcttgctgccagcgtgacctctcacagagtggcccagcagaggctgtgcagagatggccagagccaggacccagccctgtggagcccctgggcacatgtggtcccgagtgaagccgtgcctgttgctctgaacaggtgggatcaatctgtaggtttttccacttttcacagagtgtggctctctttaggtctgcactccctctctgcgcagggcggacctccctgggctctgcagcatgatctcctgtcccaagacagtcgtgctcttggacagttagcttctgtcattaggaagtgcccacatgagctcttgtttattggaaaccgtgttctatgcctcctttggggtttctgcaactcagtttggcaggtagcttagtggtccacttggtctcaaattccagctccaccatgtgcagttgtgtgttctttggcaagttcctcccctcctccgaatctgtcagtgggggaagagtgcatgtctcacagagttgaggtgagaaataagttaatgaatatgaaattctttgcccagcccctggcacgtggaagggctcagcaatcctgtatccgttgtagtggtcatcactctgtggctcttcactgcttttgttttgttttgggagggggtggagaacaatttgttctgtgtttgtgtggggcaaggcctgtcttcagggctctctccaaccacgtacgctctggctggagcttctgaaaggacacagttcttgcatagaagttgctttctccagcttgcccaccaggcagtctggcttcagacatctatgttgcccttttaagtcaatttggctgtttaagtggaatgtttgtgtcagtctgataattgttaattcatttgatcctcataccaacccttacttgcctccttttacagatggaaaaatcaaacttggacagtaatttccacaaggaaaagccccacagctggaaagcggtgggagcaggaggccacactgggtacaggagtacccatctccccacaggagccccacactgtctcacccttaggaagcccaaatgctcactccttgagtttctaatgcattctttctgatgtacaggaagaggggaaggaaggaagagcttttccatttggtgctccaatgtctcctgctggacccatctgcctagtggaaggcagcaaaatttcaagaaacaggtgaggttgagcagcttggtgcaaccccatggggcctggagttggagctcaacagcaatggatttcagagaccaccctgaaactcccagtaaaaaagacttgggagacatgttaataaactcaagcatttgatcgacccaaaaaaaaaaaaaaaaaaaaaaaaaaa

SEQ ID NO: 94825 - DNA, 2644 bp, Artificial Sequence
  derived and/or modified sequence
aatgctccggcagtcctgttccttcccggttacgtcccttccagcccttggcggagtctgcgggcgagagggcgcaggtgcagaggtgccgccggcggcgtgcggctgcgaaggaagggaccccgacaccgagcgttcctgcggacgctcctcaaccgggggttgttctccgtgctctggacccggcccttcctcacctaggacgtctcgcggtgcactgtccccctctctcgggcgacttttcccccacatccaagtagtgatcaagctcagaatccagctcgcgcccgctgtgcacctagcacttcccacctgtagtcttttgacctcatcgccccctctagaaggctgctgccatcgcttaaatgaggaagccgaggtgcagagaggtttcagacctattgcggtggagctggagttcgagaaccaaccactcggtgctgagacgcgcttgcggaacgggcggcgggcgggggtgaagcggagtgaggggagaggccaggtgcgacccgggcaggtgaggagcacgggcccggagggaggacttacgagaatggaaaggaaagcagcccgtcttcagtgggacagtgggagcattaagatgtcagagaatgagcagttgtgggaagagccatagggtattttattttttagagatggggttttgctctgtcgcccaggctgcaacctcgacctcccgggctcaagcgatcctcctgcctcagcctcccgagtaactgggactacaagcaacgcgccaccacactaaatctttaattttttggggggaggttgaaggtgggggcgggacagggtctctctccgtctcccaggccagagtgcagtggcgcaattacggcccgactcctgggctcaagcgatcctcccacctcagcctccggagtagctgggaccacaggcgcccaccaccacgcccagctagtttttgtatttttttgtagaggtggtgttttgccatgtttcccaggctggtcttgaactcctgagcgcaagtgatccacccgtctcagccttccaaagtgctgggattacaggtgtcagccaccacgcccggccctaaatatttttttaaaagttggatttttcatggtgcccaagggaagagacactcctttccttttactaagaccatttcttttagaaaactttgtaataggaaaatctttctttgccctcttgaaatgtatgtaaattttttaaaaagctgcataagcctcttgccagttttataaaccaggaatttctttcttaaggacctttcttaaggaccttggagtgatttctttgaaataaaaaggccaaggaagatagcttccctccttgtctctgtgggagtttagcagatggctggctccaagttgcaattacctgcttgtcatagagacatgaggtttattttaactttggataaaggcagttagctaacacagatggccgccccaagtaccacgtacctgccttctcgtttagaaacactgtgggcattaggggcaactcatgcagaagacccaggaatcttccaggtatactccatgggatgcctgttccactctggcccattggcacaagctagccttttcttttaaggatagtggggtccgttctgagagcggcctttgcaacatctcacttcccctgttgactgttatttcttttcttcctgctttcctactcccttgatcccaaactcactaggggtatttagtgagcacttactgttgcagtaagactgtagccaaggaagacgaagagacagttggagaccaaagagaacttcaattcgggcacccgagcctagagcaggctcatgcccaaaatggctaccgacccagacaaagaaagcaggcttgcttatatgtcgtttcaggcgtgaaaaacaaggcaggatacaagtttcagacaaagacagtaaattattcaacctgtgacaattctgagaaaacttacatttagttatcttgaccagtcaaccttgaagctggacagagctggggtaagggaaaacaggaattacggaagtatgagggagtcgcgaggccggagataagcttggaaggttgagataagctcgcaggtgcaacttcttagcaatgctgagagtggctgcttaaatttcttagcctatgtataacttctaaatagcctacactaaatggtaactattacctatgttgtgtttgttattttaaactttaatgttatttattttatttcattttccttccacattacctctgctgttagcagctttgagaaatgctgctataggatgtgggaggtcattaaaggatttaagcagggagaggcaagatcagattaacatttcagaaaaatatttactgttttccagctgaaactagtagagtacaatttactttctggtcacagcacacagcagtcacatcctggaggaactgtacttctctaagatctagtctgtcctgtggtttaaatgacctttagcaaattgtctttattactttgtacactgctttcaccagtctgctcttccatggctaacggggcagaactgttatttttagggttttccacatccagtatgttcataagatttctaccctgtgtgaacttccagatgtcgaataaaggctggatgctgacc

SEQ ID NO: 94826 - DNA, 2738 bp, Artificial Sequence
  derived and/or modified sequence
gtgtgaagattcccccttcactcaccagatcatctccatggcaacagcttgcagcctgctcttggagtgctttgttttggcagcttctctgctagtttgtgtatggagtgaatggaggaggtaaatccacagattaagaatatgctgtcaggagtcaggcagccaaggtcagaagccagctctgcttctcagtggctctgacagccaggccagtgatgatgaggtccatcttcctgccacaccgaaagctcatctgcagtcggagaggccatctagaccccagaggttgggaagaagatgagaaaatcttggtacctgatgccattcccactcttcctccttatgtattcatcaggacggaccaggcttgtgttaaggtgtacccgggatttgttttaatcaggaatggcaagactcacaggcacagaggtgattgtcatgaggaagaagtctgtgctcacagaaccctagaaacaggaggcatggcatgccacgtagggccacatggggaaggaccatctctctggggcttttggggaagttggaaacaggtgctctttttccttcccgttgatcattaaacattgagtccctcgtctctagggaggggacttcttatttacccctgggttgggaaataaatcatgacagcagcaatcagacaacagcagagaagtgtgtgatctgaacatctgtgggatgccgtgatccctggaggagcccttcacactgatcccatgaatggccctcaacacatgcacgagcaaggagcaagcgttccgacaagtgctctcgcagtactccaaggaagaggctgaaatttgactcagcaaagcccagagggaaaagggaaagtggtttatgagtgtcctcaggagctatcacatcctagacactaggcactttcatctaaatgactctgatgaccccagtgttgtcagtgctcctcagtcagtggatcagacttgcccttggcatgaggaggatagtcagtcactcctggtccccttcagagggaccttttgagaaaaaaatatagccaattacttatgtaaccccaggcactctgtcctgaatcctgggcattccaccaccgtggagaaataggttagtcccagacacatgacaccagcctatgaggcagctccgggactcagctgctcgaacgagcgtcgcaatttcaagttgggaattaacggcaacacctgacaacacaacacaatgcagtagccatcaagcaggaagcccgagcactccactctcagctgtaccttgccaagcagtggctgctgtctgtcgggagcaggtagcaagtcaagatcagtctaaggacattccatgtccatctggcatcaaaccaccctgctacctatgccagttgttctcaggatttgttttaatcaggaatggtaagacataaggcacacagacgtggaaatgattatcatgaaggaagaagtttgtgctcatagagctctagaagcaggaggtgtggcacacggggccacatggttcggaaggataagtgttggtcaggaggcagggagaggggagagcatggccccaagcctttattggggttttcataggaaggaatggttaagacaaggtacatatgctggctaagtttagggttggatagtttgaataatttggatgggttcagggccatagggatggtcccgagttgtctgaccctagggtgacttagggcagagagaatattggcttggtgtgtgagagtttggttttaaaaagaagaagatggttgggagtgtgggctccagattagctggtttgtacatcaaaggcacgctcccaggagaattgtttgccaccccgcccccgacccgtgtgtctctctctctctctctctctctctctaggaatttgctagccctgaatggggtgacctctttggatcaaggacccaaatgttagcgcatgaagaatacagaaaataagaacatatactcaatacaaggttatgctgcagtaacaaacaatcccaaggttgtagtggctttttacacaactaaagtttctttgccaatgctgcacattcactgcaggttggaggaggagggcgggtagtctgctcactgtaatcactaagggcccaggatgatggaagcttcatctcaacacatgcctccacaatcaccaaggcagggaaagggactatggcaaattgcacctgtgatcttaaagctcctgcccagaagtaacagtcaaatcatatgggcacacctaaccatgaaagggcagagaagctgaatcctaccatgtgccaggatggaagagaagtgggatatttgtgattagttctgatgactactgacacctgtcattggaaccaaaagattcctcttttgcttaagcaaaaggaagaagaattgttcaaaagaattgtggccaggtgcagtggcttgcgcctgcaatcctagcactttgggaggccaaggcgggcagatcacttgaggccaagcgtttgagactggcctgggcaagatggtgaaactctgtcgctacataaaatacaaatatcagctgggcatgctggtgtatgcctgtagtcccagctattcaggaggctgaggtgggaggacttcttgagcttgactgaggtggcagtgagctgagatcgcaccactgctctccagcctaggtgacagagtgagactctgtctcaaaataaaaataaaaaagaattgtaataatacatgccccaacacccc

SEQ ID NO: 94827 - DNA, 714 bp, Artificial Sequence
  derived and/or modified sequence
gctgttgagactccaggggtgttcggggctgggagcctgctgagtgttccctgttcccacctccaatctgctccatcctccagctgcatttcattccggatctaccaggatccaactttactactgtcatggagggaattacagtaattctaccaacttttgaggcaaccttcttctgacactgtgtgaaacagactgaaaagactctaaagatggagagagctcaatgcttgagaaaaggaattctgtcctttgaaaggtctctagaacaaaggagtcttattctgtcacctaggctggagtacagtggtgcaatcacagctcactgcagcctcgatctcctggactcaactaatcctcctgcctcagccttctgggtagttgagactacagatacagaagatgagagagagaaaaagagagaaattacagagtgacggagaaggcagacatcatgcaacatgctcaagggctattcattttaagctgaaacatacatgtgtagaaagcatccttgtacttataatcccaatgactatgaagaaaaataatttagccaaatagttcctagaacaggaaaaataaggaattatattttgagataagaagttaagctctagtataacaatgatatgggtcaaagaaaaatgaaaacaaattttaaaaacgttgcaacatgaataaaagtttcaccaaatcgggagtctattataa

SEQ ID NO: 94828 - DNA, 225 bp, Artificial Sequence
  derived and/or modified sequence
atggagagagcccagtgcctgagaaagggcatcctgagcttcgagagaagcctggagcagagaagcctgatcctgagccccagactggagtacagcggcgccatcaccgcccactgcagcctggacctgctggacagcaccaacccccccgccagcgccttctgggtggtggagaccaccgacaccgaggacgagagagagaagaagagagagatcaccgagtag

SEQ ID NO: 94829 - DNA, 327 bp, Artificial Sequence
  derived and/or modified sequence
cagatcaagagcaagttcttcttcttcctgagaagaagcctggccctgagccccagactggagtgcagcggcggcatcagcgcccactgcaagctgagactgcccggcagcagacacagccccgccagcgccagccaggtggccggcaccaccggcgccagacactacgccagactgatcttcctgttcctgatcgagaccggcttccactacgtgggccaggccggcctggagctgctgaccagcggcgacctgcccaccagcgccagccagagcgccggcatcaccggcgtgagccactgcacccagcccgaggacatcttctag

SEQ ID NO: 94830 - DNA, 381 bp, Artificial Sequence
  derived and/or modified sequence
agacaccaggcccagctgatcttcctgtacgacctgttcctgtacgtgtacttcctgaaggacagagtgctgctgtgccaccccggctggagcgccatgaccagaagcagactgaccgccaccagcgccagccaggtggccggcaccatcggcatgtgccaccacgccagactgatcttcttcttcttcttcgtgttcctggtggagatgggcttccactgcgtgagccagcacggcctggagctgctgaccctggacccccccgccagcgccagccagagcgccagaatcatcggcctgaaccactgcacccagcccaccttctgcatcttcagcagagacggcgacagcccctgctggcccgactggagcagaacctag

SEQ ID NO: 94831 - DNA, 312 bp, Artificial Sequence
  derived and/or modified sequence
ttcttcttcttcctgagaagaagcctggccctgagccccagactggagtgcagcggcggcatcagcgcccactgcaagctgagactgctgggcagcagacacagccccgccagcgccagccaggtggccggcaccaccggcgccagacactacgccagactgatcttcctgttcctgatcgagaccggcttccactacgtgggccaggccggcctggagctgctgaccagcggcgacctgcccaccagcgccagccagagcgccggcatcaccggcgtgagccactgcacccagcccgaggacatcttctag

SEQ ID NO: 94832 - DNA, 213 bp, Artificial Sequence
  derived and/or modified sequence
atcagcgcccactgcaacctgtgcctgctgggcagcagcaacagcctggccagcgccagccaggtggccggcatcaccggcgcccaccaccaggcccagctgatcttcgtgttcctggtggagaccgagttccaccacgtgggccaggccggcctgaagctgctgaccaacgagtggctgcccgtgtgcctgcccaagtgctgggactactag

SEQ ID NO: 94833 - DNA, 399 bp, Artificial Sequence
  derived and/or modified sequence
atgagaaacatgatcccccaggacaacgagaaccccccccagcagggcgaggccaaccagaacgacttcgccctggtggcccaggccggcgtgcagtggctggacctgggcccccagctgcccctgctgcccggcttcaagcagttcttctgcctgagcctgctgagcagctgcggctacagctggagcctggccctgagccccagactggagtgcagcggcgccatcagcgcctacggcaagctgagactgcccggcagctgccacagccccgccagcgccagcagagtggccagaaccaccggcgccagacaccacaccagactgatcttcgtgttcctggtggagaccagattccacagagtgagccaggacggcctggacctgctgaccagctag

SEQ ID NO: 94834 - DNA, 225 bp, Artificial Sequence
  derived and/or modified sequence
atggaacgggcccagtgtctaagaaaaggcattctgtccttcgaaagatccttagagcaacggagcttgattctatcccctagacttgaatactcgggcgctatcacagcccattgctctctcgacctgctggattccaccaatccgccggcttccgccttctgggtggtggagacaacagatactgaagatgagcgcgaaaaaaaacgggagatcactgagtag

SEQ ID NO: 94835 - DNA, 2281 bp, Artificial Sequence
  derived and/or modified sequence
acaactggcctgaccttcaaaggccttcacagctcctgccttcatgttaccgtctactatgttcctcgtgcaccttccactcagcacaaacaggctgcactgcctccgaaacacatcacttgaatcctacctctgctcctttgtccatctgaatcaccctctccacatttctgaccgtgtaatcctgatctcacttcatgaggcagttcgcttctcttttgcatttagctttccccggggtacactgtcaatagcctactgtctgatgtcatcagtcagcacttcatcagaggcaattatgtccacagagcttttggctaattactgtcactcctctttacatgtgtgcatatgcatatcatctttccctaatgagactggaaatcatgattcattccctggagcagtggtttccataagtgaccaacccacagaccagtgcaaactggctgcaaaagagcttcctctgaggaacttattagaatgcagattctttgactgcatgggagaggaggatctcataaatctgggtgtaataggcacagaacgttaggtgtaatatgggcgggactctggactcagcatatccaacaagctgctggctgattccgacgatgccgatgaattgccaggttgggaactgctgcccccagagaacctagcagagagctctgtacgtggtaggtgctcactcccctattgtttgggtgtatgcctcctgataatgaacttgatcgtaactttattgttgtattatgcctgtattgtttccttaagtgaaggaagaatgcttttgagtacctaataggtggcaagctctgtgcctacttacatacatgaactattccttttaataacctttggaaataaagtggcatttccattgggcattagaaatctgaagactttcgtttacagctgttgcaacagcagaactagaattcgacctccgacatttctgctcaccagagggcatgaactgctggtttgtacctggcttgcagataccttctttgggcagcacaatgttcaaaattaaaaaaactaccaacacttctaaactggatactttgtatcaatatctgggtttctggcttctcttcacgggaaaaaaacaaacaaacaaaaaggtttggtgaacactggggcccacattcctgcagggcaacagtcacatggagactttagatgggcacgtgcccagaacacactagagtccccatcgctccccattctcttacattctgttcccaactaggttcttataggcctgggtttgtgcctgttgcacacttatctactctcttgcttcccactggtcaggaagtctggcaaacttaaaaggcctctttttgttgctctcttctgtatggatctctcatcatagaggtgtgtgcatttctgactttgtgatttcaatactaaggaagctgtcggcagattatcaaggaaaacggggatcgctgctccccaacgtacacattctggtgtgccccagtaaaattctatattcagcctccaaactagctgggaaaaatgtggcaaatcatctacttgctccaattcaatggtgtttagaagtaggaagtcactgtgagcaatgccaccaagtggtggagagactccatgcagaatcgccaccttcagccagagaggctgggaggccgaagacctctctcaatgcacagggccattcagaaactagaaacaaaatgcttgctcatctccctaggccactccttccgaggctttttgagacgaggtctcactgtcacccaggccggagtgcagtggcacaatcaaggctcactgcaacctcaaccttctgggttcaagcgatcctcccacttcagcctttcaagtagctgggatgactacaggcatgggccaccacagccagctgattttttttttctttttagtagaaatgaggtctcgccatattgctcagactggtcttgaaccaacacatctttagctttttaaaagacagccttggccagccatggcagctcacacttgtaatcactgcactttcggaagctgaggtgggcagatagcttgagccgaggagttcaagaccagcctgggcaacatggtgaaaccccatctctacaaaaaatacaaaaattagctgggtgtgatggtgcacatctgtggtcccagctactggggaggctgaggtgggaggattgcttgagcctgggaggtcgaggctgcagtgagctgtgattacctcactgcattccagcctgggcaacagagaaccctgtctctattt

SEQ ID NO: 94836 - DNA, 327 bp, Artificial Sequence
  derived and/or modified sequence
cagatcaagtccaaatttttcttctttctcagacgaagcctggcactgtcccctaggctggagtgtagcggtggaatatccgcccactgtaaacttaggctccctggttctaggcacagtcccgctagtgcaagccaagttgcgggaacgaccggggcccgtcactacgcccgtcttatcttcctgtttctaatagagaccggattccactatgtggggcaggcagggctggagttgcttacaagtggtgatctgcccacatcagcttcacagagcgctggaattactggggtgtcacactgcacccaaccagaggacattttttag

SEQ ID NO: 94837 - DNA, 381 bp, Artificial Sequence
  derived and/or modified sequence
cgacaccaggcacaactgattttcttgtacgatttattcctctatgtctactttctaaaggacagggtactcctttgccatcccggatggtctgctatgacccggagtaggctgactgccacgagcgccagtcaagtggccggcacaatcggcatgtgtcaccacgcccgcctgattttcttttttttctttgtcttccttgttgagatggggttccattgcgtgtcccagcacgggttagagctcctgactctggacccccccgccagcgcctcccagtcagccaggataatcggtctaaatcattgcacccaaccaaccttttgcattttctctagagatggcgatagcccttgctggccagactggtcccggacatag

SEQ ID NO: 94838 - DNA, 312 bp, Artificial Sequence
  derived and/or modified sequence
ttcttctttttcttacgcaggtcactggcactttctccacggctggaatgtagcggtgggatttcagcacactgtaaactgcgactgctcggatctagacatagccctgccagtgcaagtcaggttgccggcacaaccggggcccgacactacgctagactgatctttctgtttctgattgaaactggtttccactacgtgggccaggccgggctggagctgctgacaagcggggaccttccaacatcagctagccagagcgccggcatcacgggcgtatctcactgtactcagccagaggatatcttctag

SEQ ID NO: 94839 - DNA, 213 bp, Artificial Sequence
  derived and/or modified sequence
atcagtgcccactgcaatctgtgccttctgggtagttctaattctctcgcctccgcatcccaagtcgctggcatcaccggggcacatcaccaggctcagctgattttcgtgttcttagtcgaaactgagttccatcacgtcggacaggctggtcttaaattgctaaccaacgagtggctgcccgtgtgcctgcccaaatgctgggactattag

SEQ ID NO: 94840 - DNA, 399 bp, Artificial Sequence
  derived and/or modified sequence
atgcgtaacatgattcctcaggacaacgaaaaccctccccaacagggcgaggccaaccaaaacgatttcgccctggtggcccaggccggggtacaatggttggaccttggcccacagcttccattgttacccgggttcaagcaattcttctgcctctctctgctgtcctcctgcggctactcctggagcctcgctctgtctcctaggctcgagtgctccggtgccatttcggcctacggcaaactccggctgcccggaagctgccattcccccgcttctgcttcccgggtcgcgagaactacaggagcacggcatcacactagattaatctttgtgtttctagtggagacccgcttccaccgggtgtctcaggacgggctggatctcctcacctcttag

SEQ ID NO: 94841 - DNA, 225 bp, Artificial Sequence
  derived and/or modified sequence
atggagcgggcccagtgcctgaggaagggcatcctgagctttgagaggagcctggagcagaggagcctcatcctgagcccccggctggagtacagcggggccatcacagcccactgcagcctggacctgctggacagcaccaaccccccagccagcgccttctgggtggtggagaccacagacacagaagatgagcgggagaagaagcgggagatcacagaatag

SEQ ID NO: 94842 - DNA, 327 bp, Artificial Sequence
  derived and/or modified sequence
cagatcaagagcaagttcttcttcttcctgcggcgcagcctggccctgagcccccggctggagtgcagcggcggcatcagcgcccactgcaagctgcggctgcccggcagccgccacagccctgccagcgccagccaggtggccggcaccactggagcccggcactacgcccggctcatcttcctgttcctgattgaaacaggcttccactacgtgggccaggccggcctggagctgctgaccagcggggacctgcccaccagcgccagccagagcgctggcatcaccggggtgagccactgcacccagcctgaggacatcttctag

SEQ ID NO: 94843 - DNA, 381 bp, Artificial Sequence
  derived and/or modified sequence
cgccaccaggcccagctgatcttcctgtatgacctcttcctgtatgtgtacttcctgaaggacagagtgctgctgtgccaccctggctggagcgccatgaccaggagccggctgacagccaccagcgccagccaggtggccggcaccatcggcatgtgccaccacgcccggctcatcttcttcttcttctttgtgttcctggtggagatgggcttccactgtgtgtcccagcacggcctggagctgctgaccctggaccccccagccagcgccagccagagcgcccgcatcatcggcctgaaccactgcacccagcccaccttctgcatcttcagcagagatggagacagcccctgctggccagactggagcaggacatag

SEQ ID NO: 94844 - DNA, 312 bp, Artificial Sequence
  derived and/or modified sequence
ttcttcttcttcctgcggcgcagcctggccctgagcccccggctggagtgcagcggcggcatcagcgcccactgcaagctgcggctgctgggcagccgccacagccctgccagcgccagccaggtggccggcaccaccggggcccggcactacgcccggctcatcttcctgttcctgattgagaccggcttccactacgtgggccaggccggcctggagctgctgaccagcggggacctgcccaccagcgccagccagagcgctggcatcactggagtgagccactgcacccagcctgaggacatcttctag

SEQ ID NO: 94845 - DNA, 213 bp, Artificial Sequence
  derived and/or modified sequence
atcagcgcccactgcaacctgtgcctgctgggcagcagcaacagcctggccagcgccagccaggtggccggcatcaccggggcccaccaccaggcccagctgatctttgtgttcctggtggagacagagttccaccacgtgggccaggccggcctgaagctgctgaccaatgagtggctgcctgtgtgcctgcccaagtgctgggactactag

SEQ ID NO: 94846 - DNA, 399 bp, Artificial Sequence
  derived and/or modified sequence
atgaggaacatgatcccccaggacaatgaaaaccccccccagcagggcgaggccaaccagaatgactttgccctggtggcccaggccggcgtgcagtggctggacctgggcccccagctgcccctgctgcccggcttcaagcagttcttctgcctgagcctgctgagcagctgtggctacagctggagcctggccctgagcccccggctggagtgcagcggggccatcagcgcctacggcaagctgcggctgcccggcagctgccacagccctgccagcgccagccgggtggcccggaccactggagcccggcaccacaccaggctcatctttgtgttcctggtggagacccgcttccaccgggtgtcccaggacggcctggacctgctgaccagctag

SEQ ID NO: 94847 - DNA, 225 bp, Artificial Sequence
  derived and/or modified sequence
atggagcgggcccagtgcctgcggaagggcatcctgagcttcgagcgaagtctggaacagagatctttgatccttagcccaagattagagtacagtggcgcgatcaccgctcactgttccctcgatctgcttgacagcacaaatcccccagcatctgctttttgggtggttgaaactaccgacactgaggatgagagggaaaagaaacgggaaatcaccgagtag

SEQ ID NO: 94848 - DNA, 327 bp, Artificial Sequence
  derived and/or modified sequence
cagatcaagagcaagttcttcttcttcctgcggcggagcctggccctgtctccacgacttgaatgttctggaggcatctcggcccattgtaaactgcgtcttccaggaagccgtcactccccagcaagcgccagccaggtggccgggaccaccggagctcggcactacgcgcggctgatcttcctgttcctgatcgaaaccggcttccattacgttggccaggctggactggagctgcttacctccggcgacttgccaacctctgcgtcccagtctgcagggattacgggtgtgtctcactgcactcagcctgaagacattttttag

SEQ ID NO: 94849 - DNA, 381 bp, Artificial Sequence
  derived and/or modified sequence
cggcaccaggcccagctgatcttcctgtacgacctgttcctgtacgtttatttcctgaaagatagagtcctcctctgccaccctggttggagcgctatgacacgcagccgattgactgcgacctccgcaagtcaggtcgcagggaccatcggaatgtgccaccacgcccgccttatattctttttcttctttgtgttcctagttgagatggggttccactgcgtgtcccaacacgggttggaactgctaaccctggatccgcctgcgtcagcctcacaatcggctagaatcatcggcctgaaccactgtactcagccaaccttctgcattttttcgcgcgatggagattccccttgttggcctgattggagccgcacctag

SEQ ID NO: 94850 - DNA, 312 bp, Artificial Sequence
  derived and/or modified sequence
ttcttcttcttcctgcggcggagcctggccctgagcccccggctggaatgcagtggtggcatctctgcgcactgtaagttgagactcttgggctcacggcactcacccgcctctgcttctcaggttgcaggtacaacaggtgctagacattatgcccgacttatcttcctgttcctgatcgagacaggcttccattacgtaggccaggctggccttgagttgctgacctccggggaccttccaacgagcgcctcacaatccgccgggatcactggcgtgtcccactgcacgcaaccagaagacatattctag

SEQ ID NO: 94851 - DNA, 213 bp, Artificial Sequence
  derived and/or modified sequence
atcagcgcccactgcaacctgtgcctgctgggcagcagcaacagcttggctagcgcttcccaggtagcgggcataaccggagctcatcatcaggcacaacttatattcgtcttcctagtggagacagagtttcaccacgtgggacaggccgggttaaagcttctgacgaacgaatggttgcctgtgtgtctgcccaagtgttgggactattag

SEQ ID NO: 94852 - DNA, 1739 bp, Artificial Sequence
  derived and/or modified sequence
caaaccatttaccctcgacaaaagtataggagatagaaattacttattctggtgcaatagatatagtaccgtaagggaacaatgaaagaactatatcaagcaccaaaaagcaaagacaaatccttgcatcttttgaataatgaattaactagaataaacttcacaaagagagctctagccaagtcccccaaaatcagaggagcttctccagaacagctagaagagtacactcatttatgtggcaaaatagtgagaagattcattagtagcagtgacaagcctacggaggctggtgatagctgattgtccaaggtagaattttagttcaactttaaacttaacctacagaattacttaatcctcctgtaagtttaactgttaaagggggacggatcttcagatactagaaaataaccgtcctatagagagtaaaagattttaccaccataattggcctaaaagcagccaccaattaagaaagcgtttaagctcaacatctgactaacttcatttctaatcaccctgttaaactcctaatattacattggactaatctattattcagtagaagcaataatgttagtgtaagtaacattaagacattatccattgcataagcttacatcagaccagaataatccactgacagttaacaacctaatattaacaaatgattaatagacatcttattatctttattttaacccaatacagtcatgctctaaggaaagattacaaaaagtaaaaggaactcggcacatttcaccccatctctctaccaaaaacatcacccctagcattgctagtattagaggcactgcctgctcagtgacatatgtttaagggttgcggtatcctgaacttgcaaaggtagcataatcacttgttccctaagtagggacttgtatgaatggccacaccagggtttagctgtctcttactttcaaccagtgaaattgacctacctatgaagaggcgggtataaataaataggagaagaccctgtggagcttgaattcattaatgcaaatagattcaaacaagccaacaggccccaatgtatcatccctgcattaaaaattttggttggggtggccgggcacagtggctcacgcctgtaatcccagcactttgggaggccgaggtgggtggatcacgaggtcaggagatcgagaccatcctggctaacatagtaaaaccctgtatctactaaaaatacaaaaaattagccgggtgtggtggcacatgcctgtagtcccagctacccaggaggatgaggcaggagaatggcatgaacctgggaagcagagcttgcagtgagcggagatggtgccactgcactccagcctgagagacagagtgagactctgtcttaaaaaaaaaaaaaattggttggggtgaccttggagcataattcaacctccgaaacgacttaaactaagaccgcactagtgtaagtcagttattacacattgacccaataattctatcaacaggataagtgaccctagggttaagagtgcaatcctattctagcatccatatcaacaacagggtttacgaccttgatgttggatcgggacatcctaaatggtgtagccgctattaagggatcatttgttcaatgattaaagtccttcgtgatctgagttcagaccagagcaatccaggttggtttctatctatttagcatttttcccagtatgaaaggatatgagaaaccgggcccacttcacaaa

SEQ ID NO: 94853 - DNA, 399 bp, Artificial Sequence
  derived and/or modified sequence
atgcggaacatgatcccccaggacaacgagaaccccccccagcagggcgaagccaaccaaaatgacttcgcacttgtcgctcaggctggcgtgcagtggctggacttaggaccccagctgcccctgctgccaggtttcaaacagttcttctgcctgtctttgcttagtagctgcggctatagttggagccttgctctgtcccctcgtttagagtgcagcggcgcaatatctgcctacggcaaattgcggctgcccggttcgtgccacagtcctgcttcggcaagcagggttgcccggacaacaggagccaggcaccacacccggctgattttcgtcttcttagtagaaacccgatttcatcgagtttcacaggacggactggatctgctcacatcctag

SEQ ID NO: 94854 - DNA, 225 bp, Artificial Sequence
  derived and/or modified sequence
atggaaagagctcagtgcctccgtaaggggatactctctttcgaacgcagtcttgaacagcgttcgctgattttgtcacctcggctggaatattcaggggcaattactgcacactgtagcttagacctgctggattctacaaaccctcctgcttcagctttttgggtggtggagaccaccgacaccgaggatgagcgggagaagaagagagagatcaccgagtag

SEQ ID NO: 94855 - DNA, 327 bp, Artificial Sequence
  derived and/or modified sequence
cagatcaagagcaagtttttcttcttcctgaggcggagtctggccctgagtccaagactcgagtgctccgggggtattagcgcccattgcaaacttcgactgcctggtagtaggcacagtcccgcttccgcaagccaggtggccggtaccacaggagcacgtcattatgcgaggctgatttttttgttcctcatcgagacagggttccactatgtcggccaggctgggttggagctgctcaccagcggtgatctgcctaccagtgccagccagtccgccggaatcacaggagtcagtcactgcacacagccagaagacatcttttag

SEQ ID NO: 94856 - DNA, 381 bp, Artificial Sequence
  derived and/or modified sequence
cgacaccaggctcagcttatttttctgtatgatctgtttttgtacgtatatttcttaaaggaccgtgtgttgctctgccacccaggttggtctgccatgacgcgctccagactgacagctacgagcgcgagccaagtagctgggaccattgggatgtgtcaccatgcaaggcttattttcttcttctttttcgttttcctcgtggaaatgggctttcattgcgttagtcagcacgggctggaacttctcactctggatccccctgcgtctgcctcacagtctgcccgtatcattggactgaaccattgtactcaacccactttttgtatcttcagccgtgatggggacagcccgtgctggccagattggtctaggacctag

SEQ ID NO: 94857 - DNA, 312 bp, Artificial Sequence
  derived and/or modified sequence
tttttttttttcctccgaaggagtctggcactaagccctaggctcgaatgttcaggcggtattagcgctcattgcaaactgaggctcttaggtagcaggcacagcccagccagcgcatcacaggttgctggcactaccggcgctcgacattatgcccgacttatttttttattcctcattgagacgggattccattacgtgggccaagcagggctcgagctgctcacttccggtgacctgccaacttccgcgtcacagtccgcgggtattacaggagtgagccactgtacccagccagaagatatcttctag

SEQ ID NO: 94858 - DNA, 213 bp, Artificial Sequence
  derived and/or modified sequence
atctctgcccactgcaacctctgcctccttggaagcagcaactcacttgccagtgccagtcaggtggcaggcatcactggagcccaccatcaggcacagctcatcttcgtgttcctagtcgagaccgaattccaccacgttggacaggccggacttaagctgctgactaatgaatggctgcctgtctgtctgcccaaatgttgggattactag

SEQ ID NO: 94859 - DNA, 1834 bp, Artificial Sequence
  derived and/or modified sequence
ggagagcccggcccgcgggccgtccgtcccccacaggaaaccgccggggaggccgcggcagggacccgcccccaggccactaacagcaacaacagagaggctggagctctgcctgcgtgcgggccaagggctaaaccttggacaggttctttcacttactccgcctgacaaccctgcgacgtgataccattatccccacttcgcagatcaaataaacggagtcttggagagattgaattgactttaccaaaaccgtcaggatttgaatctgctgctctctgatcctaaagcctgagctagaaaccaccgctccccctcctaggaggccccttccaggggcttgccgtggccaagccaggccaggtgggagaagcggcagccttgccctggagggttttgagaagcactgctcctggaggccctggggaaggtccctgaaacctttggccaatgtggctgtccccatggtccacatgccctccccaccccctgcctagctgcttgactgcctgctgctccccagcccaccagcctgtccgtgggtcagcccagccacccgcttcggatctctgcacgtgtgtcacctgctgttctggccctcatcccaactatccacctgcccatctcctccctacctcctcgctgcctatctgcccaggacttatctgctgtctgctcacctgcctgcttgttgactgcttctctgccctcctatctgcctgtgagactagagatttgtcaccttggaaagcacggagagtactgctaagatgaaacacaggaaggacaggccttgatggaaggttggggggccgagagatccagagcctatgggaggggacttgtgagtgctggcatattcaggacccagtgcaaacccaagcacagctctgctcccggccccagtggccaaactgaaggcttgccctggctattctgccgttgacatgggcctcaccctaccacggggataggtcttggatggagggaagagggagactcaccgggggcctcctgagtcctttgagtgtccccatgaccccagcacctgggacagctgctggaaagagggtactggcaaaaatttgctaaatggacaatcataggcccagtgtggtggctcacgtctgtaatcccagcactttgggaggccgaggtgtgcagatcactgaagtccaggagtttgagaccagcctgggcaacatggcgaaaccccatttctacagaaaactacaaaaattagctggacacggtagcacacacctatagttcctgctactcaggaggctaaggtgggaggatcgcttgagcccaggagatcaaggctatggtgagccgtgatcgtgccactgtactccagcctggatgacagaggaagaccctgtctcaaaacaaacaaaacaacagcaacaacaagaaaacaataatagggacattgagtaccctttctggcacctggcactctgccaaatgctatgcacactccgcccttcagtcttcccaggaaccctgtgcagtttgtagcgtggctcacatttgccaagaaggaagtgaggctcagcgaggttaagcagtgcctgtggagtcacatggctgcaagtagtggcctggactggactgcagagcccatgctccccaccgctttccatggggcaactctaggccatcattctccacccctcagacccaaagctgccttttcataatgcttgctgttgctccctttatgctcctgaaatgaaatttatggctaatatgccagcctttacatctaattaaaaatcatccaatggtttttttgtccttattaatatataagaaataaaaggtaatg

SEQ ID NO: 94860 - DNA, 399 bp, Artificial Sequence
  derived and/or modified sequence
atgaggaacatgattccacaagacaacgaaaaccccccacagcagggcgaagctaaccaaaatgatttcgctctggtcgctcaagctggagtgcagtggctagatctggggcctcagctgcctctactgcctggcttcaaacagtttttttgtttaagcctccttagctcttgcggctatagttggagccttgcactgagccctagacttgagtgtagtggagcaatcagtgcttacggcaaacttaggttacccggttcctgccacagccctgcctccgctagtcgcgtagcccgtaccaccggggctcggcaccatactcgtctcatctttgtgttcctggtggagaccaggttccaccgggtctcccaggatggcctggatctgctgacctcttag

SEQ ID NO: 94861 - DNA, 378 bp, Artificial Sequence
  derived and/or modified sequence
cgccaccaagcccagctaatttttttgtatgatttgtttttgtatgtatattttttaaaagacagagtcttgctctgtcacccgggctggagtgcaatgacgcgatctcggctcactgcaacctctgcctcccaggtagctgggactataggcatgtgccaccacgcccggctgatttttttttttttttttgtatttttagtagagacggggtttcactgtgttagccagcatggtcttgagctcctgaccttggatccccctgcctcggcctcccaaagtgctaggattataggcctaaaccactgcacccagcctacattttgtatttttagtagagatggggattcaccatgttggccagactggtctcgaact

SEQ ID NO: 94862 - DNA, 324 bp, Artificial Sequence
  derived and/or modified sequence
caaataaaaagcaaattttttttttttttgagacggagtctcgctctgtcgcccaggctggagtgcagtggcgggatctcggctcactgcaagctccgcctcccgggttcacgccattctcctgcctcagcctcccaagtagctgggactacaggcgcccgccactacgcccggctaatttttttatttttaatagagacagggtttcactatgttggtcaggctggtctcgaactcctgacctcaggtgatctgcccacttcagcatcccaaagtgctgggattacaggcgtgagccactgcacccagccggaagacatattc

SEQ ID NO: 94863 - DNA, 417 bp, Artificial Sequence
  derived and/or modified sequence
atctgccaccacactcagctaatttttgtgtttttagggttttatttatttatttatttatttatagatggagtcttgctctgctgcccaggctggagtgcagtggtgcaatcttggctcactgcaacctccgcctcccaagtagctgggattacaggcatgcaccaccacgcccagctaatttttgtatttttagtagaaatggggtttcaccatgttggtcaggctggtctcgaactcctgacctcaggtgatccacctgcctcggcctcccaaagtactgggattacaggtgtgagtcactgcacccggcctaatttttgtatttttagtagggacggggtttcaccatgttggccaggctggtctcgaactcctgacctcgtgatctctgcccacctcggcctcccaaagtgc

SEQ ID NO: 94864 - DNA, 378 bp, Artificial Sequence
  derived and/or modified sequence
cgccaccaagcccagctaatttttttgtatgatttgtttttgtatgtatattttttaaaagacagagtcttgctctgtcacccgggctggagtgcaatgacgcgatctcggctcactgcaacctctgcctcccaggtagctgggactataggcatgtgccaccacgcccggctgatttttttttttttttttgtatttttagtagagatggggtttcactgtgttagccagcatggtcttgagctcctgaccttggatccccctgcctcggcctcccaaagtgctaggattataggcctaaaccactgcacccagcctacattttgtatttttagtagagatggggattcaccatgttggccagactggtctcgaact

SEQ ID NO: 94865 - DNA, 309 bp, Artificial Sequence
  derived and/or modified sequence
ttttttttttttttgagacggagtctcgctctgtcgcccaggctggagtgcagtggcgggatctcggctcactgcaagctccgcctcctgggttcacgccattctcctgcctcagcctcccaagtagctgggactacaggcgcccgccactacgcccggctaatttttttatttttaatagagacagggtttcactatgttggtcaggctggtctcgaactcctgacctcaggtgatctgcccacttcagcatcccaaagtgctgggattacaggcgtgagccactgcacccagccggaagacatattc

SEQ ID NO: 94866 - DNA, 363 bp, Artificial Sequence
  derived and/or modified sequence
tgtgtgtgtgtgtgtgtgtgtgtgtgtgtgtgtgtgtttatttacttttcagttttttggagttttctttatttgtttgtgtttttgatctgggcaaaagagcaagattctgtctcaaaaaaaaaaaaaaaaaaaccaggcgtggtggctcatgcctgtaatcccagcactttgggaggccgaggcgggcagatcacaaaacaggagttcgagactagcctgagcaacatggcgaaacctcccaaagtgctgggattacagaactggccgggcatggtggccagcacctgtaatcccagctacgggaggctgaagcaggagaatcacttgatccggggaggcagaggttgcagtgagccaaga

SEQ ID NO: 94867 - DNA, 2044 bp, Artificial Sequence
  derived and/or modified sequence
gtaccatgcacctttgagggaccaaggacccaagacttgaggtagacactattcccagctggatactctcaatgttgaggatatagatgcacaaaccaatgcagggaggcctccaggagccactggagaagaaatcttcagatcctaccaggcccatagctgttgcctttgtgggctcctgggttaatttccacacatcagtggcccaccttatgatatcctccctgcatgccacactcccggccatgctctgtggacagccattatttccagtaattgctaatgggagccagtctccaaagagtaatgaatcagaggtgttccttggaatgtgttacactaggacttcgccgatctcacaggctcctttccagatgagctgactgtaatctctgggaagctggatctggaggaacaatgggatgggatttgcggtgacccttcctgcccttcttgagcagcttgtgaaccagaagatgtgcctggagagaaagcctcatttggggaagtgcagtagtcgaagttctttattttgaaaatggagaacaacccttctcacaatcctgtctccccttccccctttccaactagaatatcagctcccctgaacatgagtcagtcacatttcagggaaaactggctgatgttgaagaaatcacttgagggcaaactttgtccttcaagctgtgggtctctgaagtgtagagccagcagatcccccagtgtagggactgggccttccttgcccattgaatgctttctatacatgaagacttggagctctttacagatgacagtagccagtgaggaagataaaagaagagaaaagacccaaaatgcgggtttgccactcttttttgccagcaccgtggggacagtcactctgccttctttccaccacctccaacttcacactcacacgcacactctggtcccacagagcctgtttggtacttgcctgacagcccaccttgaaaccagatggtcatgaacctgtcaccaagtcatctgaagatcttccactgcaacctgtatggcatctgccacagggaccatgggacatgattgaagaaccactccagtgcagttgatgaaggggtgggtctgcactggagttaggtgcaccagggcctgggccaagggtgggctgggtccatcttgtgtgtggtggtcttcttcagagtagcagctgattcagagggattccatagaactgcacaggctaggtctagtcagatatcttggacattttctatttctagattagagaatatagcatacgctgattttaatataactgtgtatgtgactttttcagtgagaaaaattttaagtgatgttctaaacaatttttggcatgtagacagaatagtcaaatatctgtttaactagcaacatagttactcgtgcatatttaaaatactacatgagtatggcctggcacagtggctcatgcctgtaatcctagcactctgggaggccgaggtgagcatattgcctgagttcagtttgagaccactttggacaacatggtgaaaccctgactctataaaaatacaaaaatgtagccaggtgtggtggtgcgtgcctgtagtcccggctacttgggaagctgaggtgcaagaattgcctgaacctgagaggcagaggttgcagtgacctgagattgtgtcactgcactccagcctaggtgacagagcaagactacatctcaaaaaataaaacaaaataaaataggccctgtgccgtggctcacgcctgtaattccagcattttgggcagctgaggcgggcagaccacctgaggtcaggagttcaagaccagcctgaccgacatggtgaaaccccatctatactaaatacaaaaaattagccaggtatggtgatgcatgcctgtagtccaagctacttgggaggctgaggcaggagagaatggcttcaacctgggaggcagaggttgcagtgagccgagattgcgccactgcactccagcctgggtgatagagcaagacttcgtctcaaacaataaaataataaaataaaat

SEQ ID NO: 94868 - DNA, 1459 bp, Artificial Sequence
  derived and/or modified sequence
tctggcggccatcattccctgctgggaggccggggcaagcccttccttctctaggcttctgcctcctctggaaaaagggggctaagttcccccgcctgtgcccaacagggtgatgggcatatccaatgagggtgcagggagctctcctgattctgatccccactcccgcctgcggccagggcctgggtgcaggagactcccacagccctgtgggcccccaggatatatggtcccactcagccaggcctcgtgctcctgcgttcctggagctggcccatggctcagatgtggcacctcagttcccccctacccaagcaagcctcatggggcccagaacccaggcccttccccccatctttctgaggagtccacaccaagggcctgacccagggctgaaccttaggcctggctttgaccaaaggttccaggcagccacccggccagccagactccagggcagctcccggggcacatgctcacagcgggaggctgggagcatgggtctgcaggggagctcagggcaaatgtaggggcccctgtctctgggtggaagagcattaaaacactaggtgcatgaactctgtgttcagacagcctggctccaacttcagcttccccatttatcagccgtctgcctcggtaacccatggcctcagtttcttctgtgaagtgagccctcaaatgcttacccctcaagattatcgtgggaagcaacaagggcacagaggatgccctgggtgcatggtggccatggacacatggccggccgtgcttcctgagctccctggcttttggggagaagggagtggaggccaggcttggggtgccaggggtgaacctttgctgcagaaggcaaactgtttgcttgaggctgtgaggctgttcctaaactacaggcccctgggggcagagggaggagaactaacatttggtaagcgcctgctggtgcccactgctgtatcatgtgcctatgattgcgtgagctcatcagccttcctgggtatccagctcctgggagaccccacaaggagccctggccactgctaccgtcaggattttaatggcacactgaggctcagagagggaaaggggcttgtccagagccacacagggactctgtgggcagggccactccaggaagggacccagggccagacctgagtctaggtgataaacaagacagacatgaggctgggtgtggtggcacacacctgtaatcccagcactttggaaggccaaggtaggcatattgcttgagcccaggagttcaagaccagtctgcaacatgatgaaaccccatctctacaaaaaatacaaaaattagctgggtgtggtggcgtgtgcctatagtcccagctactcgagaggctgaggtgagagaatagtttgagccagggaggtcgaggctacagtgagctgtgatcatgccactgctagggacagagtaagaccctgtctc

SEQ ID NO: 94869 - DNA, 3657 bp, Artificial Sequence
  derived and/or modified sequence
tccctgtcctgtaataactgtagagcactttaaagaatcactgggtgttaaaggccttccgctgtatccagacccctccagagtacctggcacaaagactcagaacaacttagaatctgactacttggccagagatggcccttcaagcaacagctcattccacagcagcgaagaggaagggactgaccttgaaggagacatgctggactgcagtgggtctcggcctctccttatggagtctgaagaagaagatgagagctgcagaccccccccggggaagctgggaggagccgttccattcgctccaccagaagtctctcctgagcaagcaaagacagtgcaaggtggaagaaagaaccagtttcaagccttcacacagccagccactgatgggctcagtgagccagatgtttttgccatagctcccttcaggagctcaagggttccaaatgatgacatggacattttctccaaagccccatttgtctccaagagcagtatggctccttcccagccagaggagtcagacgtgtttttgagagctcctttcactaagaagaaaagcatggaggagttaacagttatccaatgcacctcccaggagctgcctgcacagaccggtctcctcagtcagacaggtgatgtccccctgcccgcgggccgtgagagagctgtgtacacctctgtccaagctcagtattccacagctggttttgtgcaacagtctaacctcctgtcccattctgtacaagcagcagaccatctggacagcatctctcccaggggatcctgcctggaatctgggggtcattctaatgacagaaacaaaggacctcagctccagaaagaagctgtctcaggccccatggctggcaaaccattccgcccccagtccttatccaagtattcccgtcactatagcccagaagacgagccaagtccagaagcccagcccattgctgcctacaaaattgtttcacaaaccaacaagcagtcgatagctgggtctgtttctatcacatccctttcctccaggactacggagctgccagctgctgatccatttgctctagcacccttcccttcaaaatcaggcaagaaaccctaggagcaaaacctgagcctcaagcctcttgtctctatcccaccctcaatacccgccatggcactcccagcttagccttctgaagaagaaatattatcagttcttatatttcaattccctgcgtcagagcagaattgcttgacccagggaggcagactttgcagtgagccaagattgtgtcattgcactccagcctgggcgagaagagcaaaactccgcctcaaaaaaaaaaaaaaaattgtcactggagacatgatgggtggagactctacataccttctttgaatacagaaacggatgcaaacacatgcaaattacttttttttttttttttggtgatgcatgaaaaaactttgacttgtggattacattaattattagtaacagttagattctgccgacttgtattacagtagggtcttatttccttaaagagaaaaaaaaatacagtcatgccccacttaatgatgagggagacattcagagaaatgcatccttaggtgattttgtcattgtgtgaacatcacagagtgtacttaacacaaacctagatggcacggcctactacctacctaggctatatggtccagcctgttgctcctgggctacaaacctgtacagcatgttactgtactgaatactgtaggcagttgtaacacaatggtaagtatttctgtatccaaacattttagacatagaaaaggtacagtaaaaatatggtataatcttatgggaccatcatggtatatgtggtccatcattgatggaatcgtttttatgcagcacatgactgtatataatcaacaaacaactctactttcttgttttcgtttgttgtgtttttgctttacacatttgatagggaacatagaagttgtgacctttcatttcagtggaaagcattgagccagaatatatttattcctaaaccatcgagccacacatgcattgatgaaccctgaaagaatccacagtaattgactaacaggcagtactgaatgaaagatgtcatatgtggtgaaaaatatttaatatatcagtttcttgggctcacatacagccctttagttccaagtgcttggttagattagaaaatgggatgaacacaatttgatgctgaagcagctgctgagcagcacccagggagtctaggtcatacgccctatattgttttcggcccacttattgttgagttgaaaagtctcatatttgtagactagagtgtatgtgtttagaggctcatgttgtatctgagttttctctggcaactaagatctctttctaaacgttctagaaagatactggtatcttactggcccattatttagtaagttttagaatacatgtacatcagtgttttcaactgcttggtggacatttcactgatgcataatcaaagtagcagattataatcatcagagtgatctgacaaggaaattctgtatttgcttccataaagaaaaataatcaaaacatatatcagatataatatatatgcagtatatcacataggaaattttattgtaggaaattagagaaggatgctactcaattcattctctagcaggaagaatacagcttaaaaatcacttgggtccctttaataaagaaaagtgtgattctgtgttgtgtgtttggaactgaaattggagaacacgtgccagtcgactgtgaaatggttgctggataaaaccacagatgtggttttatccgagaaatgtgggactgaaattattttgatgagaggtacataagagagctgcagaaaagactgtagcttctgaggaggcaggagtaccttgttaatatccaaaccacccctgagttctaatgttccaactccacctaaacgaggaattggaaactttaaatggaattatctaatttaaattcttagttttttctttgtctttctcagctgatacttgtagttttgttttgttttttaaccaccaagaacacttgcaagtttgttactgaaaacatcactaaaggaaaagaagagtttcaaaatgcttgaaaagtagtatgtggttgggaattgtttttgttcaagtccctggaagtcctcttggcttagctcccttgttcctgttcccacttcatttccttacttaacattcccctattttgagcatgtcaataagtgcatgatgaatggcacagttgaatgatcatgttaactttaattgcttcctttgttgctgtaaacagtttcttgttaagtttcagccaagtctgtgacaatctcaccaaataagaatgaaatgggcggggtgtggtggctcacacttggaatcccagcactctgggaggctgtgttgggccgatcgcttgagctcatgagttcaagaccaacctgggcaacatggcaaaaccttgtctctacaaaaaatacaaaaattagccaggcatggtggtgcacacctgtagtcccagctacttgggaggcttaggtgggaggatggcttgagcacgggaggcagaggttgcactaagccaagatcgtgtcactgcactccagcccaggcaatagagccagaccctgtctc

SEQ ID NO: 94870 - DNA, 2169 bp, Artificial Sequence
  derived and/or modified sequence
atgaaggtggtccctgagaaaaacgctgtcaggatcctgtggggacgcgagagaggcgcaagggctatgggcgcacaacggttgctgcaagagctggttgaggataaaacccggtggatgaagtgggaaggcaagcgcgttgagttacccgactctccccgctccaccttcctgctcgcatttagccccgatcggaccctcctggcctccacccacgtgaaccacaatatctatattacggaagtaaagactgggaagtgtgtgcatagcttgatcggccacagacggaccccctggtgcgtcacttttcatccaacaatctccgggctcatcgcttcaggatgtcttgacggcgaagtgagaatttgggatctgcacggagggtccgagtcctggttcactgatagtaacaatgcaattgccagtctggcttttcatccaacagcacagctgctgcttatagccactgcgaatgagattcatttctgggattggtcccgtagggaaccttttgccgtggtcaaaactgccagtgaaatggagagggttcgcctggtgcgcttcgaccctcttggacactacctgttgactgcaattgttaatccaagtaaccagcaaggcgatgacgagccagaaataccaattgacgggaccgagctatcccattatcgccagagagctcttctccagagccaaccagtgaggcggacccctttactgcacaatttcctccacatgcttagcagtaggagttccgggattcaaactgaacccttccacccacccgagcaggcatcctctacccagcaggaccagggcctcctgaacaggcccagtgctttcagcacggtgcagtcaagcactgccggaaacacgctgcgcaacctttctctcggcccgactaggagaagcctaggaggcccattgagcagtcatccgtcacgctatcacagagagatcgcacccggtctgacagggtccgagtggaccaggacagtcctcagcctaaattctcggtcagaagcagagagtatgccccctcctaggacatctgcttccagcgtctctttgctgagcgtgctccgccagcaggaggggggcagccaagcttctgtctacacttcagctaccgaagggcgcggcttccccgctagcggactggccactgagagtgatggaggcaacggctcctcacaaaataactctgggtcaatcagacacgaattacagtgcgacctccggcgcttttttctcgaatatgaccgcctccaggagctagatcagtctctgtctggcgaggcgccacaaactcagcaggcccaggaaatgctaaataacaatatagaaagcgaaaggccggggccaagccaccagccaacccctcactcctccgagaataatagcaatctaagccgcggccacctcaaccggtgtcgcgcatgccacaatctcctcaccttcaacaacgataccctcagatgggagcgtaccactcctaactatagttctggagaagcatcaagttcttggcaggtcccctcatcatttgaatcagtgccaagcagcggctcccaactcccccccctcgaaaggaccgaaggccagacgccttcctcttcccgtttagaactgtcttcttccgcatcaccccaagaggaacgcacggtaggtgtggcctttaatcaagaaactggccactgggagagaatctacactcagtcatcccgatcggggacggtgtctcaggaggctcttcatcaggacatgcccgaggaatcttccgaagaagactccctccggaggagatccctggcacttagtccccgtctagaatactcgggcgcaattctggctcactgcaagctacggctgcccggatcttgtcactcacccgccagcgcctcgcaggtagcaggaacaaccggcgcacatcaccacgccagactgatcttcgcgtttctagttgagatggaatttcaccacgttagccaggcggggcttgagctgctgacatccggcgacttacccaccagcgctagtcaaagtgcgggcatcacaggagtatcacaccgggcgtggcccaggttactcgaaagttccctgatcagcctctccaggtacgatggtgcgggatcacgcgagcacccgatttacccagaccccgcctag

SEQ ID NO: 94871 - DNA, 75 bp, Artificial Sequence
  derived and/or modified sequence
atgaaggtggtgcccgagaagaacgctgtcagaattctgtgggggagagaaagaggggcccgggcaatgggttag

SEQ ID NO: 94872 - DNA, 1222 bp, Artificial Sequence
  derived and/or modified sequence
cgcggggacactcgtgcgactggggcaaggtgcccaggggcttctctcctaatttgcctcacgtaacagttgagaccccagagggcagcaaaactgggttcgaattggagagccgtccaggcacagacaaattcattcatctgcccagtgcccgctaactgcggttccaggcgccggcgacgcaattccagagctgccaccgcttccccgcggagcatggggctgcctcgccgggcaggggacgcggcggagctgcgcaagagcctgaagccgctgctggagaagcgccggcgcgcgcgcatcaaccagagcctgagccagcttaaggggctcatcctgccgctgctgggccgggaggatgcttctggctggcacacctggcttcccctccatgctcagaactgcttcctactctacatccaggctcctgagcagcccccagcttaagcttcagcagctccagggtaaatccatctccgcccagagctgactccggatctgccccagtgacaataacaagataaatgccttccattctcttcgtacttacaggatgtaatccacatatttacacagtgtttcatttgcggtaatgtttgttttgtttcttgttccttcgtacctatctgggaagcctgtgcaattcagatgtccaggcccacttccagaagttctcattccctgtgcttgagtcaatggccgcagaccatacacctgagagcaagttaatctgctctaacaaagatatcacatctaagaatggtggttggcaggggctggggggtgggaagaatggggagttggtgcttcatgggtacagagattcagttttgcaagaggaaaagagctctggagatggatgctgctgatggctacaccgcaatgtgaatgtgcatgatgcttaaatatggttaagatgggccgggcgcggtggctcacgcctgtaatcccagcactttgggaggccgaggcgggcagatcacgaggtcaggagatcgagaccatcttggctaacacggtgaaaccccatctctactataaatacaaaaaattagccgggcgtgggggcgggcacctgtggtcccagctactcgggaggctgaggcaggagaatggcatgaacctgggaggtggagcttgcagtgagccgagatcacgccactgcactccaggctgggcgacagagcgagactccgtctcaaaaaaaaaaaaaaaaaaaaaa

SEQ ID NO: 94873 - DNA, 2169 bp, Artificial Sequence
  derived and/or modified sequence
atgaaggtggtgcctgagaagaatgctgtgcgcatcctgtggggccgggagcggggggcccgggccatgggcgcccagaggctgctgcaggagctggtggaggacaagacccgctggatgaagtgggagggcaagagggtggagctgcctgacagccccaggagcaccttcctgctggccttctccccagacaggaccctgctggccagcacccacgtgaaccacaacatctacatcacagaggtgaagacaggaaaatgtgtgcacagcctcatcggccacaggaggaccccctggtgtgtgaccttccaccccaccatcagcggcctgattgccagcggctgcctggatggagaggtgcgcatctgggacctgcacggcggcagcgagagctggttcacagacagcaacaatgccatcgccagcctggccttccaccccacagcccagctgctgctgattgccacagccaatgagatccacttctgggactggagcagaagagagccctttgctgtggtgaagacagccagcgagatggagcgggtgcggctggtgcgctttgaccccctgggccactacctgctgacagccatcgtgaaccccagcaaccagcagggagatgatgagcctgagatccccattgatggaacagagctgagccactaccggcagagggccctgctgcagagccagcctgtgcggaggacccccctgctgcacaacttcctgcacatgctgagcagccgcagcagcggcatccagacagagcccttccaccccccagagcaggccagcagcacccagcaggaccagggcctgctgaaccggcccagcgccttcagcacagtgcagagcagcacagctggcaacaccctgaggaacctgagcctgggccccacccggcgcagcctgggcggccccctgagcagccaccccagccgctaccaccgggagatcgcccctggcctgactggaagtgagtggaccaggacagtgctgagcctgaacagccgctctgaggccgagagcatgcccccacccaggaccagcgccagctctgtgtccctgctgtctgtgctgcggcagcaggagggcggcagccaggcctctgtgtacaccagcgccacagagggccggggcttccctgccagcggcctggccacagaaagtgatggcggcaatggcagcagccagaacaacagcggcagcatcagacatgagctgcagtgtgacctgcggcgcttcttcctggagtatgaccggctgcaggagctggaccagagcctgtctggagaggccccccagacccagcaggcccaggagatgctgaacaacaacatcgagagcgagaggcctggccccagccaccagcccaccccccacagcagcgagaacaacagcaacctgagccggggccacctgaaccgctgccgggcctgccacaacctgctgaccttcaacaatgacaccctgcgctgggagaggaccacccccaactacagcagtggagaggccagcagctcctggcaggtgcccagcagctttgagagcgtgcccagcagcggcagccagctgccccccctggagaggacagagggccagacccccagcagcagccggctggagctgagcagcagcgccagcccccaggaggagaggacagtgggcgtggccttcaaccaggagaccggccactgggagcgcatctacacccagagcagccgctctggaacagtgtcccaggaggccctgcaccaggacatgcctgaggagagcagcgaggaggacagcctgcggcggcgcagcctggccctgagcccccggctggagtacagcggggccatcctggcccactgcaagctgcggctgcccggcagctgccacagccctgccagcgccagccaggtggccggcaccactggagcccaccaccacgcccggctcatctttgccttcctggtggagatggagttccaccacgtgtcccaggccggcctggagctgctgaccagcggggacctgcccaccagcgccagccagagcgctggcatcaccggggtgagccaccgggcctggccccggctgctggagagcagcctcatcagcctgagccgctatgatggagctggcagccgggagcaccccatctacccagaccctgcctag

SEQ ID NO: 94874 - DNA, 75 bp, Artificial Sequence
  derived and/or modified sequence
atgaaggtggtgcctgagaagaatgctgtgcgcatcctgtggggccgggagcggggggcccgggccatgggctag

SEQ ID NO: 94875 - DNA, 605 bp, Artificial Sequence
  derived and/or modified sequence
gtcagctgaggcatctgggaaaccctctccttctgatccaggatctggtacagctaccatgatgaacagcagctcaagaggctcttcccctaccagggtactcgatgaaggcaaggttaatatggctccaaaagggccccctcctttcccaggagtccctctcatgagcacccccatgggaggccctgtaccaccacccattcgatatggaccaccacctcagctctgcggaccttttgggcctcggccacttcctccaccctttgataaagatggcaggccaggcacagtggctcacgcctgtaatcccagcactttatgaatcccagcattcattagacgaggctgaggcaggtggatcccttgagcctaggagtttgagaccagcctgggcaacatggtgaaacccccatctctacaaaaaatccaaaaattagctgggagtggtggcgtgcacctgtagtcccagctactggggagtctgaggtgggaggattgattgagtccgggagattgaggctgcagtgagccatgatcactcattacactccagcccatgtgacaggcaagaccctgccgccaaaaaaaaaaaaaaaaaaaaaaaa

SEQ ID NO: 94876 - DNA, 2169 bp, Artificial Sequence
  derived and/or modified sequence
atgaaggtggtgcccgagaagaacgccgtgcggatcctgtggggccgagagcgaggagcccgagcaatgggggcccagcgcctcctccaggagctggtggaagacaagacacgttggatgaagtgggagggcaagagagtggagttgcccgactccccacgctccaccttcttgctggcctttagtccagatagaactctcctggcaagcactcacgtgaatcacaatatctatatcactgaggtaaaaactggaaaatgcgtccactccctgatcggtcatcgtcgcactccttggtgcgtgacgtttcatcccaccatcagtggcctcatagcatctggctgtctggacggggaggtgcgaatttgggatctccacgggggctccgagtcctggtttaccgacagcaacaacgctatcgccagcctggcatttcatcctacggcacagctgctgctcattgcaaccgccaacgagatccatttttgggattggagcagaagggagccttttgcggtggtgaagaccgcatccgaaatggaaagggttcgccttgtgaggttcgatccattagggcactatcttctgaccgcaattgtgaatccctccaaccagcagggcgacgacgaaccggaaatcccaatagatggaaccgaactcagccattatcgccagcgcgcgctcctgcagtcacagccggtgcgcagaacgccactgcttcataacttccttcacatgttaagtagccgatcttctggcatccagacagaacctttccacccccccgagcaggcaagctccactcaacaggatcaggggctacttaatagacccagtgcattcagcaccgtccagtcttcgacagccggtaatacactccggaatcttagcctaggcccaacccgccgaagtctaggtggaccactgagctctcatccgagtagatatcaccgggagatcgcccctggtctgactggtagtgaatggaccagaaccgtcttaagcttgaattcacggagtgaagcagaatcgatgccgcctccaaggacgtccgcctcctcagtgagcctgctatccgtactgaggcagcaggagggtggttctcaggccagcgtctacacaagtgcgacagaaggccggggtttccctgcatccggattagccactgagtccgatggaggcaatggctcttctcaaaataattctggatctattcgacacgaattgcagtgtgacctgcgaagatttttcctggagtacgatcgtttgcaggagcttgaccaatccctgtcaggcgaagcacctcagactcaacaggcacaggaaatgttaaacaacaacattgaatcggaacggccaggaccgtcccaccaacctacacctcacagttctgagaataactctaacctctcgagaggccatctcaaccgctgtcgcgcatgtcacaaccttctcacatttaacaatgataccctgcgctgggagcggacgacgcccaattattcaagtggcgaggccagttcatcgtggcaggtgccctcatccttcgagagtgttccctcctcaggatctcagttacccccactggagaggaccgaggggcagaccccttcttcatcccgacttgaactgagcagcagcgccagccctcaggaagagcgcaccgtaggggtggctttcaaccaggaaacaggtcattgggagcgcatttatacacagtcgtctaggagcgggactgtaagccaggaggccttgcatcaagacatgccggaggagagcagcgaagaggacagtctgcgaagaagatctcttgcactgtctcctcgactcgagtattccggagctatcctggcccattgtaagctcaggttacccggaagttgtcacagccccgcgtcagcctctcaggtggccgggaccacgggtgctcaccaccacgcgaggttaatttttgccttcctggtggagatggaattccatcatgtttctcaggcaggtttggagctacttaccagtggcgacttaccaacatcggcatcccagagcgctggcattaccggggtgagccatagagcatggcctcgcttactggagtcatcactcatatcattatcaaggtatgatggggccggatctagagagcacccgatctaccccgatccagcctag

SEQ ID NO: 94877 - DNA, 75 bp, Artificial Sequence
  derived and/or modified sequence
atgaaggtggtgcccgagaagaacgccgtgcggatcctgtggggcagggaaaggggagcgcgggccatgggatag

SEQ ID NO: 94878 - DNA, 2169 bp, Artificial Sequence
  derived and/or modified sequence
atgaaggtagtgccagaaaagaatgccgttaggatactgtggggcagagaacgcggtgctagggctatgggggcacagaggctgctacaggaactggttgaggataaaacccggtggatgaaatgggagggaaagcgagtggaacttccagattcacccagaagtaccttcctgttagccttctctcctgaccgcaccctactagccagcacacacgttaaccataatatttacatcaccgaggtaaagacaggtaagtgcgtccacagcttgataggccaccgacgtaccccgtggtgtgtaacctttcacccaactatttccggcctgattgcctcagggtgcctggacggagaggtccgcatttgggatttgcatggagggtctgagagctggttcacagactccaacaatgccattgcttcgctcgccttccaccctactgctcagctcctgctgatcgccactgccaacgagatacatttctgggactggtccagaagggagccttttgccgtagtgaagactgcctcagaaatggagagggtgcgactagtcagatttgatcctcttggccactacctcttaacagcaatcgtcaatccctctaatcagcaaggggatgacgagcctgaaatccccatcgatggtactgagctgtcccattaccggcagcgggctcttcttcagagtcagcccgtacggagaacccccttgctgcacaactttctacacatgttgtcatctcgaagttccggcattcagaccgaacccttccatccaccagagcaggcttcaagtacccagcaagaccaggggctgctaaatcgtccgtcagccttttccacggtgcaaagcagtactgcaggaaacacactccgaaacctgagcctgggacccactcgacgctcccttggcggaccgttgagttcacatccgagccgctaccaccgcgagatagccccagggctcacgggatcagaatggacccggaccgtactcagccttaattctcgctcagaggcggagagcatgccccctccgagaacaagcgcatcttctgtgagtctcttaagcgtgctgcggcagcaggagggaggctcccaggccagcgtttacacatcggccacagaaggaagggggttccctgctagcgggctggcgaccgaaagtgatgggggaaacggttcatcacagaacaattctggtagtattagacacgagcttcagtgtgacttgcggaggttcttcctggaatatgaccgactgcaagaacttgatcagtcactgagtggagaagctcctcaaacccaacaagcgcaggaaatgctgaacaataatattgagtcagaacgcccaggtcctagtcaccagcctaccccccactcctccgagaataacagtaatttgagtcggggacacctcaacaggtgtcgagcctgccacaacctactgacatttaacaacgatacactgcggtgggagcgcacaacacccaactatagcagtggggaagcatccagttcctggcaggttccaagcagcttcgaatctgtgccctcttctgggtctcagttgcctcctttggagagaaccgaaggacagaccccctccagctctcggctcgaactaagctcttcagctagtccgcaggaggagcggacagtgggagtggcctttaatcaagaaaccggtcattgggagcgtatctacacccaaagttcaagaagcggtacggtatcccaagaggccctgcaccaggacatgcccgaggagtcttctgaagaggactctctccggcgacgtagtttagcccttagtcccaggttagagtattcaggagccatcttggcccactgcaaactgcgcctgccaggcagctgccactcaccagcctctgccagccaggtcgcaggcacaaccggagctcatcaccatgctaggctaatatttgcgtttcttgtggagatggaatttcatcacgtgtcccaagcgggactagagttgctgacgagcggagacttgcctaccagtgcctcacagagcgctggaatcactggtgtgagccatcgcgcttggccaaggctattagagtccagcctcattagcttgtctcggtacgacggcgctgggtcccgggagcacccaatttatcctgaccctgcctag

SEQ ID NO: 94879 - DNA, 75 bp, Artificial Sequence
  derived and/or modified sequence
atgaaggttgttcctgagaaaaatgccgtccggattctctggggtagggagcgcggtgcaagggccatggggtag

SEQ ID NO: 94880 - DNA, 5302 bp, Artificial Sequence
  derived and/or modified sequence
aggggattaatgaagagccaccagactatctttatggagaatctagattgggaagttaagctaagaatgtgcatttttgaaaaagtttttatggtagaagagaatgtatatcagaggaaagaatgtagagaagaaagcaacattgtccactgggaattgataagttctgcgtagaatttagagttataaggactatctcattggctcctaatgaatgctaaataacaaatggaaattgctatttccatgaggacaacttacaaggacctgtatggcctcattttagctgcttcagtgtgttggagctgttacttgctccttcatttcctgggcctggtgtgacagtggctactgagcgccatgaaggttgtcccagaaaagaatgctgtccggatactctgggggcgagaacggggtgctcgggccatgggagctcagcggcttctgcaggagctggtagaagataaaacccggtggatgaaatgggagggcaagagagtagaactgccggatagtccacgctctaccttcttattggccttcagcccagacaggactctcttagcctccacccatgtgaaccataatatctatattacggaggtgaagactggcaagtgtgttcattccctgattggacaccgccgtactccatggtgtgtcacttttcatcccaccatctcaggccttattgcttctggctgcctagatggggaggttaggatttgggatttacacggtggcagtgaaagctggttcacagatagcaacaatgccattgcctccctggctttccaccctacggctcagctcctgctgattgccactgccaatgagatccacttctgggactggagtcgacgggaaccctttgctgtggtgaagacagctagtgagatggaacgggtccgtctggtgagatttgatccacttggacactacttactcacagcaattgttaacccctctaatcaacagggtgatgacgaaccagagatccccatagatggaacagaattatcccactaccgtcagcgtgccctcctgcaatcacagccagttcgccggacgcctctcctccacaatttcctgcacatgctgtcctcccgctcttctggcatccagaccgagcccttccatcccccggagcaggcctcgtcaacgcagcaggaccagggcctcctgaaccggccgtctgccttcagtacagtccagagcagcactgccggcaacacgctccgcaacctcagtctgggtcctacccgccgctctttgggagggcctctgtctagccacccttctaggtatcaccgagaaatagctcctgggttgacaggatctgagtggacccggacagtactcagtctgaactcccgctctgaggcggaatccatgcccccgcccagaaccagtgcctcttcggtgagtttgctgtctgtgctgagacagcaggaaggtggctctcaggcatctgtgtacacttcagccacagaagggaggggttttccggcatcagggttggcaactgagtcagatggagggaatggctccagccaaaacaactcgggcagcattcgccatgagcttcagtgtgacctgagacgcttctttctggagtatgaccggcttcaggagctggatcagagcctgagtggggaagctccccagacccaacaggcccaggaaatgctcaacaataacattgaatctgagaggccaggcccttcccaccagcccaccccacacagcagtgagaacaactccaacctgtcccgtggccacctgaatcgctgtcgtgcttgccacaatctcctgaccttcaacaacgataccctgcgctgggaaagaaccacacctaactactcctctggcgaggctagttcctcttggcaggtccccagctcctttgagagtgtgccatcaagtggcagccagttgccacctctcgagcggactgagggccaaacgcccagctccagcaggctggagttgagcagctctgctagtccgcaggaggagaggactgtgggggtggcctttaaccaggagacaggccactgggaaagaatttacacccagtccagcagatctggaactgtgtcacaggaggccttacatcaggatatgcctgaggagagctctgaggaggattcactcaggagacggagtcttgctctgtcacctaggctggagtacagcggcgctatcttggctcactgcaagctccgcctcccaggttcatgccattctcctgcctcagcttcccaagtagctgggactacgggagcccaccaccacgcccggctaatttttgcatttttagtagagatggagtttcaccatgttagccaggctggtctcgaactcctgacctcaggtgatctgcccacctcggcctcccaaagtgctgggattacaggcgtgagccaccgcgcctggccgaggctgctggaatcttccctcatttcattatcccgttatgatggagcaggatccagagagcacccaatttacccagacccagcgagattatctcctgctgcatactacgcccagaggatgatccagtatctctcacggagagacagtattcgccagcgctccatgcgctaccaacagaaccgtctccgttcttccacctcctcctcttcctcagacaaccagggtccatcagtagagggaaccgacttggaatttgaggactttgaggacaatggtgacagatccaggcaccgagctccacgcaatgcccggatgtctgcaccttcgcttggacgctttgtcccaaggcgtttcttgctgcctgagtacttgccttatgctgggatttttcatgaacgtggacagcctggcttggctactcactcttctgttaacagggtcctggcaggggcagtgatcggtgatggacagtctgctgtggccagtaacattgccaatactacctaccggctccagtggtgggacttcactaagtttgacctccctgaaatcagtaatgcttccgtgaatgtgctggtgcagaactgcaagatctacaatgatgccagctgtgacatttctgcagatggccagctcctggcagctttcatccccagcagccagaggggctttcctgatgaaggcatcctggcagtgtactccctggccccccataacctgggcgaaatgctctacaccaagcgatttggtcccaatgccatttcggtgagcctgtccccaatgggcagatatgtaatggtgggcttggcctcacgaaggatcctgctgcacccctccacagagcacatggtggcccaggtcttcaggctgcaacaggcccatggtggagagacctccatgaggagagttttcaacgtcctttatcccatgcctgccgaccagcggagacatgtcagtatcaactctgcccgttggctgcctgagccagggcttggcttggcctatggtactaacaaaggagacctggtgatctgccgaccagaggccttaaactctggtgttgagtactactgggaccagctgaacgagacggtcttcactgtccattccaacagcaggagcagcgagcggcctggaaccagcagagccacatggaggacagacagagacatggggctgatgaatgccattgggcttcagccccggaaccctgccacctcagtgacatctcagggcacccagactctggcccttcagctgcagaatgccgaaacacagactgagagggaggtgccggagccagggacagccgcctcaggtcctggtgaaggtgagggttcagagtatggtgccagtggagaagatgcgctcagcaggatccagaggctgatggcggagggcggcatgacagccgtggtgcagcgggagcagagcaccaccatggcctccatgggcggcttcggcaacaacatcatcgtcagccaccgcattcaccgcagctctcagacgggcactgaacctggtgccgcccacacctcctcaccccagccctccacctctcggggactgctcccagaggccgggcaactggcagagcgaggcctaagcccccggacagcttcctgggaccagcctggtacccctgggcgggagccaacccagccaaccctgccctcttcctcccctgtccccattcctgtttcccttcccagcgctgagggaccaaccctccactgcgagttgaccaataacaaccaccttctggatggtggcagcagcaggggggacgctgcaggccctaggggagaaccacggaacaggtagagacaaacgttgcactggtgcctcccctcgaaccgccaagcagaaaccggacctcacagctgactgggaactggacatgtggaagagctgctggctgcatcagggaacaggaggaggaagagggtcagggtggagaggaagatcagtcagtgggcacaagacagtcaaatgggcaaggcctgcctcggggaactagaaccttccaggatctggagcccgggagagccacactgtgggcttaatgtgaatagaggaacaagtgggtatctctgccaggcaccccactttctcctagtaacatgggctcaggggactcagccctggacagagagcctccagagagtgaacagtcttccagatctgggccaatcatcctggacagaggcccgcgaggcagctttgccctgtccacctgttgggtgggcagagccaccaggaacccagacaccacctccaactctgagccttccagagcttcagcctctcttcgtcgtcttaccccactgaaaccaacagggatcgggccaggctcccagattcttgaggacagggacttcggcatttactaatgggggactactgtggggtaagggggcgcctgcttgcctgatacaggatggggtcaagggacagtgggcaggtcctcactcaggagtggggggtgtaggctggccagcccccagggcttgtccaccagtcttctccccgcaaggccctcagagcagcgcctgtgggtgtcagtattacctgagcctaggccaaagctagcccaaggctggggaaggggaggagactccaggtcagaatgtgaggtctcagtctgtgatttaaggtgttgcatgtggactcttaactgtacgtgtagtttctagtggagaaatcaaggctctgatcattttgtttttagtatgaaaatgtgatttcctttctgtttgtaactcatcatagaaacattgtggtgggaggagaggggatagtctacagctaatgagggaaacaccaaagatcacatcattaaaatgatgacatgcccctc

SEQ ID NO: 94881 - DNA, 2169 bp, Artificial Sequence
  derived and/or modified sequence
atgaaggtggtgcccgagaagaacgccgtgagaatcctgtggggcagagagagaggcgccagagccatgggcgcccagagactgctgcaggagctggtggaggacaagaccagatggatgaagtgggagggcaagagagtggagctgcccgacagccccagaagcaccttcctgctggccttcagccccgacagaaccctgctggccagcacccacgtgaaccacaacatctacatcaccgaggtgaagaccggcaagtgcgtgcacagcctgatcggccacagaagaaccccctggtgcgtgaccttccaccccaccatcagcggcctgatcgccagcggctgcctggacggcgaggtgagaatctgggacctgcacggcggcagcgagagctggttcaccgacagcaacaacgccatcgccagcctggccttccaccccaccgcccagctgctgctgatcgccaccgccaacgagatccacttctgggactggagcagaagagagcccttcgccgtggtgaagaccgccagcgagatggagagagtgagactggtgagattcgaccccctgggccactacctgctgaccgccatcgtgaaccccagcaaccagcagggcgacgacgagcccgagatccccatcgacggcaccgagctgagccactacagacagagagccctgctgcagagccagcccgtgagaagaacccccctgctgcacaacttcctgcacatgctgagcagcagaagcagcggcatccagaccgagcccttccacccccccgagcaggccagcagcacccagcaggaccagggcctgctgaacagacccagcgccttcagcaccgtgcagagcagcaccgccggcaacaccctgagaaacctgagcctgggccccaccagaagaagcctgggcggccccctgagcagccaccccagcagataccacagagagatcgcccccggcctgaccggcagcgagtggaccagaaccgtgctgagcctgaacagcagaagcgaggccgagagcatgcccccccccagaaccagcgccagcagcgtgagcctgctgagcgtgctgagacagcaggagggcggcagccaggccagcgtgtacaccagcgccaccgagggcagaggcttccccgccagcggcctggccaccgagagcgacggcggcaacggcagcagccagaacaacagcggcagcatcagacacgagctgcagtgcgacctgagaagattcttcctggagtacgacagactgcaggagctggaccagagcctgagcggcgaggccccccagacccagcaggcccaggagatgctgaacaacaacatcgagagcgagagacccggccccagccaccagcccaccccccacagcagcgagaacaacagcaacctgagcagaggccacctgaacagatgcagagcctgccacaacctgctgaccttcaacaacgacaccctgagatgggagagaaccacccccaactacagcagcggcgaggccagcagcagctggcaggtgcccagcagcttcgagagcgtgcccagcagcggcagccagctgccccccctggagagaaccgagggccagacccccagcagcagcagactggagctgagcagcagcgccagcccccaggaggagagaaccgtgggcgtggccttcaaccaggagaccggccactgggagagaatctacacccagagcagcagaagcggcaccgtgagccaggaggccctgcaccaggacatgcccgaggagagcagcgaggaggacagcctgagaagaagaagcctggccctgagccccagactggagtacagcggcgccatcctggcccactgcaagctgagactgcccggcagctgccacagccccgccagcgccagccaggtggccggcaccaccggcgcccaccaccacgccagactgatcttcgccttcctggtggagatggagttccaccacgtgagccaggccggcctggagctgctgaccagcggcgacctgcccaccagcgccagccagagcgccggcatcaccggcgtgagccacagagcctggcccagactgctggagagcagcctgatcagcctgagcagatacgacggcgccggcagcagagagcaccccatctaccccgaccccgcctag

SEQ ID NO: 94882 - DNA, 75 bp, Artificial Sequence
  derived and/or modified sequence
atgaaggtggtgcccgagaagaacgccgtgagaatcctgtggggcagagagagaggcgccagagccatgggctag

SEQ ID NO: 94883 - protein, 1179 aa, Artificial Sequence
  derived and/or modified sequence
MKVVPEKNAVRILWGRERGARAMGAQRLLQELVEDKTRWMKWEGKRVELPDSPRSTFLLAFSPDRTLLASTHVNHNIYITEVKTGKCVHSLIGHRRTPWCVTFHPTISGLIASGCLDGEVRIWDLHGGSESWFTDSNNAIASLAFHPTAQLLLIATANEIHFWDWSRREPFAVVKTASEMERVRLVRFDPLGHYLLTAIVNPSNQQGDDEPEIPIDGTELSHYRQRALLQSQPVRRTPLLHNFLHMLSSRSSGIQTEPFHPPEQASSTQQDQGLLNRPSAFSTVQSSTAGNTLRNLSLGPTRRSLGGPLSSHPSRYHREIAPGLTGSEWTRTVLSLNSRSEAESMPPPRTSASSVSLLSVLRQQEGGSQASVYTSATEGRGFPASGLATESDGGNGSSQNNSGSIRHELQCDLRRFFLEYDRLQELDQSLSGEAPQTQQAQEMLNNNIESERPGPSHQPTPHSSENNSNLSRGHLNRCRACHNLLTFNNDTLRWERTTPNYSSGEASSSWQVPSSFESVPSSGSQLPPLERTEGQTPSSSRLELSSSASPQEERTVGVAFNQETGHWERIYTQSSRSGTVSQEALHQDMPEESSEEDSLRRLSPAAYYAQRMIQYLSRRDSIRQRSMRYQQNRLRSSTSSSSSDNQGPSVEGTDLEFEDFEDNGDRSRHRAPRNARMSAPSLGRFVPRRFLLPEYLPYAGIFHERGQPGLATHSSVNRVLAGAVIGDGQSAVASNIANTTYRLQWWDFTKFDLPEISNASVNVLVQNCKIYNDASCDISADGQLLAAFIPSSQRGFPDEGILAVYSLAPHNLGEMLYTKRFGPNAISVSLSPMGRYVMVGLASRRILLHPSTEHMVAQVFRLQQAHGGETSMRRVFNVLYPMPADQRRHVSINSARWLPEPGLGLAYGTNKGDLVICRPEALNSGVEYYWDQLNETVFTVHSNSRSSERPGTSRATWRTDRDMGLMNAIGLQPRNPATSVTSQGTQTLALQLQNAETQTEREVPEPGTAASGPGEGEGSEYGASGEDALSRIQRLMAEGGMTAVVQREQSTTMASMGGFGNNIIVSHRIHRSSQTGTEPGAAHTSSPQPSTSRGLLPEAGQLAERGLSPRTASWDQPGTPGREPTQPTLPSSSPVPIPVSLPSAEGPTLHCELTNNNHLLDGGSSRGDAAGPRGEPRNR

SEQ ID NO: 94884 - DNA, 3540 bp, Artificial Sequence
  derived and/or modified sequence
atgaaggttgttcccgagaaaaacgccgtgcggattctgtgggggcgcgagcgcggggcacgcgctatgggcgcacagcgcctgttacaggagcttgtcgaggataaaacgagatggatgaaatgggagggtaagagggtggaattgcctgacagccccagatccacattcctcctcgccttttcacctgatagaactttgctggccagcactcacgtgaaccacaacatttacattactgaagtcaaaactggtaagtgcgtgcactctctgatcggtcacaggaggacaccttggtgcgtgactttccatcctaccatcagtggattgattgccagtggctgtctggacggggaagtcagaatttgggatcttcacggagggtcagaatcatggttcacagattccaataacgcaatcgcctccctcgccttccatcctacagcacagctgctgctaatcgccaccgccaatgagatacatttctgggattggagtagacgagagcctttcgccgtagttaagacagcttctgagatggagcgcgtgcgcctggttcggtttgaccctctgggacactacctactaacagccatagtaaacccaagtaatcaacagggagacgatgaacctgagatcccaattgacggcaccgaactgtcccattatcgacaaagggctcttctgcagagtcaacccgtgcggaggacccctctcctccacaactttctccatatgctcagctccagaagcagtgggattcagactgagccctttcatcccccggaacaagcgagttccactcagcaagatcagggactcctcaaccggccttcagctttttcaaccgtgcaatcttccacagccggcaataccctgaggaatctgtctctcgggccaacccgtagatcactgggaggcccgttgtccagtcatccctctcggtaccacagagaaatcgcccctggacttactggctccgagtggactcgcaccgtgctgtccctgaactcccggagtgaagcagaatccatgccaccaccacgcacttccgcctctagcgtgagcctacttagcgtcctccgacagcaagaaggaggctcgcaggctagtgtgtacactagcgctaccgaggggcggggtttcccagcatctggcttggctacagaatcagacggggggaacggttcatcacagaataactcaggctcaattcgacacgagttacagtgtgacctgcgtcgcttctttctcgagtatgataggctccaggaactggaccagtccttgtcaggggaagccccccagacccagcaagctcaggaaatgctgaataacaacatcgagtctgagaggcctggacccagtcaccaacccactccacactcctctgaaaataactctaacctctcacgggggcatctgaaccgatgccgtgcctgccataacctcttgaccttcaataacgataccctacgttgggagagaactacacctaactacagcagcggcgaggcttcgagctcatggcaggtcccctcctctttcgagagtgtcccatcttcaggtagccagctgccaccactagagcggaccgagggccagaccccttcatcctctaggctggagctgagctcttctgcgtcaccgcaggaagagaggacagtgggcgtagcttttaaccaggagacagggcactgggagcgcatttatactcagagttcccgatccgggaccgtttcgcaagaggccctgcaccaagacatgccagaagaatccagtgaagaggactctctgaggaggctgtcccctgcggcttactatgcccagcgtatgattcagtatctgagccgcagggattccattagacaacgctccatgaggtatcaacaaaaccgtctgcgatcatcaacatcctccagtagcagtgacaaccagggcccatccgtggaggggacagacctagaatttgaagactttgaggataatggagaccgcagcagacatcgcgctccgagaaacgcccgaatgagtgcgccgtctctcggccgctttgtccctcgtagattcttgctacctgaatacctaccctatgccggaatctttcacgaacgcggccaaccaggcctcgcgacacatagctcggtgaaccgcgttctggcaggggccgttattggggacggacagagtgccgtggctagcaacatcgccaataccacctacaggctacaatggtgggatttcacgaagtttgacctgccagagatttccaacgcctcggtaaatgtactggtccaaaattgtaagatttataatgatgcgagttgtgacatcagtgcagatggacagctgctggccgctttcattccttcatcgcagcgaggtttcccagacgaaggaattttggcagtgtacagcctggctccccacaaccttggcgagatgttgtatacgaagaggtttggacctaacgccatcagcgtgtcactgtctccaatgggacgttacgtcatggtaggccttgccagcaggagaatactgctgcaccccagcaccgagcacatggtcgcgcaggtgtttagactacagcaggctcacggcggcgagaccagcatgaggagagtgtttaacgtgctataccctatgcctgctgaccagaggcggcatgttagcatcaactctgcacgctggctccccgaacccggcctgggacttgcgtatgggaccaataagggagaccttgtaatttgtcgccccgaggcgttgaactccggggtcgagtactattgggatcagttgaacgaaaccgtcttcactgtgcactcaaactctcgttcgtctgaaagacccggcacaagtagagccacatggcgaactgacagagacatgggcctgatgaatgccatcggcctacagcctcgcaaccctgccactagcgtaacctcccagggaacccagactttggccttacagctgcagaatgccgaaacccaaaccgagcgcgaggtaccagagccgggcacagctgcatctggacccggagagggtgaggggtcagagtatggcgcatcaggagaggatgcacttagcagaattcagaggctgatggctgaaggggggatgaccgctgttgtgcagcgagagcagtcaactactatggcctcaatgggggggtttggcaacaacattatcgtttctcatagaatccaccgctcttctcagaccggaacagagcctggggccgcccacacaagctcaccacagccttcaacatctagaggcctgctcccggaggccggccagttggccgaacgaggtttaagccctagaaccgcatcctgggatcagcctggaaccccggggagagagcctactcagcctactctgcccagtagctcccctgtgcctatccccgtgagcctgccctcagccgaaggccccactctgcactgcgaactgacaaacaataatcacctgctcgatggtggctcttcccgaggcgatgctgctggtcccaggggagagcctcggaatagatag

SEQ ID NO: 94885 - DNA, 3540 bp, Artificial Sequence
  derived and/or modified sequence
atgaaggtggtgcctgagaagaatgctgtgcgcatcctgtggggccgggagcggggggcccgggccatgggcgcccagaggctgctgcaggagctggtggaggacaagacccgctggatgaagtgggagggcaagagggtggagctgcctgacagccccaggagcaccttcctgctggccttctccccagacaggaccctgctggccagcacccacgtgaaccacaacatctacatcacagaggtgaagacaggaaaatgtgtgcacagcctcatcggccacaggaggaccccctggtgtgtgaccttccaccccaccatcagcggcctgattgccagcggctgcctggatggagaggtgcgcatctgggacctgcacggcggcagcgagagctggttcacagacagcaacaatgccatcgccagcctggccttccaccccacagcccagctgctgctgattgccacagccaatgagatccacttctgggactggagcagaagagagccctttgctgtggtgaagacagccagcgagatggagcgggtgcggctggtgcgctttgaccccctgggccactacctgctgacagccatcgtgaaccccagcaaccagcagggagatgatgagcctgagatccccattgatggaacagagctgagccactaccggcagagggccctgctgcagagccagcctgtgcggaggacccccctgctgcacaacttcctgcacatgctgagcagccgcagcagcggcatccagacagagcccttccaccccccagagcaggccagcagcacccagcaggaccagggcctgctgaaccggcccagcgccttcagcacagtgcagagcagcacagctggcaacaccctgaggaacctgagcctgggccccacccggcgcagcctgggcggccccctgagcagccaccccagccgctaccaccgggagatcgcccctggcctgactggaagtgagtggaccaggacagtgctgagcctgaacagccgctctgaggccgagagcatgcccccacccaggaccagcgccagctctgtgtccctgctgtctgtgctgcggcagcaggagggcggcagccaggcctctgtgtacaccagcgccacagagggccggggcttccctgccagcggcctggccacagaaagtgatggcggcaatggcagcagccagaacaacagcggcagcatcagacatgagctgcagtgtgacctgcggcgcttcttcctggagtatgaccggctgcaggagctggaccagagcctgtctggagaggccccccagacccagcaggcccaggagatgctgaacaacaacatcgagagcgagaggcctggccccagccaccagcccaccccccacagcagcgagaacaacagcaacctgagccggggccacctgaaccgctgccgggcctgccacaacctgctgaccttcaacaatgacaccctgcgctgggagaggaccacccccaactacagcagtggagaggccagcagctcctggcaggtgcccagcagctttgagagcgtgcccagcagcggcagccagctgccccccctggagaggacagagggccagacccccagcagcagccggctggagctgagcagcagcgccagcccccaggaggagaggacagtgggcgtggccttcaaccaggagaccggccactgggagcgcatctacacccagagcagccgctctggaacagtgtcccaggaggccctgcaccaggacatgcctgaggagagcagcgaggaggacagcctgcggcggctgagccctgctgcctactatgcccagaggatgatccagtacctgagccggcgggacagcatccggcagaggtccatgagataccagcagaaccggctgcggagcagcaccagcagcagcagcagtgacaaccagggccccagcgtggagggcacagacctggagtttgaggactttgaagataatggagacaggagccgccaccgggcccccagaaatgccaggatgtctgcccccagcctgggccgctttgtgccccggcgcttcctgctgcctgagtacctgccctatgccggcatcttccacgagcggggccagcccggcctggccacccacagctctgtgaacagagtgctggccggggctgtgattggagatggccagagcgctgtggccagcaacatcgccaacaccacctaccgcctgcagtggtgggacttcaccaagtttgacctgcctgagatcagcaatgcctctgtgaatgtgctggtgcagaactgcaagatctacaatgatgccagctgtgacatctctgcagatggccagctgctggccgccttcatccccagcagccagaggggcttcccagatgagggcatcctggccgtgtacagcctggccccccacaacctgggggagatgctgtacaccaagagatttggccccaatgccatctctgtgtccctgagccccatgggccgctacgtgatggtgggcctggccagccgccgcatcctgctgcaccccagcacagagcacatggtggcccaggtgttccggctgcagcaggcccacggcggggagacctccatgagaagagtcttcaacgtgctgtaccccatgcctgctgaccagaggagacatgtgtccatcaacagcgcccgctggctgcctgagcccggcctgggcctggcctacggcaccaacaagggggacctggtgatctgcaggcctgaggccctgaacagcggcgtggagtactactgggaccagctgaatgagaccgtcttcaccgtgcacagcaacagccgcagcagcgagcggcccggcaccagccgggccacctggaggacagaccgggacatgggcctgatgaatgccatcggcctgcagcccaggaacccagccacctctgtgaccagccagggcacccagaccctggccctgcagctgcagaatgctgagacccagacagagcgggaggtgcctgagcccggcacagctgccagcggccctggagagggggagggctctgaatatggagccagcggggaggatgccctgagccgcatccagaggctgatggccgagggcggcatgacagctgtggtgcagcgggagcagagcaccaccatggcctccatgggcggctttggaaacaacatcatcgtgagccaccgcatccacaggagcagccagacaggaacagagcctggagctgcccacaccagcagcccccagcccagcaccagccggggcctgctgcctgaggccggccagctggccgagcggggcctgagccccaggacagcctcctgggaccagcccggcaccccaggccgggagcccacccagcccaccctgcccagcagcagccctgtgcccatccctgtgtccctgcccagcgctgagggccccaccctgcactgtgagctgaccaacaacaaccacctgctggatggcggcagcagcagaggagatgctgctggccccagaggagagcccaggaacagatag

SEQ ID NO: 94886 - DNA, 3540 bp, Artificial Sequence
  derived and/or modified sequence
atgaaggtggtgcccgagaagaacgccgtgcggatcctgtggggcagggagcgtggcgccagagcaatgggggcccagcggctccttcaggagttggtggaagacaaaaccaggtggatgaagtgggaaggaaaacgggtggagctcccagactcaccacgatccaccttcctgctggcattctctcccgataggacattgctcgccagtacacacgtgaatcataatatatacatcactgaggttaagactggaaaatgtgtgcacagcttgataggacacagaaggaccccatggtgcgtgacttttcacccaacaataagtgggctcattgctagtggatgcctcgacggcgaagtgcgcatctgggatctacatggtggatcagaatcgtggttcacagacagtaacaatgcaattgccagtctagctttccacccaaccgcccagctcttactgatcgcgaccgcaaatgagattcatttctgggactggtcccggcgggagccgtttgctgtcgtaaagacagccagtgagatggaacgcgtgcggttggttagatttgatcctctcggtcattacctgctgacggcaatagtgaatccatcaaaccagcagggggacgatgagccggagatcccgattgatgggacagagctatctcactaccggcagcgagccctgctgcaatcccagccagtgcgacggacccccctgctgcacaatttccttcacatgctcagcagtagaagtagtggcattcagactgagccctttcatcccccagagcaagcgagttccacacagcaggaccaagggctcctgaaccggcccagcgccttttctaccgttcaatcatctaccgctggtaacacccttaggaacctatccctggggcctacgagacgcagtctgggcgggccccttagcagccatcctagccggtaccatagggagatcgcgccagggcttactggtagtgagtggacacggactgttttgagcttgaactcaagaagtgaagctgagagcatgccaccgccccgaacttctgccagttccgtgtctttgctgagcgttctgcgccagcaggaaggaggttcccaagcctccgtgtatacgagtgctacagagggaagagggttccccgcctccggccttgccacagagagcgacgggggaaatggaagctcccagaataattcaggttcaatccggcacgaactgcagtgtgatctccggcgcttctttctagaatatgacaggctgcaggaacttgaccagagtctaagcggcgaagccccgcagacccagcaggcacaagaaatgttaaacaacaatatcgagagcgagaggcccggtccctcccaccagcccacaccacactcttccgagaataattccaatctcagtagagggcatctgaacagatgtagagcgtgccacaaccttctgactttcaacaatgatacgctgcgctgggaacgtaccacccctaactactcgagcggggaagcaagttcctcctggcaagttcccagcagctttgaatctgtgccctcatccggttcccagctcccccccttggaacgtacagagggccagactccctctagctctcggctcgagctgtcttcttccgctagcccacaggaggaacgaacagtgggcgtggcttttaaccaggagactggacactgggagaggatctacacacagtctagccgcagcggcacagtgtcccaagaagctttgcaccaagacatgcctgaggagagctcagaagaagactccctccgacgcctctcccctgcggcgtattatgcccaacgcatgatacagtacttgtcccggagagatagcatccgccaacggtctatgagataccagcaaaatcgcttgcggtcatccacatcttcttcatcctccgacaaccagggcccatcagtggagggcacggatttggagtttgaggactttgaagacaacggcgatagatcacgccaccgggctccacggaacgctaggatgagtgccccttctctgggcagattcgtgcctcgtcggtttctgctaccggaatatcttccgtacgccgggatctttcatgagcgcggacagccaggcctggctacccattccagcgtaaaccgagtgctggcaggtgcagtcattggagacggacagtcggccgtcgccagcaacattgctaatacgacctatcgactccagtggtgggattttaccaagtttgatctcccggaaatctctaacgcttctgttaacgttctcgtccagaactgtaaaatctacaacgatgccagctgcgatatatcagctgatgggcaactcctcgctgcgttcatcccttcctcacaaagaggcttccctgacgagggtatactggctgtgtatagcctggccccgcacaatttaggcgagatgctttacaccaaacgatttggcccgaatgccatcagcgtttcgctgtcaccgatggggcgatatgtgatggttgggttggcttccagacgaattctccttcacccgagcacggagcatatggtggcacaggtattcaggctccaacaagcccatggcggcgaaaccagtatgcgtcgagtctttaatgttttgtaccccatgcctgcagatcagcggaggcacgttagcatcaatagcgccagatggcttccggagccaggcctcgggctcgcatacggaacgaacaagggcgacctggtgatttgccggccagaagcattgaatagcggtgtggagtattattgggaccagctgaacgaaacggtgttcactgtgcattctaattctaggtcctccgagcgtcccggcaccagtagggctacctggagaacagatcgggacatggggttgatgaatgcaattggcttacagcctcgtaatcctgccacttccgtgacttctcagggcacacagacgctcgcattacagcttcagaacgccgagacccagactgaacgggaggtgccggagcccggcacagcagcttccggccccggagagggcgaagggtccgaatatggtgcatccggcgaggacgctcttagccgtattcaaaggctaatggcagagggcggtatgaccgcggtggtgcagcgggagcaaagtaccaccatggcgagtatgggtggattcggcaacaacatcattgtctctcaccgaatccacaggtctagtcagaccggtacggaacctggggcagcacacactagcagcccacagccctccacttccagaggccttctgcctgaggctgggcagctcgccgagcgggggctgagccccaggactgcaagttgggaccagcctggcactccaggcagggaacccacacagcccactctgccttctagttcccccgtccctattcctgtgagcttaccttcagctgagggcccaacgctccattgcgagctgactaacaacaaccacctgttagacggtggaagttcacgcggcgacgccgcaggtcctcggggagagccacgcaacagatag

SEQ ID NO: 94887 - DNA, 3540 bp, Artificial Sequence
  derived and/or modified sequence
atgaaagtcgtaccagaaaagaatgcggtgcgcattctgtggggacgggagagaggagctagggcaatgggcgcacagagacttcttcaggagctcgtggaggacaagacaaggtggatgaagtgggaggggaaacgcgtggaactacctgattcacccaggtccacattccttctggctttttccccggataggactctcctggcaagcacgcacgttaatcacaacatctacattactgaagtaaagacgggcaaatgcgtacactctctcattggacatcgaaggactccttggtgcgtgacctttcatccgacaatttctggactgatcgccagtggatgtctggacggcgaagtgcgcatctgggatctgcacggtggcagtgagtcctggttcactgactcaaataatgcaatagcatccctggcttttcacccgactgctcagttgttgttgatagccaccgctaacgaaattcacttttgggactggtctcgtcgggagccatttgcagtggtcaagacagcctctgaaatggagagagttcgacttgtgagatttgatccactcggacattacctgttgacagcaattgtgaacccatctaaccagcagggtgatgatgagcctgagatcccaatagacggaaccgagctgtctcattataggcagcgtgctttgcttcagtcccagcccgtccgacgtacacctctccttcataacttcttgcatatgctctccagcaggagctccgggattcaaacggagccattccacccgccagagcaggcatccagcacccaacaggatcaggggctcctgaacaggccatctgcattcagtacagttcaaagctcgaccgcgggaaatactctgcgcaacttaagtctggggcctacccggaggagcctcgggggacccctctcttctcatccttcacggtatcatcgggagattgcccctggccttaccgggtccgagtggacaaggacagtcctctctctcaacagtcgttccgaggccgagagcatgccccctcctagaacttcagctagcagtgtttcgctgctatcagttctcaggcagcaggaaggtgggtctcaggcctctgtgtatacatccgcaactgaaggcaggggatttccagctagcggcttagccacagaatcagacggaggcaacggcagcagccagaataactcgggtagcatccggcatgaattgcaatgcgacctcaggagattctttttggagtacgacagactccaggaacttgatcagagtttgagcggagaagctccgcaaacccagcaggcacaggagatgttaaataataacatcgagtcagaaaggccaggaccttcccatcaacctaccccccatagctcggagaacaactcaaatttgtctcggggacacttgaaccggtgcagggcatgccataatctcctcacatttaataatgacacgctgcgctgggaaagaactactcccaactactcctccggagaagcatcatcctcatggcaagtgcccagttctttcgaatcagtaccttcatcgggctcccagctccccccactggagagaacggaagggcaaacaccaagcagttctcgcctggagctgtccagctcggcctctccacaggaggaaaggacggtcggggtggctttcaatcaggagacgggccattgggaacgcatttacacccagagctctcgcagcggcactgtgtcacaagaagcactgcatcaggacatgccggaggaatcgtcagaggaagacagccttagaaggttgtcccccgcagcgtattatgcacaaagaatgattcaatatttatcccgccgtgattccatacggcagcggtcaatgcgctaccaacagaatagattacggtccagcacgtcctcttccagcagcgacaaccagggtccttccgtcgaggggactgaccttgagtttgaagacttcgaagataatggcgatcgaagccgacaccgggcaccccgaaacgctcgaatgtcagccccatcactagggaggtttgtccccaggcgcttcctgcttccagaatatctaccttatgccggaatcttccacgaacgaggccagccaggcctggccacacacagtagcgtgaatagggtgctggctggtgcagtcataggtgatgggcagtcagcagtcgcatcgaatatcgccaacactacatatcggcttcagtggtgggacttcacaaaatttgatctgcccgaaatttcgaacgctagcgtgaacgttttggttcaaaattgtaagatctataatgatgcctcctgtgatatttctgccgatggtcaactgctcgctgcctttattccctctagtcagcggggtttccccgacgaaggaattctcgcagtgtactcacttgcgccacataacctgggtgagatgctgtacactaaaaggttcggcccaaatgcaatttccgtcagcctctctcctatgggacgatatgtgatggtagggctcgcctcgcgccgaattcttctccatccaagcacagagcatatggtcgcgcaagtatttagactgcagcaggcgcacggaggcgagacttccatgcggcgagtctttaatgttctctatcctatgcctgccgaccaacgcagacatgtcagcatcaacagcgccagatggttacctgaaccgggtctcgggttggcctacggaaccaataagggggacctcgtgatttgtcgtccagaggccttaaatagcggggtagagtactactgggatcaactgaacgagacagtctttacagttcatagcaatagccgctcgtccgagcgcccaggaactagtagagccacctggcggacagatcgagatatggggttgatgaacgccattggactgcagccccgaaatccagccacctccgtcacttcgcaaggaacacagacactcgccttgcagttgcagaatgccgagacccagacagagcgtgaggtccccgaacctggcaccgccgcttcaggtccgggtgagggtgaggggagtgaatatggagcttctggagaggacgcactgagcagaatccaaagacttatggcggagggcggtatgacagccgtggtgcagcgtgagcagtccactaccatggcatcaatgggcggtttcggtaacaacatcattgtgagccatcgaatccacaggtcctctcagaccggtactgaacctggtgcggctcacacgtcctccccccagccctctacctcgagggggttactcccagaggccggacagctggcagaaaggggactgtctccaagaaccgcctcttgggatcagcctggaacccccggtcgcgagccaacacagcctactctacccagttcaagcccagtgcctatccccgtatctctgcccagcgccgaaggacctacattacactgtgagctgaccaacaataatcacctcctggacgggggatctagcagaggggatgccgcagggccaagaggagagcccaggaatcgttag

SEQ ID NO: 94888 - DNA, 4817 bp, Artificial Sequence
  derived and/or modified sequence
gccgccttctcctgccggtcggtagaacggaccccttcctttattcctgtctcctctttctttttccctgtggctcagcccgttcgctggactgcaaaccgagctcccgtctgccttgcagatttccatgaggacaacttacaaggacctgtatggcctcattttagctgcttcagtgtgttggagctgttacttgctccttcatttcctgggcctggtgtgacagtggctactgagcgccatgaaggttgtcccagaaaagaatgctgtccggatactctgggggcgagaacggggtgctcgggccatgggagctcagcggcttctgcaggagctggtagaagataaaacccggtggatgaaatgggagggcaagagagtagaactgccggatagtccacgctctaccttcttattggccttcagcccagacaggactctcttagcctccacccatgtgaaccataatatctatattacggaggtgaagactggcaagtgtgttcattccctgattggacaccgccgtactccatggtgtgtcacttttcatcccaccatctcaggccttattgcttctggctgcctagatggggaggttaggatttgggatttacacggtggcagtgaaagctggttcacagatagcaacaatgccattgcctccctggctttccaccctacggctcagctcctgctgattgccactgccaatgagatccacttctgggactggagtcgacgggaaccctttgctgtggtgaagacagctagtgagatggaacgggtccgtctggtgagatttgatccacttggacactacttactcacagcaattgttaacccctctaatcaacagggtgatgacgaaccagagatccccatagatggaacagaattatcccactaccgtcagcgtgccctcctgcaatcacagccagttcgccggacgcctctcctccacaatttcctgcacatgctgtcctcccgctcttctggcatccagaccgagcccttccatcccccggagcaggcctcgtcaacgcagcaggaccagggcctcctgaaccggccgtctgccttcagtacagtccagagcagcactgccggcaacacgctccgcaacctcagtctgggtcctacccgccgctctttgggagggcctctgtctagccacccttctaggtatcaccgagaaatagctcctgggttgacaggatctgagtggacccggacagtactcagtctgaactcccgctctgaggcggaatccatgcccccgcccagaaccagtgcctcttcggtgagtttgctgtctgtgctgagacagcaggaaggtggctctcaggcatctgtgtacacttcagccacagaagggaggggttttccggcatcagggttggcaactgagtcagatggagggaatggctccagccaaaacaactcgggcagcattcgccatgagcttcagtgtgacctgagacgcttctttctggagtatgaccggcttcaggagctggatcagagcctgagtggggaagctccccagacccaacaggcccaggaaatgctcaacaataacattgaatctgagaggccaggcccttcccaccagcccaccccacacagcagtgagaacaactccaacctgtcccgtggccacctgaatcgctgtcgtgcttgccacaatctcctgaccttcaacaacgataccctgcgctgggaaagaaccacacctaactactcctctggcgaggctagttcctcttggcaggtccccagctcctttgagagtgtgccatcaagtggcagccagttgccacctctcgagcggactgagggccaaacgcccagctccagcaggctggagttgagcagctctgctagtccgcaggaggagaggactgtgggggtggcctttaaccaggagacaggccactgggaaagaatttacacccagtccagcagatctggaactgtgtcacaggaggccttacatcaggatatgcctgaggagagctctgaggaggattcactcaggagattatctcctgctgcatactacgcccagaggatgatccagtatctctcacggagagacagtattcgccagcgctccatgcgctaccaacagaaccgtctccgttcttccacctcctcctcttcctcagacaaccagggtccatcagtagagggaaccgacttggaatttgaggactttgaggacaatggtgacagatccaggcaccgagctccacgcaatgcccggatgtctgcaccttcgcttggacgctttgtcccaaggcgtttcttgctgcctgagtacttgccttatgctgggatttttcatgaacgtggacagcctggcttggctactcactcttctgttaacagggtcctggcaggggcagtgatcggtgatggacagtctgctgtggccagtaacattgccaatactacctaccggctccagtggtgggacttcactaagtttgacctccctgaaatcagtaatgcttccgtgaatgtgctggtgcagaactgcaagatctacaatgatgccagctgtgacatttctgcagatggccagctcctggcagctttcatccccagcagccagaggggctttcctgatgaaggcatcctggcagtgtactccctggccccccataacctgggcgaaatgctctacaccaagcgatttggtcccaatgccatttcggtgagcctgtccccaatgggcagatatgtaatggtgggcttggcctcacgaaggatcctgctgcacccctccacagagcacatggtggcccaggtcttcaggctgcaacaggcccatggtggagagacctccatgaggagagttttcaacgtcctttatcccatgcctgccgaccagcggagacatgtcagtatcaactctgcccgttggctgcctgagccagggcttggcttggcctatggtactaacaaaggagacctggtgatctgccgaccagaggccttaaactctggtgttgagtactactgggaccagctgaacgagacggtcttcactgtccattccaacagcaggagcagcgagcggcctggaaccagcagagccacatggaggacagacagagacatggggctgatgaatgccattgggcttcagccccggaaccctgccacctcagtgacatctcagggcacccagactctggcccttcagctgcagaatgccgaaacacagactgagagggaggtgccggagccagggacagccgcctcaggtcctggtgaaggtgagggttcagagtatggtgccagtggagaagatgcgctcagcaggatccagaggctgatggcggagggcggcatgacagccgtggtgcagcgggagcagagcaccaccatggcctccatgggcggcttcggcaacaacatcatcgtcagccaccgcattcaccgcagctctcagacgggcactgaacctggtgccgcccacacctcctcaccccagccctccacctctcggggactgctcccagaggccgggcaactggcagagcgaggcctaagcccccggacagcttcctgggaccagcctggtacccctgggcgggagccaacccagccaaccctgccctcttcctcccctgtccccattcctgtttcccttcccagcgctgagggaccaaccctccactgcgagttgaccaataacaaccaccttctggatggtggcagcagcaggggggacgctgcaggccctaggggagaaccacggaacaggtagagacaaacgttgcactggtgcctcccctcgaaccgccaagcagaaaccggacctcacagctgactgggaactggacatgtggaagagctgctggctgcatcagggaacaggaggaggaagagggtcagggtggagaggaagatcagtcagtgggcacaagacagtcaaatgggcaaggcctgcctcggggaactagaaccttccaggatctggagcccgggagagccacactgtgggcttaatgtgaatagaggaacaagtgggtatctctgccaggcaccccactttctcctagtaacatgggctcaggggactcagccctggacagagagcctccagagagtgaacagtcttccagatctgggccaatcatcctggacagaggcccgcgaggcagctttgccctgtccacctgttgggtgggcagagccaccaggaacccagacaccacctccaactctgagccttccagagcttcagcctctcttcgtcgtcttaccccactgaaaccaacagggatcgggccaggctcccagattcttgaggacagggacttcggcatttactaatgggggactactgtggggtaagggggcgcctgcttgcctgatacaggatggggtcaagggacagtgggcaggtcctcactcaggagtggggggtgtaggctggccagcccccagggcttgtccaccagtcttctccccgcaaggccctcagagcagcgcctgtgggtgtcagtattacctgagcctaggccaaagctagcccaaggctggggaaggggaggagactccaggtcagaatgtgaggtctcagtctgtgatttaaggtgttgcatgtggactcttaactgtacgtgtagtttctagtggagaaatcaaggctctgatcattttgtttttagtatgaaaatgtgatttcctttctgtttgtaactcatcatagaaacattgtggtgggaggagaggggatagtctacagctaatgagggaaacaccaaagatcacatcattaaaatgatgacatgcccctc

SEQ ID NO: 94889 - DNA, 3540 bp, Artificial Sequence
  derived and/or modified sequence
atgaaggtggtgcccgagaagaacgccgtgagaatcctgtggggcagagagagaggcgccagagccatgggcgcccagagactgctgcaggagctggtggaggacaagaccagatggatgaagtgggagggcaagagagtggagctgcccgacagccccagaagcaccttcctgctggccttcagccccgacagaaccctgctggccagcacccacgtgaaccacaacatctacatcaccgaggtgaagaccggcaagtgcgtgcacagcctgatcggccacagaagaaccccctggtgcgtgaccttccaccccaccatcagcggcctgatcgccagcggctgcctggacggcgaggtgagaatctgggacctgcacggcggcagcgagagctggttcaccgacagcaacaacgccatcgccagcctggccttccaccccaccgcccagctgctgctgatcgccaccgccaacgagatccacttctgggactggagcagaagagagcccttcgccgtggtgaagaccgccagcgagatggagagagtgagactggtgagattcgaccccctgggccactacctgctgaccgccatcgtgaaccccagcaaccagcagggcgacgacgagcccgagatccccatcgacggcaccgagctgagccactacagacagagagccctgctgcagagccagcccgtgagaagaacccccctgctgcacaacttcctgcacatgctgagcagcagaagcagcggcatccagaccgagcccttccacccccccgagcaggccagcagcacccagcaggaccagggcctgctgaacagacccagcgccttcagcaccgtgcagagcagcaccgccggcaacaccctgagaaacctgagcctgggccccaccagaagaagcctgggcggccccctgagcagccaccccagcagataccacagagagatcgcccccggcctgaccggcagcgagtggaccagaaccgtgctgagcctgaacagcagaagcgaggccgagagcatgcccccccccagaaccagcgccagcagcgtgagcctgctgagcgtgctgagacagcaggagggcggcagccaggccagcgtgtacaccagcgccaccgagggcagaggcttccccgccagcggcctggccaccgagagcgacggcggcaacggcagcagccagaacaacagcggcagcatcagacacgagctgcagtgcgacctgagaagattcttcctggagtacgacagactgcaggagctggaccagagcctgagcggcgaggccccccagacccagcaggcccaggagatgctgaacaacaacatcgagagcgagagacccggccccagccaccagcccaccccccacagcagcgagaacaacagcaacctgagcagaggccacctgaacagatgcagagcctgccacaacctgctgaccttcaacaacgacaccctgagatgggagagaaccacccccaactacagcagcggcgaggccagcagcagctggcaggtgcccagcagcttcgagagcgtgcccagcagcggcagccagctgccccccctggagagaaccgagggccagacccccagcagcagcagactggagctgagcagcagcgccagcccccaggaggagagaaccgtgggcgtggccttcaaccaggagaccggccactgggagagaatctacacccagagcagcagaagcggcaccgtgagccaggaggccctgcaccaggacatgcccgaggagagcagcgaggaggacagcctgagaagactgagccccgccgcctactacgcccagagaatgatccagtacctgagcagaagagacagcatcagacagagaagcatgagataccagcagaacagactgagaagcagcaccagcagcagcagcagcgacaaccagggccccagcgtggagggcaccgacctggagttcgaggacttcgaggacaacggcgacagaagcagacacagagcccccagaaacgccagaatgagcgcccccagcctgggcagattcgtgcccagaagattcctgctgcccgagtacctgccctacgccggcatcttccacgagagaggccagcccggcctggccacccacagcagcgtgaacagagtgctggccggcgccgtgatcggcgacggccagagcgccgtggccagcaacatcgccaacaccacctacagactgcagtggtgggacttcaccaagttcgacctgcccgagatcagcaacgccagcgtgaacgtgctggtgcagaactgcaagatctacaacgacgccagctgcgacatcagcgccgacggccagctgctggccgccttcatccccagcagccagagaggcttccccgacgagggcatcctggccgtgtacagcctggccccccacaacctgggcgagatgctgtacaccaagagattcggccccaacgccatcagcgtgagcctgagccccatgggcagatacgtgatggtgggcctggccagcagaagaatcctgctgcaccccagcaccgagcacatggtggcccaggtgttcagactgcagcaggcccacggcggcgagaccagcatgagaagagtgttcaacgtgctgtaccccatgcccgccgaccagagaagacacgtgagcatcaacagcgccagatggctgcccgagcccggcctgggcctggcctacggcaccaacaagggcgacctggtgatctgcagacccgaggccctgaacagcggcgtggagtactactgggaccagctgaacgagaccgtgttcaccgtgcacagcaacagcagaagcagcgagagacccggcaccagcagagccacctggagaaccgacagagacatgggcctgatgaacgccatcggcctgcagcccagaaaccccgccaccagcgtgaccagccagggcacccagaccctggccctgcagctgcagaacgccgagacccagaccgagagagaggtgcccgagcccggcaccgccgccagcggccccggcgagggcgagggcagcgagtacggcgccagcggcgaggacgccctgagcagaatccagagactgatggccgagggcggcatgaccgccgtggtgcagagagagcagagcaccaccatggccagcatgggcggcttcggcaacaacatcatcgtgagccacagaatccacagaagcagccagaccggcaccgagcccggcgccgcccacaccagcagcccccagcccagcaccagcagaggcctgctgcccgaggccggccagctggccgagagaggcctgagccccagaaccgccagctgggaccagcccggcacccccggcagagagcccacccagcccaccctgcccagcagcagccccgtgcccatccccgtgagcctgcccagcgccgagggccccaccctgcactgcgagctgaccaacaacaaccacctgctggacggcggcagcagcagaggcgacgccgccggccccagaggcgagcccagaaacagatag

SEQ ID NO: 94890 - DNA, 105 bp, Artificial Sequence
  derived and/or modified sequence
atgtacctgtggctgaagctgctggccttcggcttcgccttcctggacaccgaggtgttcgtgaccggccagagccccacccccagccccaccggcaagaactag

SEQ ID NO: 94891 - DNA, 105 bp, Artificial Sequence
  derived and/or modified sequence
atgtacctgtggctgaagttgctcgcttttggtttcgccttcctggacaccgaagtgtttgtaacaggacaatcacctaccccgtcccccaccggtaaaaattag

SEQ ID NO: 94892 - DNA, 105 bp, Artificial Sequence
  derived and/or modified sequence
atgtacctgtggctgaagctgctggccttcggctttgccttcctggacacagaggtgtttgtgacaggccagagccccacccccagccccaccgggaagaactag

SEQ ID NO: 94893 - DNA, 105 bp, Artificial Sequence
  derived and/or modified sequence
atgtacctgtggctgaagctgctggccttcggcttcgccttcctggacacggaagtgttcgttaccgggcagtcacccacaccctccccaaccggtaaaaactag

SEQ ID NO: 94894 - DNA, 105 bp, Artificial Sequence
  derived and/or modified sequence
atgtacctttggctaaaactcctggcgttcggcttcgctttcttggatacagaagtattcgtaactgggcaaagcccaaccccgagtcctaccggcaagaactag

SEQ ID NO: 94895 - DNA, 1098 bp, Artificial Sequence
  derived and/or modified sequence
ggagaagttagtaaaaccgaatctgacatcatcacctagcagttcatgcagctagcaagtggtttgttcttagggtaacagaggaggaaattgttcctcgtctgataagacaacagtggagaaaggacgcatgctgtttcttagggacacggctgacttccagatatgaccatgtatttgtggcttaaactcttggcatttggctttgcctttctggacacagaagtatttgtgacagggcaaagcccaacaccttcccccactggtaagaattaatatttatatttttactaattttattttcttgttgcaaagtttatatatttaactacaattttctattattaacactgaaattatttttaaggataaattttataatcatgagtgattcttgacattcacttgttcttaaactttctgcttatacgttatagagtttaataactacctaaacatgttattaaatttgtatatatattttgtgtataaatagtaacttttcccaaacttgacagtaaatcacacaacaggtttctactctcttttaatattttaagactataaaaaaatgcatttaaattagataacaaaattttatagtctgaaagcaggttaacagctgtctatgtatgttatagatatgtagataacagatttgcatatgtctatatttctttaagagtatgttgcttttttcaatggtatgcaaaacctttgagactattgagatatttttaaataataattttcaaattctactgaacacttcaatagtccttataaatgtcttaatcatgagataaatttaaaacacagagatgctgcaaataaattcatacatagtacatacaaaataagagaaaaaattaaattgcagatggttaaatatcacatcacttaactgatgttactgaaaatgtattttcctgcataatcatatggttgacagtatgcattaagaaggtaagtaaaacaatgaagacaattttgatttaatatggtaatgcacaattccaactaacgtacattcaacagatcatgaaattgggttattaaaatgaatatttttgtcattaaataaaaattccgtccaaa

SEQ ID NO: 94896 - protein, 115 aa, Artificial Sequence
  derived and/or modified sequence
MAFPRVKPAPDETSFSEALLKRNQDLAPNSAEQASILSLVTKINNVIDNLIVAPGTFEVQIEEVRQVGSYKKGTMTTGHNVADLVVILKILPTLEAVAALGNKVVESLRAQDPSE

SEQ ID NO: 94897 - DNA, 348 bp, Artificial Sequence
  derived and/or modified sequence
atggccttccccagagtgaagcccgcccccgacgagaccagcttcagcgaggccctgctgaagagaaaccaggacctggcccccaacagcgccgagcaggccagcatcctgagcctggtgaccaagatcaacaacgtgatcgacaacctgatcgtggcccccggcaccttcgaggtgcagatcgaggaggtgagacaggtgggcagctacaagaagggcaccatgaccaccggccacaacgtggccgacctggtggtgatcctgaagatcctgcccaccctggaggccgtggccgccctgggcaacaaggtggtggagagcctgagagcccaggaccccagcgagtag

SEQ ID NO: 94898 - DNA, 348 bp, Artificial Sequence
  derived and/or modified sequence
atggcctttccaagagtgaagccagcacctgacgagacaagcttttccgaggccctcctgaagagaaaccaggacctggcaccgaactccgccgagcaggccagcatactgtctctcgtgaccaagatcaataacgttattgacaatctgatcgtggccccaggcacatttgaagtgcagatcgaggaggtccgccaagtgggcagctacaagaaaggcacaatgactactggccataacgtcgccgatctcgtggttatccttaagatcctaccaacacttgaggcagtcgcggcactggggaacaaagtcgttgaatcattgcgcgcccaggaccccagtgagtag

SEQ ID NO: 94899 - DNA, 348 bp, Artificial Sequence
  derived and/or modified sequence
atggccttcccccgggtgaagccagccccagatgagaccagcttcagcgaggccctgctgaagaggaaccaggacctggcccccaacagcgctgagcaggccagcatcctgagcctggtgaccaagatcaacaacgtgattgacaacctgattgtggcccctggcacctttgaggtgcagatcgaggaggtgcggcaggtgggcagctacaagaagggcaccatgaccaccggccacaacgtggccgacctggtggtgatcctgaagatcctgcccaccctggaggccgtggccgccctgggcaacaaggtggtggagagcctgcgggcccaggaccccagcgagtag

SEQ ID NO: 94900 - DNA, 348 bp, Artificial Sequence
  derived and/or modified sequence
atggccttcccccgggtgaagcccgcccccgacgagaccagcttcagtgaggcgctcctgaaacggaaccaggacctggcccccaattcagctgaacaggcttctattctcagcctggttaccaaaataaataatgtgatcgacaacctgatagtggcccctggcacgttcgaggtccagatcgaggaggtgcggcaggtggggtcttacaagaaaggcacaatgaccacgggtcataacgtagccgatttggtggtgatcttgaaaattcttcccacactggaagccgtggccgcattgggcaataaggtggtggaatcattgagagcccaagatccatccgagtag

SEQ ID NO: 94901 - DNA, 348 bp, Artificial Sequence
  derived and/or modified sequence
atggcatttccacgagtaaagcccgctcctgatgagacgagttttagtgaggcactccttaagcgaaaccaagacctcgcccctaattctgccgagcaggcctccatcctcagtctggttacgaaaataaataatgttatagataacctgatcgtggcccctgggacgtttgaggtgcagatagaggaggtaaggcaggtcggaagttataagaagggcactatgacaaccggccacaacgtggcggatctcgtggttatcctaaaaatcttgcccaccctggaggcagtggccgcacttggcaataaagtggtggaaagcttgagggcacaggatccctccgaatag

SEQ ID NO: 94902 - protein, 245 aa, Artificial Sequence
  derived and/or modified sequence
MAVRASFENNCEIGCFAKLTNTYCLVAIGGSENFYSVFEGELSDTIPVVHASIAGCRIIGRMCVGNRHGLLVPNNTTDQELQHIRNSLPDTVQIRRVEERLSALGNVTTCNDYVALVHPDLDRETEEILADVLKVEVFRQTVADQVLVGSYCVFSNQGGLVHPKTSIEDQDELSSLLQVPLVAGTVNRGSEVIAAGMVVNDWCAFCGLDTTSTELSVVESVFKLNEAQPSTIATSMRDSLIDSLT

SEQ ID NO: 94903 - protein, 108 aa, Artificial Sequence
  derived and/or modified sequence
MAVRASFENNCEIGCFAKLTNTYCLVAIGGSENFYSVFEGELSDTIPVVHASIAGCRIIGRMCVGNRHGLLVPNNTTDQELQHIRNSLPDTVQIRRVEERLSALGNVT

SEQ ID NO: 94904 - DNA, 1252 bp, Artificial Sequence
  derived and/or modified sequence
gtgaggggaacctgggagggtcagctccggtcctgggtcgggaggggtgggggccagaggattcagggccggaggttctggtgggggcccagtgggcgggacccgaggacggaggggccgggaggccgagaggggcggggtcgcggcggggcctgagggacggaggccgggatacttgggaaaggatccgccggccttgaactcccgcctccgccgcccctaggcctcatggcggtccgagcttcgttcgagaacaactgtgagatcggctgctttgccaagctcaccaacacctactgtctggtagcgatcggaggctcagagaacttctacagtgtgttcgagggcgagctctccgataccatccccgtggtgcacgcgtctatcgccggctgccgcatcatcgggcgcatgtgtgtggggaacaggcacggtctcctggtacccaacaataccaccgaccaggagctgcaacacattcgcaacagcctcccagacacagtgcagattaggcgggtggaggagcggctctcagccttgggcaatgtcaccacctgcaatgactacgtggccttggtccacccagacttggacagggagacagaagaaattctggcagatgtgctcaaggtggaagtcttcagacagacagtggccgaccaggtgctagtaggaagctactgtgtcttcagcaatcagggagggctggtgcatcccaagacttcaattgaagaccaggatgagctgtcctctcttcttcaagtcccccttgtggcggggactgtgaaccgaggcagtgaggtgattgctgctgggatggtggtgaatgactggtgtgccttctgtggcctggacacaaccagcacagagctgtcagtggtggagagtgtcttcaagctgaatgaagcccagcctagcaccattgccaccagcatgcgggattccctcattgacagcctcacctgagtcaccttccaagttgttccatgggctcctggctctggactgtggccaaccttctccacattccgcccaatctgtaccggatgctggcagggaggtggcagagagctcactgggactgaggggctgggcacccaacccttttccacctgtgcttatcgcctggatctatcattactgcaaaaacctgctctgttgtgctggctggcaggccctgtggctgctggctgagggttctgctgtcctgtgccaccccattaaagtgcagttccctccgggccattctgaa

SEQ ID NO: 94905 - DNA, 1289 bp, Artificial Sequence
  derived and/or modified sequence
gtcgatgacagctcctaaaaagctcctgaatgaataatgaatgaatgaacgcgagcaggctaggcgtggggccaggcggggtcgcgcccagaccgctcgcgaccatagagtccgccggaggccggaggtagaggggctggatgcgtggcggggagcgccgggctctcccggaagtctccctggacggaagtggaaacggaaacctttttagggagtccaaggtacagtcgccgcgtgcggagcttgttactggttacttggcctcatggcggtccgagcttcgttcgagaacaactgtgagatcggctgctttgccaagctcaccaacacctactgtctggtagcgatcggaggctcagagaacttctacagtgtgttcgagggcgagctctccgataccatccccgtggtgcacgcgtctatcgccggctgccgcatcatcgggcgcatgtgtgtggggaacaggcacggtctcctggtacccaacaataccaccgaccaggagctgcaacacattcgcaacagcctcccagacacagtgcagattaggcgggtggaggagcggctctcagccttgggcaatgtcaccacctgcaatgactacgtggccttggtccacccagacttggacagggagacagaagaaattctggcagatgtgctcaaggtggaagtcttcagacagacagtggccgaccaggtgctagtaggaagctactgtgtcttcagcaatcagggagggctggtgcatcccaagacttcaattgaagaccaggatgagctgtcctctcttcttcaagtcccccttgtggcggggactgtgaaccgaggcagtgaggtgattgctgctgggatggtggtgaatgactggtgtgccttctgtggcctggacacaaccagcacagagctgtcagtggtggagagtgtcttcaagctgaatgaagcccagcctagcaccattgccaccagcatgcgggattccctcattgacagcctcacctgagtcaccttccaagttgttccatgggctcctggctctggactgtggccaaccttctccacattccgcccaatctgtaccggatgctggcagggaggtggcagagagctcactgggactgaggggctgggcacccaacccttttccacctgtgcttatcgcctggatctatcattactgcaaaaacctgctctgttgtgctggctggcaggccctgtggctgctggctgagggttctgctgtcctgtgccaccccattaaagtgcagttccctccgggccattctgaa

SEQ ID NO: 94906 - DNA, 551 bp, Artificial Sequence
  derived and/or modified sequence
gtcgatgacagctcctaaaaagctcctgaatgaataatgaatgaatgaacgcgagcaggctaggcgtggggccaggcggggtcgcgcccagaccgctcgcgaccatagagtccgccggaggccggaggtagaggggctggatgcgtggcggggagcgccgggctctcccggaagtctccctggacggaagtggaaacggaaacctttttagggagtccaaggcctcatggcggtccgagcttcgttcgagaacaactgtgagatcggctgctttgccaagctcaccaacacctactgtctggtagcgatcggaggctcagagaacttctacagtgtgttcgagggcgagctctccgataccatccccgtggtgcacgcgtctatcgccggctgccgcatcatcgggcgcatgtgtgtggggaacaggcacggtctcctggtacccaacaataccaccgaccaggagctgcaacacattcgcaacagcctcccagacacagtgcagattaggcgggtggaggagcggctctcagccttgggcaatgtcacca

SEQ ID NO: 94907 - DNA, 738 bp, Artificial Sequence
  derived and/or modified sequence
atggccgtcagagcatcatttgaaaataactgtgagatcgggtgcttcgccaagctcactaacacatactgcctggtggccataggggggagcgaaaatttttattctgtttttgagggagagctatccgatacaatccccgtcgtacacgcctcaatcgcagggtgtcgcattatcggacgcatgtgtgtgggcaataggcacggtcttctggtgcctaataacacaactgatcaggaactccagcatatccgaaactctctgcccgacactgttcagatcaggcgcgtcgaggaacggctgtccgccctcggcaatgtcaccacctgtaacgattacgtggccctggtccatcctgacctggatagagaaaccgaggagattctggcggatgtccttaaggtggaggtgtttagacagaccgttgccgatcaagtgcttgtcgggtcttactgtgtgttcagtaaccaaggtggactggtccacccaaaaacctcaattgaagatcaggacgagttatccagcctccttcaagtgcccctggtcgccgggaccgttaaccgcgggtccgaggttatcgctgctgggatggttgtcaatgattggtgcgcattttgcgggctggacacaacgagcacggagctctctgtggtggagagcgtgtttaaactgaatgaggctcagccatccaccatagcaacatctatgcgtgattccctgatcgattcactgacatag

SEQ ID NO: 94908 - DNA, 738 bp, Artificial Sequence
  derived and/or modified sequence
atggccgttcgtgcttctttcgaaaataattgcgaaataggatgctttgcgaaactgacaaatacctactgtttggtagccatcgggggctcagagaatttttacagcgtgttcgagggagagctttcggacaccataccagtggtgcacgcaagcattgccggctgtcggattatcggccggatgtgtgtagggaacagacatggcctgctagtgcctaataacactaccgaccaggaactgcagcatatccgcaattcccttccggataccgttcaaatcaggagggtagaagagcggctgtcagcgctgggtaacgtcacgacgtgtaacgactacgtggcactggtacatccagaccttgacagggaaactgaggaaattctagcagatgttctgaaggtagaagtgttcaggcaaaccgtggccgaccaggtcctcgtcgggtcgtactgcgttttctctaaccagggaggtcttgtgcatcctaaaacctctatcgaggaccaagatgagctgtcaagtctgttacaagtccctctcgtggctggcaccgtgaacaggggcagcgaggtgattgccgcaggcatggtcgtgaacgactggtgcgctttttgtggcctggacactactagcacggagttgtccgtcgtggagagcgtttttaaactcaacgaagctcagcccagtactattgcgacatctatgcgcgattctttgattgatagccttacctag

SEQ ID NO: 94909 - DNA, 327 bp, Artificial Sequence
  derived and/or modified sequence
atggccgtgcgcgccagcttcgagaacaactgcgaaattgggtgttttgcgaagctaactaatacctactgcctggtcgcaatcggcggaagcgaaaacttctatagcgtatttgaaggcgaacttagtgacactatcccggttgtgcatgcctctattgcaggttgtagaatcattgggcgtatgtgcgtggggaataggcacggtctgctggtcccaaacaacactaccgatcaggaacttcagcacattcgcaattcgctccccgacactgtgcagatcagacgcgtcgaggaaagactgagcgccctggggaacgttacatag

SEQ ID NO: 94910 - DNA, 738 bp, Artificial Sequence
  derived and/or modified sequence
atggctgtgcgggccagctttgagaacaactgtgaaattggctgctttgccaagctgaccaacacctactgcctggtggccatcggcggcagcgagaacttctacagcgtgtttgaaggagagctgagtgacaccatccctgtggtgcacgccagcattgctggctgccgcatcattggaaggatgtgtgtgggcaacagacatggcctgctggtgcccaacaacaccacagaccaggagctgcagcacatccggaacagcctgcctgacacagtgcagatcagaagagtggaggagcggctgagcgccctgggcaatgtgaccacctgcaatgactatgtggccctggtgcacccagacctggaccgggagacagaggagatcctggctgatgtgctgaaggtggaggtgttccggcagacagtggccgaccaggtgctggtgggcagctactgtgtgttcagcaaccagggcggcctggtgcaccccaagaccagcattgaggaccaggatgagctgagcagcctgctgcaggtgcccctggtggccggcaccgtgaacagaggcagcgaggtgattgctgctggcatggtggtgaatgactggtgtgccttctgtggcctggacaccaccagcacagagctgtctgtggtggagagcgtcttcaagctgaatgaggcccagcccagcaccatcgccacctccatgagggacagcctgattgacagcctgacctag

SEQ ID NO: 94911 - DNA, 327 bp, Artificial Sequence
  derived and/or modified sequence
atggctgtgcgggccagctttgagaacaactgtgaaattggctgctttgccaagctgaccaacacctactgcctggtggccatcggcggcagcgagaacttctacagcgtgtttgaaggagagctgagtgacaccatccctgtggtgcacgccagcattgctggctgccgcatcattggaaggatgtgtgtgggcaacagacatggcctgctggtgcccaacaacaccacagaccaggagctgcagcacatccggaacagcctgcctgacacagtgcagatcagaagagtggaggagcggctgagcgccctgggcaatgtgacctag

SEQ ID NO: 94912 - DNA, 738 bp, Artificial Sequence
  derived and/or modified sequence
atggccgtgcgggccagcttcgagaacaactgcgagatcggctgctttgccaaactcacaaacacctattgtctggttgccatcggaggctctgagaatttttactctgtgttcgagggtgagctgagcgacacaattcccgtcgtacatgcatctattgccggctgcagaatcatcgggagaatgtgtgttgggaacagacacgggctactggtgccaaataacacaacagaccaagagttgcagcatatcagaaactccctccctgatacagtgcagatccgccgcgttgaggagaggttgtcagccttgggtaacgtgacaacgtgcaacgactatgtagctctggtccatcccgacctcgatcgcgagactgaggaaattcttgccgacgtgctgaaggtagaagtgttccgccagactgttgcagaccaggtgcttgtgggttcttactgcgtgttttctaatcagggaggactagtccatccaaagacttcgatagaagatcaggacgaactgagctccctcctccaggtgcctctcgtggccggcacagtgaatcggggctctgaggtgatcgctgcaggaatggtagttaacgactggtgcgccttttgcggcttagacaccaccagtacagaattatcagtagtcgaatcagtgttcaagcttaacgaagctcagccaagcactattgcaacttccatgcgcgactccctgatcgattccttgacctag

SEQ ID NO: 94913 - DNA, 738 bp, Artificial Sequence
  derived and/or modified sequence
atggccgtgcgggccagcttcgagaacaactgcgagatcggctgcttcgccaaactgaccaacacttactgcctcgttgctattggcggatctgaaaacttctactctgtgttcgagggcgagttatctgataccataccggtagttcatgcaagcatcgccggatgtcgaatcatcgggagaatgtgtgtcgggaatcgccacggcttgctcgttccgaataatacaacagatcaggagctgcagcacatccggaactccctgcccgacaccgtgcagatacgacgcgtggaggagcggcttagcgcgcttggaaacgtgaccacatgcaatgactatgtggccctagtgcacccggaccttgaccgcgaaactgaagaaatcttagcagatgtcctgaaggtggaagtctttcggcagactgttgctgatcaagtgctcgtaggaagctactgcgtgttctctaatcagggaggcctggttcatcctaaaaccagcatagaggaccaggatgaattatccagcctgctccaagtgccgcttgttgccgggacagtcaatcgaggctccgaagtgattgccgctggtatggttgtcaacgattggtgcgcattttgcggccttgatactacaagtacagagctttcggtcgtggagtctgtatttaagttgaatgaagcacagccctccaccatcgctacctctatgagagactctctgattgactctctgacgtag

SEQ ID NO: 94914 - DNA, 327 bp, Artificial Sequence
  derived and/or modified sequence
atggccgtgcgggccagcttcgagaacaactgcgagatcggctgctttgcaaagctgactaacacctactgcctggtggctattggaggctccgaaaacttctattccgtgttcgagggggagcttagcgacaccatcccagtcgtgcacgccagtatagcaggttgccgcattatcggacgcatgtgcgtcgggaataggcatgggctacttgtcccgaataataccacagatcaggaacttcagcatatcagaaattctctgccagataccgtacagatcagaagggtcgaggagaggctctctgcgcttggcaatgtgacatag

SEQ ID NO: 94915 - DNA, 738 bp, Artificial Sequence
  derived and/or modified sequence
atggctgtccgggcttcctttgagaacaactgcgagattgggtgtttcgccaaactgaccaatacgtattgcctggtagccattgggggttccgaaaacttctactcagtcttcgagggggaactgagcgacacaatccctgtggtgcatgcgtctatcgccggatgccgcataattggaaggatgtgcgtgggaaaccgtcacggtctgctggtccccaacaatacgactgaccaggagttacaacatattaggaatagcctgcctgatacggtgcagatcaggagggtggaggaacgactgagcgcattggggaacgtgaccacttgcaacgactacgtagcccttgtgcaccccgacttagaccgcgagacggaagagatcctggccgatgtgctgaaggtagaagtgtttaggcagacggtggccgaccaggttctggtggggtcctactgcgtattctccaatcagggcggtttggtccatcccaagacatccattgaagaccaagatgaattatcatccctcttgcaggtgccgctggtggctggaaccgtaaatcgcggatccgaagtgatagcagccggaatggtggtcaatgattggtgcgctttttgcggtttggataccacatcaacggaactcagtgtggtagagagcgtctttaaacttaacgaggcccagccctcaacaattgctacctcaatgagagacagcctgatcgatagcctgacgtag

SEQ ID NO: 94916 - DNA, 738 bp, Artificial Sequence
  derived and/or modified sequence
atggccgttagagccagcttcgaaaacaattgtgaaataggttgcttcgccaagctcaccaatacctactgtcttgtggccatcgggggtagcgagaacttttactccgtctttgagggggagctgtctgataccatccccgtcgtccatgcctctatcgcagggtgcaggataatcggacggatgtgtgtcggaaatcgccatgggcttctggtgcccaataatacaactgatcaggagctgcagcacataaggaactcactccccgacacggttcagatccgaagagtggaagagcgcctgagcgccctcggcaatgtgaccacttgtaacgattacgttgccctcgtgcatccagatctggaccgagaaacagaggagatactggctgatgtgctgaaggtagaagtatttcgtcagactgtggctgaccaggttctagtgggatcgtactgcgtgttctctaatcaggggggacttgtgcaccctaagacgtcaatcgaagaccaggatgaactcagctccttactgcaagtacctttggtggcaggaaccgtcaatcggggtagcgaggtaatcgctgccggaatggtggtcaacgattggtgtgctttctgtggtcttgacaccacctcaactgagctaagcgtcgtggagtctgtctttaagttgaatgaagcccagccatccacaatcgccacctcaatgagggatagtcttatcgactcgctgacatag

SEQ ID NO: 94917 - DNA, 327 bp, Artificial Sequence
  derived and/or modified sequence
atggcagtccgtgccagcttcgaaaataactgcgaaattggctgttttgctaagcttaccaatacgtactgcttggttgcgataggcggaagcgagaatttttatagcgtctttgaaggcgaattgagcgatacgatcccggtcgtccatgccagcatcgcaggctgtcgcatcattggacgtatgtgcgtgggtaatagacacggactgcttgtacctaataacactaccgaccaagaactgcagcacattcggaacagcctgcctgatactgttcaaatccggcgagttgaggagcgcctgtcagcactagggaacgttacttag

SEQ ID NO: 94918 - DNA, 738 bp, Artificial Sequence
  derived and/or modified sequence
atggccgtgagagccagcttcgagaacaactgcgagatcggctgcttcgccaagctgaccaacacctactgcctggtggccatcggcggcagcgagaacttctacagcgtgttcgagggcgagctgagcgacaccatccccgtggtgcacgccagcatcgccggctgcagaatcatcggcagaatgtgcgtgggcaacagacacggcctgctggtgcccaacaacaccaccgaccaggagctgcagcacatcagaaacagcctgcccgacaccgtgcagatcagaagagtggaggagagactgagcgccctgggcaacgtgaccacctgcaacgactacgtggccctggtgcaccccgacctggacagagagaccgaggagatcctggccgacgtgctgaaggtggaggtgttcagacagaccgtggccgaccaggtgctggtgggcagctactgcgtgttcagcaaccagggcggcctggtgcaccccaagaccagcatcgaggaccaggacgagctgagcagcctgctgcaggtgcccctggtggccggcaccgtgaacagaggcagcgaggtgatcgccgccggcatggtggtgaacgactggtgcgccttctgcggcctggacaccaccagcaccgagctgagcgtggtggagagcgtgttcaagctgaacgaggcccagcccagcaccatcgccaccagcatgagagacagcctgatcgacagcctgacctag

SEQ ID NO: 94919 - DNA, 327 bp, Artificial Sequence
  derived and/or modified sequence
atggccgtgagagccagcttcgagaacaactgcgagatcggctgcttcgccaagctgaccaacacctactgcctggtggccatcggcggcagcgagaacttctacagcgtgttcgagggcgagctgagcgacaccatccccgtggtgcacgccagcatcgccggctgcagaatcatcggcagaatgtgcgtgggcaacagacacggcctgctggtgcccaacaacaccaccgaccaggagctgcagcacatcagaaacagcctgcccgacaccgtgcagatcagaagagtggaggagagactgagcgccctgggcaacgtgacctag

SEQ ID NO: 94920 - protein, 627 aa, Artificial Sequence
  derived and/or modified sequence
MASESSPLLAYRLLGEEGVALPANGAGGPGGASARKLSTFLGVVVPTVLSMFSIVVFLRIGFVVGHAGLLQALAMLLVAYFILALTVLSVCAIATNGAVQGGGAYFMISRTLGPEVGGSIGLMFYLANVCGCAVSLLGLVESVLDVFGADATGPSGLRVLPQGYGWNLLYGSLLLGLVGGVCTLGAGLYARASFLTFLLVSGSLASVLISFVAVGPRDIRLTPRPGPNGSSLPPRFGHFTGFNSSTLKDNLGAGYAEDYTTGAVMNFASVFAVLFNGCTGIMAGANMSGELKDPSRAIPLGTIVAVAYTFFVYVLLFFLSSFTCDRTLLQEDYGFFRAISLWPPLVLIGIYATALSASMSSLIGASRILHALARDDLFGVILAPAKVVSRGGNPWAAVLYSWGLVQLVLLAGKLNTLAAVVTVFYLVAYAAVDLSCLSLEWASAPNFRPTFSLFSWHTCLLGVASCLLMMFLISPGAAGGSLLLMGLLAALLTARGGPSSWGYVSQALLFHQVRKYLLRLDVRKDHVKFWRPQLLLLVGNPRGALPLLRLANQLKKGGLYVLGHVTLGDLDSLPSDPVQPQYGAWLSLVDRAQVKAFVDLTLSPSVRQGAQHLLRISGLESNSHPLP

SEQ ID NO: 94921 - protein, 631 aa, Artificial Sequence
  derived and/or modified sequence
MASESSPLLAYRLLGEEGVALPANGAGGPGGASARKLSTFLGVVVPTVLSMFSIVVFLRIGFVVGHAGLLQALAMLLVAYFILALTVLSVCAIATNGAVQGGGAYFMISRTLGPEVGGSIGLMFYLANVCGCAVSLLGLVESVLDVFGADATGPSGLRVLPQGYGWNLLYGSLLLGLVGGVCTLGAGLYARASFLTFLLVSGSLASVLISFVAVGPRDIRLTPRPGPNGSSLPPRFGHFTGFNSSTLKDNLGAGYAEDYTTGAVMNFASVFAVLFNGCTGIMAGANMSGELKDPSRAIPLGTIVAVAYTFFVYVLLFFLSSFTCDRTLLQEDYGFFRAISLWPPLVLIGIYATALSASMSSLIGASRILHALARDDLFGVILAPAKVVSRGGNPWAAVLYSWGLVQLVLLAGKLNTLAAVVTVFYLVAYAAVDLSCLSLEWASAPNFRPTFSLFSWHTCLLGVASCLLMMFLISPGAAGGSLLLMGLLAALLTARGGPSSWGYVSQALLFHQVRKYLLRLDVRKDHVKFWRPQLLLLVGNPRGALPLLRLANQLKKGGLYVLGHVTLGDLDSLPSDPVQPQYGAWLSLVDRAQVKAFVDLTLSPSVRQGAQHLLRISGLESGTLLPWGFRS

SEQ ID NO: 94922 - DNA, 1884 bp, Artificial Sequence
  derived and/or modified sequence
atggccagcgagagcagccccctgctggcctacagactgctgggcgaggagggcgtggccctgcccgccaacggcgccggcggccccggcggcgccagcgccagaaagctgagcaccttcctgggcgtggtggtgcccaccgtgctgagcatgttcagcatcgtggtgttcctgagaatcggcttcgtggtgggccacgccggcctgctgcaggccctggccatgctgctggtggcctacttcatcctggccctgaccgtgctgagcgtgtgcgccatcgccaccaacggcgccgtgcagggcggcggcgcctacttcatgatcagcagaaccctgggccccgaggtgggcggcagcatcggcctgatgttctacctggccaacgtgtgcggctgcgccgtgagcctgctgggcctggtggagagcgtgctggacgtgttcggcgccgacgccaccggccccagcggcctgagagtgctgccccagggctacggctggaacctgctgtacggcagcctgctgctgggcctggtgggcggcgtgtgcaccctgggcgccggcctgtacgccagagccagcttcctgaccttcctgctggtgagcggcagcctggccagcgtgctgatcagcttcgtggccgtgggccccagagacatcagactgacccccagacccggccccaacggcagcagcctgccccccagattcggccacttcaccggcttcaacagcagcaccctgaaggacaacctgggcgccggctacgccgaggactacaccaccggcgccgtgatgaacttcgccagcgtgttcgccgtgctgttcaacggctgcaccggcatcatggccggcgccaacatgagcggcgagctgaaggaccccagcagagccatccccctgggcaccatcgtggccgtggcctacaccttcttcgtgtacgtgctgctgttcttcctgagcagcttcacctgcgacagaaccctgctgcaggaggactacggcttcttcagagccatcagcctgtggccccccctggtgctgatcggcatctacgccaccgccctgagcgccagcatgagcagcctgatcggcgccagcagaatcctgcacgccctggccagagacgacctgttcggcgtgatcctggcccccgccaaggtggtgagcagaggcggcaacccctgggccgccgtgctgtacagctggggcctggtgcagctggtgctgctggccggcaagctgaacaccctggccgccgtggtgaccgtgttctacctggtggcctacgccgccgtggacctgagctgcctgagcctggagtgggccagcgcccccaacttcagacccaccttcagcctgttcagctggcacacctgcctgctgggcgtggccagctgcctgctgatgatgttcctgatcagccccggcgccgccggcggcagcctgctgctgatgggcctgctggccgccctgctgaccgccagaggcggccccagcagctggggctacgtgagccaggccctgctgttccaccaggtgagaaagtacctgctgagactggacgtgagaaaggaccacgtgaagttctggagaccccagctgctgctgctggtgggcaaccccagaggcgccctgcccctgctgagactggccaaccagctgaagaagggcggcctgtacgtgctgggccacgtgaccctgggcgacctggacagcctgcccagcgaccccgtgcagccccagtacggcgcctggctgagcctggtggacagagcccaggtgaaggccttcgtggacctgaccctgagccccagcgtgagacagggcgcccagcacctgctgagaatcagcggcctggagagcaacagccaccccctgccctag

SEQ ID NO: 94923 - DNA, 390 bp, Artificial Sequence
  derived and/or modified sequence
atggccagcgagagcagccccctgctggcctacagactgctgggcgaggagggcgtggccctgcccgccaacggcgccggcggccccggcggcgccagcgccagaaagctgagcaccttcctgggcgtggtggtgcccaccgtgctgagcatgttcagcatcgtggtgttcctgagaatcggcttcgtggtgggccacgccggcctgctgcaggccctggccatgctgctggtggcctacttcatcctggccctgaccgtgctgagcgtgtgcgccatcgccaccaacggcgccgtgcagggcggcggcgcctacttcatgatcagcagaaccctgggccccgaggtgggcggcagcatcggcctgatgttctacctggccaacgtgtag

SEQ ID NO: 94924 - DNA, 1896 bp, Artificial Sequence
  derived and/or modified sequence
atggccagcgagagcagccccctgctggcctacagactgctgggcgaggagggcgtggccctgcccgccaacggcgccggcggccccggcggcgccagcgccagaaagctgagcaccttcctgggcgtggtggtgcccaccgtgctgagcatgttcagcatcgtggtgttcctgagaatcggcttcgtggtgggccacgccggcctgctgcaggccctggccatgctgctggtggcctacttcatcctggccctgaccgtgctgagcgtgtgcgccatcgccaccaacggcgccgtgcagggcggcggcgcctacttcatgatcagcagaaccctgggccccgaggtgggcggcagcatcggcctgatgttctacctggccaacgtgtgcggctgcgccgtgagcctgctgggcctggtggagagcgtgctggacgtgttcggcgccgacgccaccggccccagcggcctgagagtgctgccccagggctacggctggaacctgctgtacggcagcctgctgctgggcctggtgggcggcgtgtgcaccctgggcgccggcctgtacgccagagccagcttcctgaccttcctgctggtgagcggcagcctggccagcgtgctgatcagcttcgtggccgtgggccccagagacatcagactgacccccagacccggccccaacggcagcagcctgccccccagattcggccacttcaccggcttcaacagcagcaccctgaaggacaacctgggcgccggctacgccgaggactacaccaccggcgccgtgatgaacttcgccagcgtgttcgccgtgctgttcaacggctgcaccggcatcatggccggcgccaacatgagcggcgagctgaaggaccccagcagagccatccccctgggcaccatcgtggccgtggcctacaccttcttcgtgtacgtgctgctgttcttcctgagcagcttcacctgcgacagaaccctgctgcaggaggactacggcttcttcagagccatcagcctgtggccccccctggtgctgatcggcatctacgccaccgccctgagcgccagcatgagcagcctgatcggcgccagcagaatcctgcacgccctggccagagacgacctgttcggcgtgatcctggcccccgccaaggtggtgagcagaggcggcaacccctgggccgccgtgctgtacagctggggcctggtgcagctggtgctgctggccggcaagctgaacaccctggccgccgtggtgaccgtgttctacctggtggcctacgccgccgtggacctgagctgcctgagcctggagtgggccagcgcccccaacttcagacccaccttcagcctgttcagctggcacacctgcctgctgggcgtggccagctgcctgctgatgatgttcctgatcagccccggcgccgccggcggcagcctgctgctgatgggcctgctggccgccctgctgaccgccagaggcggccccagcagctggggctacgtgagccaggccctgctgttccaccaggtgagaaagtacctgctgagactggacgtgagaaaggaccacgtgaagttctggagaccccagctgctgctgctggtgggcaaccccagaggcgccctgcccctgctgagactggccaaccagctgaagaagggcggcctgtacgtgctgggccacgtgaccctgggcgacctggacagcctgcccagcgaccccgtgcagccccagtacggcgcctggctgagcctggtggacagagcccaggtgaaggccttcgtggacctgaccctgagccccagcgtgagacagggcgcccagcacctgctgagaatcagcggcctggagagcggcaccctgctgccctggggcttcagaagctag

SEQ ID NO: 94925 - DNA, 1884 bp, Artificial Sequence
  derived and/or modified sequence
atggcctctgagagctccccccttctagcttatcgccttctaggggaagagggagtagcccttccggcaaatggtgcaggcggtcctgggggagcttctgctcgcaagctgtcgacattcttaggtgtggtcgtgccgaccgtgctgtcgatgttctcaatcgtagtctttctgagaattggattcgtggtcggacacgcagggctactccaggccctggcgatgctcctggtagcatatttcatcctggctctgaccgtactgagtgtgtgtgccatcgcaactaacggcgcagtgcagggcggtggcgcttattttatgatttctcgtacactgggccctgaggtgggaggaagcatcggtctcatgttttatttagctaacgtatgtggctgtgctgttagcctgctggggctcgtggagtctgtgttagacgtgttcggcgctgacgcgactggccccagcggtcttagagtgctgccccagggctatggctggaatctcctctacggatctcttctgctgggcctcgtgggcggtgtgtgcactctcggagccgggctgtatgcaagggcctccttcctcacctttttacttgtatccggcagtcttgcatcagtcttaatcagcttcgtcgccgtgggtccccgggacatacgcctgacgcctagacccggtcctaacgggtcgtccttaccacccaggtttggacatttcactggatttaattcttcgacgcttaaagataacctcggcgccggatatgcagaagattacactaccggggcggtgatgaatttcgcatccgtttttgccgtactgtttaacggctgcacaggcataatggctggcgctaatatgtcaggggagttgaaagatccttcccgggctattcccctgggaacaatcgtagccgtggcgtacaccttcttcgtatacgtgctcttgttcttcttgagttcatttacctgcgataggacattactgcaggaagattacggttttttcagagctattagcttatggccaccactggtgttgattggcatttacgccaccgcattatccgcatccatgtctagccttattggcgcttcacggattcttcacgccctggcccgagacgatttattcggagtgatcttagcaccagcgaaagtggttagcaggggcggtaatccatgggctgccgtactgtactcctggggccttgtgcagctggttctgctggctggaaagctcaacacactggccgccgtggttaccgttttttacctggtcgcatacgcagcggtagatctgtcatgcctgtccctggagtgggcaagcgccccgaatttcagacctactttctcactgttttcgtggcacacttgtctattaggcgtggcttcgtgtctcctgatgatgtttttaatttctccaggggcggccggcggcagcctgctgttaatggggttactggctgccctgttgacagcacgcggcggcccctctagttggggctatgtgtcccaagctctgctgtttcaccaagttcggaaatatctgctgcggcttgacgtgaggaaggatcacgtcaaattctggagaccacagcttcttctcctcgtcggaaaccctagaggcgcgctccctctgctccggctggccaaccaattgaaaaaaggcggactgtatgtgctaggccatgtgactctaggggatctcgatagcctgccatccgacccagtccagccgcagtacggtgcatggcttagtctcgtcgaccgggcacaggtgaaagctttcgttgatctcacgctcagcccctctgtgcgccagggagcacagcatctgctgcgtatctctggcctggagagcaatagccatcctctgccctag

SEQ ID NO: 94926 - DNA, 390 bp, Artificial Sequence
  derived and/or modified sequence
atggcctccgagagcagcccccttctggcctaccgcttgctgggtgaagagggggttgcattaccagcaaatggcgccggtgggccaggaggcgcatctgcaagaaagctgtcaacattcctaggcgtcgtagtccccacagtcctgtctatgttcagtatcgtagtgtttttgaggatcggctttgtagtcggtcacgccggtctcctgcaggctcttgccatgcttctggtggcctactttattttggccctgacggttctgtcggtttgcgccatagccacgaacggagccgttcaggggggcggcgcgtacttcatgatttcacgtactctgggaccggaagtgggagggagcattggactgatgttttatctggccaacgtgtag

SEQ ID NO: 94927 - DNA, 1896 bp, Artificial Sequence
  derived and/or modified sequence
atggcatccgaaagctctcctttgctagcttatcggctgctcggagaggagggcgtggctctgccagccaatggtgccggcggaccaggcggggcctcagccagaaaactatctaccttcctcggtgtggtggtcccaacagtgttgagcatgttctccatcgttgtgttcctgaggattgggtttgttgtgggacacgccgggctgctccaagctctagcaatgctgctcgtggcttatttcatcttagcattaacagtgctgtccgtctgcgccatagcaactaacggggcagtgcagggggggggagcctatttcatgatttccagaacactgggccctgaggtcggtggcagcattgggctgatgttctacctggccaatgtctgtggatgtgctgtttcccttctgggactggtggaaagcgtattagatgtgttcggtgcagatgctaccggaccaagcggcctgcgggtgcttccacagggatacggatggaacctgctgtatggctccctcctactcgggctcgtcggcggcgtgtgtaccttaggagccggactttacgctcgtgcatcatttctaacgtttttgctggttagtgggagcctcgctagcgttcttatttcgttcgtggcagtggggccccgtgatattcgtcttactcctagacctggccctaacggctcctctttgcctccacggttcggtcacttcaccggttttaattcctctactctaaaggacaaccttggggcaggctatgccgaagattacacaacaggggccgtgatgaacttcgcaagtgtgtttgctgttctgtttaacggctgtacaggcatcatggcaggagctaacatgtccggcgaactcaaagacccgtctcgcgctatcccccttggcacgatagtcgccgtggcctacacttttttcgtctatgtgctgctgttttttctgtcatctttcacctgcgaccgtaccctattgcaggaagactacggcttctttagagccatttccttgtggccaccacttgtgctgattggcatttatgccaccgcattgagtgcttccatgagttccttgattggggcttctcgtatacttcacgccttggccagagacgatctgtttggagttatcctggctcccgccaaggtcgtctcgagaggcgggaatccgtgggcagcagtgctgtacagctggggtctcgttcagctggttctcctcgctggcaagctgaacaccttggccgctgtggtgaccgtcttctacctggtcgcctacgcagctgttgatctgagctgcctgtcgctcgaatgggcttccgctcccaatttcagaccaactttttccctcttctcttggcatacatgcctcctcggagtggcctcgtgcctcttaatgatgttcctgatttcaccgggggccgcaggtggctccttgcttctgatgggcctcttagccgcgctactgacagcgcggggggggccttcttcatggggttatgtgtcccaggcgttgctgttccaccaggttcgaaagtatttgctgcgccttgacgtccgcaaggaccatgtgaagttctggcgaccgcagctgcttcttttggtgggcaatcccagaggggcactgccactgctgcggctcgcaaaccaacttaaaaaaggggggctttacgtcttagggcacgtaactctgggcgaccttgactctttacccagcgacccagtacagccgcagtacggggcttggttgagtttggtggaccgcgcccaggtgaaggcattcgtggacctaaccctgtccccctctgttcgccaaggggcccaacacttacttcgcattagcgggctggaatccggcaccctcctaccgtggggattcagaagctag

SEQ ID NO: 94928 - DNA, 1884 bp, Artificial Sequence
  derived and/or modified sequence
atggccagcgagagcagccccctgctggcctaccgcctgctgggggaggagggcgtggccctgcctgccaacggggccggcggccctggaggagccagcgccaggaagctgagcaccttcctgggcgtggtggtgcccaccgtgctgtccatgttcagcatcgtggtgttcctgcgcatcggctttgtggtgggccatgctggcctgctgcaggccctggccatgctgctggtggcctacttcatcctggccctgactgtgctgtctgtgtgtgccatcgccaccaacggggctgtgcagggcggcggggcctacttcatgatcagcaggaccctgggccctgaggtgggcggcagcatcggcctgatgttctacctggccaacgtgtgtggctgtgctgtgtccctgctgggcctggtggagagcgtgctggatgtgtttggagcagatgccaccggccccagcggcctgcgggtgctgccccagggctacggctggaacctgctgtatggcagcctgctgctgggcctggtgggcggcgtgtgcaccctgggcgccggcctgtatgcccgggccagcttcctgaccttcctgctggtgtctggcagcctggcctctgtgctgatcagctttgtggccgtgggcccccgggacatccggctgacccccaggcctggccccaacggcagcagcctgcccccacgcttcggccacttcaccggcttcaacagcagcaccctgaaggacaacctgggcgccggctatgcagaggactacaccactggagctgtgatgaactttgcctctgtgtttgctgtgctcttcaacggctgcaccggcatcatggccggggccaacatgtctggagagctgaaggaccccagccgggccatccccctgggcaccatcgtggccgtggcctacaccttctttgtgtatgtgctgctcttcttcctgagcagcttcacctgtgacaggaccctgctgcaggaggactatggcttcttccgggccatcagcctgtggccacccctggtgctgattggcatctatgccacagccctgagcgcctccatgagcagcctgattggagccagccgcatcctgcacgccctggccagagatgacctgtttggagtcatcctggccccagccaaggtggtgtccagaggaggcaacccctgggccgctgtgctgtacagctggggcctggtgcagctggtgctgctggccggcaagctgaacaccctggccgctgtggtgaccgtcttctacctggtggcctatgctgctgtggacctgagctgcctgagcctggagtgggccagcgcccccaacttccggcccaccttcagcctcttctcctggcacacctgcctgctgggcgtggccagctgcctgctgatgatgttcctgatcagccctggagctgctgggggcagcctgctgctgatgggcctgctggccgccctgctgacagcccggggcggccccagctcctggggctacgtgtcccaggccctgctcttccaccaggtgaggaagtacctgctgcggctggatgtgaggaaggaccacgtgaagttctggaggccccagctgctgctgctggtgggcaaccccaggggggccctgcccctgctgcggctggccaaccagctgaagaagggcggcctgtatgtgctgggccacgtgaccctgggggacctggacagcctgcccagcgaccctgtgcagccccagtacggggcctggctgagcctggtggaccgggcccaggtgaaggcctttgtggacctgaccctgagccccagcgtgcggcagggcgcccagcacctgctgcgcatcagcggcctggagagcaacagccaccccctgccctag

SEQ ID NO: 94929 - DNA, 390 bp, Artificial Sequence
  derived and/or modified sequence
atggccagcgagagcagccccctgctggcctaccgcctgctgggggaggagggcgtggccctgcctgccaacggggccggcggccctggaggagccagcgccaggaagctgagcaccttcctgggcgtggtggtgcccaccgtgctgtccatgttcagcatcgtggtgttcctgcgcatcggctttgtggtgggccatgctggcctgctgcaggccctggccatgctgctggtggcctacttcatcctggccctgactgtgctgtctgtgtgtgccatcgccaccaacggggctgtgcagggcggcggggcctacttcatgatcagcaggaccctgggccctgaggtgggcggcagcatcggcctgatgttctacctggccaacgtgtag

SEQ ID NO: 94930 - DNA, 1896 bp, Artificial Sequence
  derived and/or modified sequence
atggccagcgagagcagccccctgctggcctaccgcctgctgggggaggagggcgtggccctgcctgccaacggggccggcggccctggaggagccagcgccaggaagctgagcaccttcctgggcgtggtggtgcccaccgtgctgtccatgttcagcatcgtggtgttcctgcgcatcggctttgtggtgggccatgctggcctgctgcaggccctggccatgctgctggtggcctacttcatcctggccctgactgtgctgtctgtgtgtgccatcgccaccaacggggctgtgcagggcggcggggcctacttcatgatcagcaggaccctgggccctgaggtgggcggcagcatcggcctgatgttctacctggccaacgtgtgtggctgtgctgtgtccctgctgggcctggtggagagcgtgctggatgtgtttggagcagatgccaccggccccagcggcctgcgggtgctgccccagggctacggctggaacctgctgtatggcagcctgctgctgggcctggtgggcggcgtgtgcaccctgggcgccggcctgtatgcccgggccagcttcctgaccttcctgctggtgtctggcagcctggcctctgtgctgatcagctttgtggccgtgggcccccgggacatccggctgacccccaggcctggccccaacggcagcagcctgcccccacgcttcggccacttcaccggcttcaacagcagcaccctgaaggacaacctgggcgccggctatgcagaggactacaccactggagctgtgatgaactttgcctctgtgtttgctgtgctcttcaacggctgcaccggcatcatggccggggccaacatgtctggagagctgaaggaccccagccgggccatccccctgggcaccatcgtggccgtggcctacaccttctttgtgtatgtgctgctcttcttcctgagcagcttcacctgtgacaggaccctgctgcaggaggactatggcttcttccgggccatcagcctgtggccacccctggtgctgattggcatctatgccacagccctgagcgcctccatgagcagcctgattggagccagccgcatcctgcacgccctggccagagatgacctgtttggagtcatcctggccccagccaaggtggtgtccagaggaggcaacccctgggccgctgtgctgtacagctggggcctggtgcagctggtgctgctggccggcaagctgaacaccctggccgctgtggtgaccgtcttctacctggtggcctatgctgctgtggacctgagctgcctgagcctggagtgggccagcgcccccaacttccggcccaccttcagcctcttctcctggcacacctgcctgctgggcgtggccagctgcctgctgatgatgttcctgatcagccctggagctgctgggggcagcctgctgctgatgggcctgctggccgccctgctgacagcccggggcggccccagctcctggggctacgtgtcccaggccctgctcttccaccaggtgaggaagtacctgctgcggctggatgtgaggaaggaccacgtgaagttctggaggccccagctgctgctgctggtgggcaaccccaggggggccctgcccctgctgcggctggccaaccagctgaagaagggcggcctgtatgtgctgggccacgtgaccctgggggacctggacagcctgcccagcgaccctgtgcagccccagtacggggcctggctgagcctggtggaccgggcccaggtgaaggcctttgtggacctgaccctgagccccagcgtgcggcagggcgcccagcacctgctgcgcatcagcggcctggagagcggcaccctgctgccctggggcttccgctcctag

SEQ ID NO: 94931 - DNA, 1884 bp, Artificial Sequence
  derived and/or modified sequence
atggccagcgagagcagccccctgctggcctaccggctgctgggcgaggaaggcgtggctctccctgcgaatggtgcaggcggccctggcggagcttctgccagaaagctatcaacgttcctgggcgttgttgttcctaccgtgctcagcatgttctcaattgttgtttttctgcggatcggcttcgttgtgggtcatgccggactactccaggcactggcaatgctgcttgtggcttattttatattagctttaactgtattgtcagtatgcgccattgctaccaacggagcagttcagggtgggggcgcttactttatgatcagtaggacactgggccctgaggtcggcgggtctattgggttgatgttttaccttgcaaacgtttgcggatgtgccgttagcctgctgggcctcgtcgagtctgttctggacgttttcggagccgatgcaactggccccagcggactccgcgtgctgcctcaaggatatggctggaatctactgtacgggagtctgctgctcggcctggtgggtggtgtgtgtactcttggcgccggcctctacgcacgagcatccttcctcacgttcttgcttgtcagcggttcactcgcaagcgtgctaatctcttttgtggcagtgggtccacgggacatccggttgacccccaggccagggcccaacggctcttctttaccgcctcggtttggacatttcacagggtttaactcttctacactcaaggataacctgggagctggctacgccgaggactacacaaccggcgccgtcatgaatttcgcctccgtgtttgctgtgctctttaatggatgcacagggatcatggctggggctaacatgtccggcgaactcaaagacccatctcgcgcgatccctttagggacaatcgtggctgttgcatacacattcttcgtgtatgtcctcctgttttttctctcgtcttttacatgtgatcggactttgctccaagaagactacggattcttccgcgcgatcagcttgtggccccccttagtgctcatcggcatctacgctacagcactttccgcatctatgagcagcctgatcggcgcatccagaattctgcatgcgctagcccgggatgacctctttggcgtaatcctggcaccagccaaagtggtgagtcggggagggaatccttgggcagcagtgctgtattcctggggactggttcaattagtacttctggcaggaaagttaaatacactggccgcagtggtgacagttttctatctcgtcgcatatgctgcagttgatttgtcatgtctatccctggagtgggcttcagctccaaacttccgccccactttcagtcttttcagctggcatacctgtctgttgggagtggctagctgcttgctgatgatgttcctcatctccccaggcgctgcaggcggaagccttctgctcatgggcctactggccgccctgctgaccgccaggggaggaccttcgagctggggctatgtgagccaagctctgcttttccatcaagtaagaaagtacctcctgcggctggatgttcggaaagaccacgtgaagttctggcgccctcagcttctgctactcgtcggaaaccctaggggcgcgctgcctttactacgccttgctaatcaactgaaaaagggtgggttgtacgtcctcggccatgtgaccctgggtgacctagattcgctgccctccgatccagtacagcctcagtatggagcatggctgagcctcgtcgatagagctcaggtcaaggcctttgtggatctgacattaagcccgtcagttcgacaaggcgctcaacacctgttgcggatctcaggactggaatcaaatagccatcccttgccatag

SEQ ID NO: 94932 - DNA, 390 bp, Artificial Sequence
  derived and/or modified sequence
atggccagcgagagcagccccctgctggcctaccggctgctgggcgaggaaggggtggctctcccagccaacggtgcaggtggtccgggcggtgcaagcgcgcgaaaactatcgacgttcctgggcgttgttgttccaacggtgctttccatgttctccattgtggtgtttcttaggatcggtttcgttgttggtcacgcgggactgctccaggcccttgccatgcttctcgtggcctattttattcttgccctcacggtgctctctgtgtgcgccatcgccacaaacggcgcagtgcaaggaggcggggcctacttcatgatttccagaaccttaggccccgaggtggggggctctatcggtctaatgttttatctggcaaatgtgtag

SEQ ID NO: 94933 - DNA, 1896 bp, Artificial Sequence
  derived and/or modified sequence
atggccagcgagagcagccccctgctggcctaccggctgctgggcgaagaaggcgtagccttacctgcaaacggagctggaggacctggcggggctagcgccagaaaactgagtaccttcctgggggtcgtagttcccaccgttttgtctatgttttccatcgtcgttttcctcaggatcgggtttgttgtgggccatgcaggtcttctgcaggccctagctatgctcttggttgcctacttcattctggcgctaaccgttctgtcagtgtgcgccatcgcaaccaatggcgcagttcagggcggcggagcttatttcatgatcagccggactctgggcccggaagtcgggggatcaatcggcctgatgttttacctggcaaacgtctgcggatgtgccgtgtccctgttagggcttgtggagagcgtgcttgatgtcttcggcgctgatgcgactgggccttctggtttgagggttttaccacaggggtatggttggaacctgctctatggctctcttttgctgggcctcgttggcggggtgtgcactctcggggccggcctgtacgctcgtgcttcattcctgacttttttgttggtgtccggctctctcgcttctgtactgatcagcttcgttgcagtcggaccacgcgatatcaggttgactccacgtcccgggccaaatgggagttctctgcctcctaggttcgggcacttcactggcttcaattcctcaaccttgaaggacaatctcggggcgggctatgccgaagactataccacaggggccgtgatgaactttgcttctgttttcgccgtactgttcaacggctgcacgggcatcatggcaggtgccaatatgtcaggcgaactcaaggacccatctcgagcaattcccctgggtaccatcgtcgccgtggcgtacactttcttcgtgtacgtgcttctctttttcctcagtagttttacatgcgataggacactgcttcaagaagactacggcttcttccgcgccatctcgctgtggcctcctctggtcctaatcgggatttacgctactgcactcagcgcatcgatgagcagcttgattggcgcgagtagaattttacatgctctggcacgggacgacctttttggggttatcctggcccctgctaaggtggtgagcaggggcggcaacccatgggctgccgtgctctactcttggggcctggtacagctggtcctgttggccggaaagctaaacacattagccgcagtggtcaccgtcttctatttagtcgcttatgctgccgtggacctgagctgcctctccctagagtgggcctctgcaccaaacttccgccctacattctctctgttttcttggcatacgtgtctgctgggcgtcgcctcttgtctgctcatgatgttcttgatctcgcccggtgcggctgggggatccctactactgatgggtttgttggcagccctactgactgccagagggggacctagctcttggggatatgtaagtcaggccttgttgttccatcaagtgcgaaagtatctgcttcggcttgatgtgaggaaggaccacgtcaaattctggaggccccaactgttattattggtggggaaccctaggggcgccttgcccctcctgaggttggcgaaccagctcaagaaaggtggactctacgtcctgggccacgtcacccttggcgacctggacagtctaccttccgatccggtgcagccacagtacggggcatggctctctctcgtcgaccgcgcacaggtgaaggccttcgtggatctcacgttgtcccccagtgtgaggcaaggcgctcaacacctgctccgcataagtgggctggaaagtggcaccttactcccatggggctttcgctcctag

SEQ ID NO: 94934 - DNA, 1884 bp, Artificial Sequence
  derived and/or modified sequence
atggccagcgaatcctctccactgctggcctacagactcttaggggaagagggagtggccctgcctgctaatggtgctgggggtcccggtggggcaagtgcccgtaagctctccacgttcttaggtgtggtggtccccacagtgcttagtatgttctccattgttgtattcctgcggattggcttcgtggtaggccatgccggtctgttacaggccctggccatgctgctggtggcctatttcatcctggccctgacagtgttgtcagtctgtgcaatcgcaactaatggcgctgtgcagggaggcggtgcctacttcatgatatcccgaaccctcggacctgaagttggagggagcatcggcttaatgttttatctggctaacgtctgcggatgtgccgtcagcctgctggggctggtggagagtgttctcgatgtcttcggcgcagatgcgactggaccaagtggtctgcgcgtactgccccaagggtacggctggaatctactctatgggtcattgctactgggacttgtgggaggagtctgtacactcggcgcaggtttgtatgctagggccagttttctgacctttctcctcgtgagcgggtccctcgccagcgtgctaataagcttcgtggccgtcgggcctagggacattagactgaccccgcgacccggacctaatggatcgagtttaccacccaggttcggtcatttcactggatttaatagcagtaccctgaaggacaatttaggggctgggtatgctgaagactacacaacgggggcagtgatgaacttcgcaagcgtgtttgccgtcctcttcaacggctgcactggtattatggctggggctaacatgagcggtgaattgaaggacccttctagggcgatcccattgggaaccatcgtagcagtggcgtacacattctttgtctacgtgctcctgttcttcctgagttctttcacctgcgatcgaactctcctgcaggaggattatggatttttccgtgcaataagcctgtggccacctttggtgctgattggaatctacgcaacagctttgtcagctagcatgtcctctcttatcggtgcctcacgaatcctacacgccctggccagggacgacctttttggggttatccttgctcccgctaaagtggtgtctcgcggaggcaacccttgggcagccgtgctttacagctgggggcttgtgcagctagtcctacttgctggaaagttaaataccctagctgccgtggtaactgtgttctacctggttgcttacgcggcagtcgatctgtcttgcctgtccctcgagtgggccagtgcccctaacttcaggccgacgttttctctgttttcgtggcatacgtgcttactcggagtcgccagctgtcttctgatgatgttcctcataagtcccggagccgcaggcggttctctgttgttaatgggccttctggcggctttattgaccgctcggggaggcccttcctcatggggctatgttagccaagccttactgttccatcaggttaggaagtacttgttgcgcttagatgtgcgcaaagaccatgtgaagttttggcgaccccagttactgcttctggtgggtaaccctcgaggagccctgccgcttcttcggttggctaaccagctgaagaagggagggttgtacgtccttggacacgtcacactgggagacctagatagcctgccgtccgacccagtccagccacagtacggagcctggctgtccctggtggatcgggcacaggtcaaagcttttgttgacctgacgcttagcccttccgtgcgccaaggagcacaacacctacttaggatttctggactggagtccaacagtcacccactcccgtag

SEQ ID NO: 94935 - DNA, 390 bp, Artificial Sequence
  derived and/or modified sequence
atggcctctgaaagctcccctctcctggcatataggctgttgggagaggagggggtggccctgcctgcaaacggagccggaggcccaggcggagcttctgctagaaagctctctaccttcctaggggttgtcgtccccacggtgctgagcatgttttccatcgtggtgtttctccgcatcggattcgtcgtcggtcacgcaggcctgctgcaggccctcgcaatgctgctggtggcctactttatcctcgccctaaccgtcctgtctgtgtgtgccattgcaacaaacggagcagttcagggcggaggtgcatattttatgatctcccgcaccctcggacccgaagtgggcggatcaattggtctgatgttctatctcgccaatgtctag

SEQ ID NO: 94936 - DNA, 1896 bp, Artificial Sequence
  derived and/or modified sequence
atggcctccgaatcatcccctctcctcgcatataggctgctgggggaggaaggggtcgccttgcccgctaacggggctggagggcctggcggtgcgtctgcccgaaaactaagcacattcctgggtgtggtggtgcccacagtgttgagcatgttttctattgtcgtgtttctgaggataggctttgttgtggggcacgccggattgcttcaagctttggcaatgctgctcgtcgcctatttcatcctggctctgacggtgctctccgtctgcgccattgccacaaatggagcggtgcagggaggcggagcttattttatgataagcaggacattgggccctgaggttggcggttcaatcggactgatgttctatctggcaaacgtttgtggatgtgcagtgagtctcttaggcctggtggaatcagtgctggatgtcttcggtgctgatgcgacaggccctagcggccttagggtgctgccccaaggatatggctggaatttactttacggatcactactcctggggcttgttggaggcgtttgcaccctgggcgcaggactctacgccagagcgagtttcctgacctttttgcttgtaagtggatctcttgcaagtgtcctgatttcatttgtcgcagtggggccacgcgacatccgcctgacccctaggccaggaccaaacgggtcaagcctcccaccccgtttcggacatttcaccggttttaatagttccactcttaaagacaatttgggggctgggtacgccgaggactacactactggtgccgttatgaactttgcatcagtgtttgctgtcctctttaacggctgtaccgggatcatggctggcgcaaacatgtcaggcgaacttaaggacccgagcagggcaatccccctggggacaattgttgcagttgcgtacacctttttcgtctatgtgctgctgtttttcctgtctagtttcacgtgtgatcggaccctactgcaggaggattacggcttttttagagctattagcctgtggcctcccttggttctgatcggaatttatgctaccgccctctcagcaagtatgtcgtccctgattggagcttctaggatcctgcacgcgctggccagggacgacctttttggcgtgattcttgcgcctgcaaaggtggtcagccgtggcggtaacccttgggccgctgtcctttactcgtggggactggttcagctcgtcctcttggcaggaaagctcaatacactcgccgctgtggtgactgtcttttacctggtggcgtacgcagccgtcgacctgagctgcctgtccctggaatgggccagtgcacctaactttagacccacattctctcttttcagctggcacacttgcttactaggtgtagcctcttgcctcctgatgatgttcctgatttcccctggagctgctgggggttccctgctgctgatggggttgttagccgcactgctgacagcgagagggggtccatcttcctggggctacgtttcccaggccttgctgtttcatcaggtgagaaagtatttacttcgacttgatgtgcggaaagatcacgtgaaattctggcgaccccagctacttttgttggtcggcaatccaagaggggcactgccgcttctgcgcctggccaaccaattgaagaagggcggactttatgttttgggccacgtcacactgggggacctagatagcctccccagcgacccagtccagccgcagtatggagcatggttgagcctggtcgatcgcgcacaagtgaaagcgttcgtggatttgacactctctccatcagtcagacaaggagcccagcatctcctacgaatctccgggctggagtctggcacgctgctgccatgggggtttagaagttag

SEQ ID NO: 94937 - DNA, 2026 bp, Artificial Sequence
  derived and/or modified sequence
tcccggtagccgcagctgtcttttccggcccccgtgcactctccgcccgagcggagccccccggctcgcggggatcgcccccgagcgctgcgtcctgcgggtcacctaacccatttgtggcttcctctacctgtgctcagccatggccagcgagagctcacctctgctggcctaccggctcctgggggaggagggggttgccctccctgccaatggggccgggggtcctggaggggcgtctgcccggaagctgtccaccttcctgggtgtggtggtgcccactgtcctgtccatgttcagcatagttgtttttctgaggattgggttcgtggtgggtcatgctgggctactgcaggccctggccatgctgctggttgcctacttcatcctggcactcaccgtcctctctgtctgtgccatcgccaccaatggagccgtgcaggggggcggagcctacttcatgatcagccgcacactggggcccgaggtcgggggcagcattgggctcatgttctacctggctaacgtctgtggctgtgccgtctccctcctggggctggtggagtctgtgcttgatgtcttcggggccgatgccacagggcccagtgggctccgggtcctgccccagggctacggctggaacctgctgtatggctccctgctgctgggccttgtgggtggggtctgcaccctgggagccggcctctatgcccgggcctcattcctcacattcctgctggtctctggctccctggcctctgtgctcatcagttttgtggctgtggggccgagggacatccgcttgactcctaggcctggccccaatggctcctccctgccgccccggtttggccacttcaccggcttcaacagcagtaccctgaaggacaacttgggcgctggctatgctgaggactacaccacgggagccgtgatgaattttgccagcgtctttgctgtcctctttaacggctgtacaggcatcatggctggggccaacatgtcaggggagctgaaggaccccagccgggcgatccctctgggcacgatcgtcgccgtcgcctacaccttcttcgtctatgtcctgcttttctttctctccagcttcacttgtgacaggaccctgctgcaggaagactatgggttcttccgcgccatcagcctgtggcccccactggtgttgatcggaatctatgccacagcgctctcagcgtccatgagctcgctcattggtgcctcccgcatcctccatgccctggcccgggatgacctctttggcgtgatcttggcaccggccaaggttgtgtcccgagggggaaacccctgggcagctgtactttattcttggggcctggtgcagctggtgctcctggctgggaagctgaacacactggctgctgtggtcactgtcttctacctggtggcctatgctgccgtggacctgtcctgcctgagcctggagtgggcctcggcccccaacttccgccccaccttcagcctgttctcctggcacacctgcctgctgggggtggcctcctgcctgctcatgatgttcctcatcagtcctggcgcggctggtggctccctgctcctcatgggtctgctggctgccctgctcaccgcgcgaggaggccccagtagctggggctatgtcagccaggccttgcttttccaccaggtgcgtaagtatctgcttcggctggacgtccggaaggatcacgtgaagttctggcggccccagctgctgctcctggtggggaacccccggggcgccctgcctctgctgcggttggccaaccagcttaagaagggggggctgtatgtgctgggccacgtcaccctgggagacctcgactccctgccctcggaccctgtacagccgcagtatggggcatggctcagcctggtggaccgtgcccaggtgaaggcttttgtggatctaaccctctcaccctccgtgcgccagggggctcagcatctgctgcgaatctccggcctcgagtcaaactcgcatcccctgccgtga

SEQ ID NO: 94938 - DNA, 589 bp, Artificial Sequence
  derived and/or modified sequence
ttcctcttgcattgctagttaaggaaggagaggctggagaagcctgtgccgtcagagaacctttgcccctttccagaaccggtgccatccctagtctcaggaacataagggaaggggtggcccccaggagccgggaggggccttgaaacccctgctgacaggtcacctaacccatttgtggcttcctctacctgtgctcagccatggccagcgagagctcacctctgctggcctaccggctcctgggggaggagggggttgccctccctgccaatggggccgggggtcctggaggggcgtctgcccggaagctgtccaccttcctgggtgtggtggtgcccactgtcctgtccatgttcagcatagttgtttttctgaggattgggttcgtggtgggtcatgctgggctactgcaggccctggccatgctgctggttgcctacttcatcctggcactcaccgtcctctctgtctgtgccatcgccaccaatggagccgtgcaggggggcggagcctacttcatgatcagccgcacactggggcccgaggtcgggggcagcattgggctcatgttctacctggctaacgt

SEQ ID NO: 94939 - DNA, 2089 bp, Artificial Sequence
  derived and/or modified sequence
aggctccaggcctggcatcccggtagccgcagctgtcttttccggcccccgtgcactctccgcccgagcggagccccccggctcgcggggatcgcccccgagcgctgcgtcctgcgggtcacctaacccatttgtggcttcctctacctgtgctcagccatggccagcgagagctcacctctgctggcctaccggctcctgggggaggagggggttgccctccctgccaatggggccgggggtcctggaggggcgtctgcccggaagctgtccaccttcctgggtgtggtggtgcccactgtcctgtccatgttcagcatagttgtttttctgaggattgggttcgtggtgggtcatgctgggctactgcaggccctggccatgctgctggttgcctacttcatcctggcactcaccgtcctctctgtctgtgccatcgccaccaatggagccgtgcaggggggcggagcctacttcatgatcagccgcacactggggcccgaggtcgggggcagcattgggctcatgttctacctggctaacgtctgtggctgtgccgtctccctcctggggctggtggagtctgtgcttgatgtcttcggggccgatgccacagggcccagtgggctccgggtcctgccccagggctacggctggaacctgctgtatggctccctgctgctgggccttgtgggtggggtctgcaccctgggagccggcctctatgcccgggcctcattcctcacattcctgctggtctctggctccctggcctctgtgctcatcagttttgtggctgtggggccgagggacatccgcttgactcctaggcctggccccaatggctcctccctgccgccccggtttggccacttcaccggcttcaacagcagtaccctgaaggacaacttgggcgctggctatgctgaggactacaccacgggagccgtgatgaattttgccagcgtctttgctgtcctctttaacggctgtacaggcatcatggctggggccaacatgtcaggggagctgaaggaccccagccgggcgatccctctgggcacgatcgtcgccgtcgcctacaccttcttcgtctatgtcctgcttttctttctctccagcttcacttgtgacaggaccctgctgcaggaagactatgggttcttccgcgccatcagcctgtggcccccactggtgttgatcggaatctatgccacagcgctctcagcgtccatgagctcgctcattggtgcctcccgcatcctccatgccctggcccgggatgacctctttggcgtgatcttggcaccggccaaggttgtgtcccgagggggaaacccctgggcagctgtactttattcttggggcctggtgcagctggtgctcctggctgggaagctgaacacactggctgctgtggtcactgtcttctacctggtggcctatgctgccgtggacctgtcctgcctgagcctggagtgggcctcggcccccaacttccgccccaccttcagcctgttctcctggcacacctgcctgctgggggtggcctcctgcctgctcatgatgttcctcatcagtcctggcgcggctggtggctccctgctcctcatgggtctgctggctgccctgctcaccgcgcgaggaggccccagtagctggggctatgtcagccaggccttgcttttccaccaggtgcgtaagtatctgcttcggctggacgtccggaaggatcacgtgaagttctggcggccccagctgctgctcctggtggggaacccccggggcgccctgcctctgctgcggttggccaaccagcttaagaagggggggctgtatgtgctgggccacgtcaccctgggagacctcgactccctgccctcggaccctgtacagccgcagtatggggcatggctcagcctggtggaccgtgcccaggtgaaggcttttgtggatctaaccctctcaccctccgtgcgccagggggctcagcatctgctgcgaatctccggcctcgagtctgggacgctattaccctggggattcaggtcatgagcttggctgatcagggtgtctggtttgcacaaca

SEQ ID NO: 94940 - protein, 538 aa, Artificial Sequence
  derived and/or modified sequence
MASESSPLLAYRLLGEEGVALPANGAGGPGGASARKLSTFLGVVVPTVLSMFSIVVFLRIDATGPSGLRVLPQGYGWNLLYGSLLLGLVGGVCTLGAGLYARASFLTFLLVSGSLASVLISFVAVGPRDIRLTPRPGPNGSSLPPRFGHFTGFNSSTLKDNLGAGYAEDYTTGAVMNFASVFAVLFNGCTGIMAGANMSGELKDPSRAIPLGTIVAVAYTFFVYVLLFFLSSFTCDRTLLQEDYGFFRAISLWPPLVLIGIYATALSASMSSLIGASRILHALARDDLFGVILAPAKVVSRGGNPWAAVLYSWGLVQLVLLAGKLNTLAAVVTVFYLVAYAAVDLSCLSLEWASAPNFRPTFSLFSWHTCLLGVASCLLMMFLISPGAAGGSLLLMGLLAALLTARGGPSSWGYVSQALLFHQVRKYLLRLDVRKDHVKFWRPQLLLLVGNPRGALPLLRLANQLKKGGLYVLGHVTLGDLDSLPSDPVQPQYGAWLSLVDRAQVKAFVDLTLSPSVRQGAQHLLRISGLESNSHPLP

SEQ ID NO: 94941 - DNA, 1617 bp, Artificial Sequence
  derived and/or modified sequence
atggccagcgagagcagccccctgctggcctacagactgctgggcgaggagggcgtggccctgcccgccaacggcgccggcggccccggcggcgccagcgccagaaagctgagcaccttcctgggcgtggtggtgcccaccgtgctgagcatgttcagcatcgtggtgttcctgagaatcgacgccaccggccccagcggcctgagagtgctgccccagggctacggctggaacctgctgtacggcagcctgctgctgggcctggtgggcggcgtgtgcaccctgggcgccggcctgtacgccagagccagcttcctgaccttcctgctggtgagcggcagcctggccagcgtgctgatcagcttcgtggccgtgggccccagagacatcagactgacccccagacccggccccaacggcagcagcctgccccccagattcggccacttcaccggcttcaacagcagcaccctgaaggacaacctgggcgccggctacgccgaggactacaccaccggcgccgtgatgaacttcgccagcgtgttcgccgtgctgttcaacggctgcaccggcatcatggccggcgccaacatgagcggcgagctgaaggaccccagcagagccatccccctgggcaccatcgtggccgtggcctacaccttcttcgtgtacgtgctgctgttcttcctgagcagcttcacctgcgacagaaccctgctgcaggaggactacggcttcttcagagccatcagcctgtggccccccctggtgctgatcggcatctacgccaccgccctgagcgccagcatgagcagcctgatcggcgccagcagaatcctgcacgccctggccagagacgacctgttcggcgtgatcctggcccccgccaaggtggtgagcagaggcggcaacccctgggccgccgtgctgtacagctggggcctggtgcagctggtgctgctggccggcaagctgaacaccctggccgccgtggtgaccgtgttctacctggtggcctacgccgccgtggacctgagctgcctgagcctggagtgggccagcgcccccaacttcagacccaccttcagcctgttcagctggcacacctgcctgctgggcgtggccagctgcctgctgatgatgttcctgatcagccccggcgccgccggcggcagcctgctgctgatgggcctgctggccgccctgctgaccgccagaggcggccccagcagctggggctacgtgagccaggccctgctgttccaccaggtgagaaagtacctgctgagactggacgtgagaaaggaccacgtgaagttctggagaccccagctgctgctgctggtgggcaaccccagaggcgccctgcccctgctgagactggccaaccagctgaagaagggcggcctgtacgtgctgggccacgtgaccctgggcgacctggacagcctgcccagcgaccccgtgcagccccagtacggcgcctggctgagcctggtggacagagcccaggtgaaggccttcgtggacctgaccctgagccccagcgtgagacagggcgcccagcacctgctgagaatcagcggcctggagagcaacagccaccccctgccctag

SEQ ID NO: 94942 - DNA, 1617 bp, Artificial Sequence
  derived and/or modified sequence
atggcgtctgagagctcaccattacttgcttatcgactgctgggtgaggaaggagttgcactgcccgcaaacggagccgggggccctggtggagcctcagctcgcaaactgagcacatttttgggggtcgtcgtccccactgtgctcagcatgttcagtatcgtggtgttcctacgcattgacgccactggcccaagcgggctccgcgtgctgccccaaggctatggttggaatttattgtatggatcccttttgctgggacttgtgggaggcgtgtgcaccttaggggccggtttatatgcgagagcctccttcctgacatttctgctcgtgtccggttccctggcctctgtgcttatctcctttgtcgctgtcggcccacgagatatcagactgacaccacgacctggacccaatggctcctctttacctccccgctttggacacttcaccggattcaattcctcaaccctgaaagacaatctcggtgctggttacgctgaagattacacaaccggggctgtaatgaactttgccagtgtcttcgcagtgttattcaacggttgtaccgggatcatggctggagcaaatatgtctggagagcttaaagacccatcaagagctattccgctggggactattgtggccgtggcatacacattttttgtgtacgtactcctcttctttcttagctctttcacatgtgatcgcacccttctacaggaggactacggcttcttccgtgccatatccctctggcctcccttagtgctgatcggaatttatgccacagcgctgtcagccagcatgtcaagcctgattggcgccagccggatactccatgccttggcacgggacgacctctttggagtcatccttgcccctgccaaagtggtcagcagaggcgggaatccttgggcggctgtgctctacagctggggcctagttcaactggtcctcttggctggtaaactaaataccctggctgccgtcgtgaccgtgttttacttggttgcgtatgctgccgtggacctgagttgtcttagtttagagtgggcttctgctccaaactttcggcccaccttctcacttttcagctggcacacttgcctcctcggcgtggcctcttgtctccttatgatgtttctgatctcccccggagcagctggcgggtccctgttactgatgggcctcctggccgcactcttgacggcaagaggcggtcctagcagctggggctacgttagccaggcgctgctattccaccaggtgcgaaaatatttactgcggttggacgtgaggaaagaccacgtgaaattttggcggcctcagctcctgcttttggtggggaacccacgcggggccctgccactccttaggttagcaaatcagttgaagaaagggggcctgtacgtcttgggccacgtgacgctgggagacctggactctttacctagcgatcccgtgcaaccccaatatggagcctggctgagtctcgttgatcgggcgcaggtgaaagcttttgttgacctcaccctatcacctagtgtcaggcaaggcgcccagcacctgctcagaattagcggactcgagagcaattcacatcctctgccttag

SEQ ID NO: 94943 - DNA, 1617 bp, Artificial Sequence
  derived and/or modified sequence
atggcttctgaatcgagccccctccttgcgtaccgcttgttaggtgaagaaggggtcgcactgcccgcaaatggcgccggcggcccaggaggagcaagcgcgagaaaactgtccacattccttggcgtggtggtgccaaccgtactgagtatgttttccatagtggtgtttctacggatcgatgccactggtccttctggcctccgagttctcccacagggatatggctggaacctcctgtatggttctttactgctgggcctggtcggcggcgtctgtaccctgggggctgggctctatgcaagagcctccttcctcacatttctactggtgtcaggcagtctcgcgtctgtattaatcagcttcgtggcagtgggcccacgggatatacgcctcacaccccggccaggcccgaacggaagctcgcttcccccaagattcggacatttcacaggatttaatagcagcaccctcaaggataatttgggggctggctacgccgaagactacactaccggcgcggtgatgaattttgcttccgtcttcgcggttcttttcaatggttgcacggggatcatggctggagcgaacatgtccggcgagctgaaagatccatctagggccattcccttaggaacgatcgtcgccgttgcatatactttcttcgtttatgtcctgctgtttttccttagcagcttcacctgcgatcgcacactgttgcaggaagattatggcttcttcagggccatctccctctggcctcccctggtgcttattgggatctacgcaacagctctctcagccagtatgtcctctttgatcggcgcctctaggattctccatgcactggcgcgcgacgacctgtttggagttatcctggcacccgccaaggtagtgtccaggggcgggaatccatgggctgcagtcctctacagttggggtttagttcagttggtcctgctcgccgggaaacttaatacactcgctgccgttgtgaccgttttttaccttgttgcttatgctgccgttgacctctcgtgtcttagcctggagtgggccagcgcccctaatttcaggcccacgtttagtctgttcagctggcatacttgcctgctgggcgtggcttcttgcctcctcatgatgtttctaatctctccaggggcagccggaggctctctactgctcatggggctgctcgcggctctcctgactgctagaggcggacccagcagttgggggtacgttagtcaggcactcttgttccaccaagtgcggaagtatcttctccgcctggatgtgagaaaagaccatgtgaagttttggcgcccccaacttctattgctggtggggaacccgcggggcgccctgcctcttctgcgccttgctaaccagctgaagaagggcggcctatatgtgctcgggcatgtgaccttaggggacctggattcactgcctagcgaccccgttcagccccagtacggggcatggctgtccctggtggaccgggctcaggtgaaggccttcgtggacctgactctgtctccatccgtcaggcagggggcacaacacttgttgcgcatatcagggctagagagcaacagccatcccttaccatag

SEQ ID NO: 94944 - DNA, 1617 bp, Artificial Sequence
  derived and/or modified sequence
atggccagcgagagcagccccctgctggcctaccgcctgctgggggaggagggcgtggccctgcctgccaacggggccggcggccctggaggagccagcgccaggaagctgagcaccttcctgggcgtggtggtgcccaccgtgctgtccatgttcagcatcgtggtgttcctgagaattgatgccaccggccccagcggcctgcgggtgctgccccagggctacggctggaacctgctgtatggcagcctgctgctgggcctggtgggcggcgtgtgcaccctgggcgccggcctgtatgcccgggccagcttcctgaccttcctgctggtgtctggcagcctggcctctgtgctgatcagctttgtggccgtgggcccccgggacatccggctgaccccccggcccggccccaacggcagcagcctgccccccaggtttggccacttcaccggcttcaacagcagcaccctgaaggacaacctgggcgccggctatgcagaggactacaccaccggggctgtgatgaactttgcctctgtgtttgctgtgctcttcaacggctgcaccggcatcatggccggggccaacatgtctggagagctgaaggaccccagccgggccatccccctgggcaccatcgtggccgtggcctacaccttctttgtgtatgtgctgctcttcttcctgagcagcttcacctgtgacaggaccctgctgcaggaggactatggcttcttccgggccatcagcctgtggccacccctggtgctgattggcatctatgccacagccctgagcgcctccatgagcagcctcatcggggccagccgcatcctgcacgccctggccagagatgacctgtttggagtcatcctggccccagccaaggtggtgtcccggggcggcaacccctgggccgctgtgctgtacagctggggcctggtgcagctggtgctgctggccggcaagctgaacaccctggccgctgtggtgacagtgttctacctggtggcctatgctgctgtggacctgagctgcctgagcctggagtgggccagcgcccccaacttccggcccaccttcagcctcttctcctggcacacctgcctgctgggcgtggccagctgcctgctgatgatgttcctgatcagccctggagctgctgggggcagcctgctgctgatgggcctgctggccgccctgctgacagcccggggcggccccagctcctggggctacgtgtcccaggccctgctcttccaccaggtgaggaagtacctgctgcggctggatgtgaggaaggaccacgtgaagttctggaggccccagctgctgctgctggtgggcaaccccaggggggccctgcccctgctgcggctggccaaccagctgaagaagggcggcctgtatgtgctgggccacgtgaccctgggggacctggacagcctgcccagcgaccctgtgcagccccagtatggagcctggctgagcctggtggaccgggcccaggtgaaggcctttgtggacctgaccctgagccccagcgtgcggcagggcgcccagcacctgctgcgcatcagcggcctggagagcaacagccaccccctgccctag

SEQ ID NO: 94945 - DNA, 1617 bp, Artificial Sequence
  derived and/or modified sequence
atggccagcgagagcagccccctgctggcctaccggctgctgggcgaggaaggagtcgcactgccagcgaatggggctggggggcctgggggcgcttccgccaggaaactgtcaacatttctgggggttgtggtccctacagtgttatccatgttttctatagttgtgttcctacgcatcgacgcaaccggcccttctggccttcgggtgttgcctcagggctacggatggaacttgctctatggatcgctcttgttaggcttagtcgggggtgtgtgtacgttgggcgcaggcctgtacgcgcgggcgagcttcctcacattcttgttagtctctggaagtctcgcaagcgtgttgattagcttcgtcgctgtcggccctagggatattaggctaacgccacggcctgggccaaatggctcctccttacctcctagatttggccacttcacaggtttcaactccagtacactgaaagacaatctcggcgccggctacgccgaggactacaccaccggcgccgttatgaatttcgcatctgtgtttgccgtgctttttaacggatgtacaggcatcatggcgggggcgaacatgagcggtgaactgaaggatccatcccgggctattcctctgggaactatagtagcagtggcgtacacatttttcgtttatgtgctgctattcttcctgtcctctttcacatgcgacaggaccttgctgcaggaggattacggtttcttcagagctatttccttatggccccccctggtcttgatcggaatctatgccaccgccctctccgcttccatgtcgtctctcataggggcctcccgtatcctgcacgccctggctcgggacgacttatttggtgtgatcctggctccagctaaggtggtcagtcgagggggcaatccttgggccgctgtcctttattcatggggcctcgtgcagttggtgctcctggcagggaagctcaacacacttgccgcagtagttaccgtgttttatctggttgcctacgccgcagtagatctctcatgcctttccttggagtgggcctccgcacccaacttccgaccgacattctcgttgttctcgtggcatacatgcctcctgggcgtcgcaagttgcctgcttatgatgttccttatcagtcccggagcagctggcggttcactgctgttgatgggtctactggccgctttgctcactgcgaggggcggaccaagctcttgggggtacgtttcgcaggcgctactcttccaccaggtgcgaaagtatcttttgagactggatgtgaggaaagaccatgttaaattttggaggccccagctgctgctgctcgtaggaaatcccaggggtgcactgccattgctgaggctggctaaccagctgaaaaaaggagggttgtacgtgctgggccacgttacattgggcgacttagatagcctgccttcagaccccgtccagccacagtacggcgcttggctttcccttgtcgatagagcgcaggttaaagcctttgtcgatctgaccctgagcccctccgtcagacagggtgctcagcacctgttgcgcatatcaggcctcgagtcaaattcacatcccctgccctag

SEQ ID NO: 94946 - DNA, 1617 bp, Artificial Sequence
  derived and/or modified sequence
atggccagcgagagcagccccctgctggcctaccggctgctgggcgaagagggagtcgctttgcctgctaatggagccgggggccctggcggagcctccgcgcggaagctctccaccttcctcggggttgtggtgcccacggtgctgtcaatgttttctattgtcgtgtttttgcgcattgatgcaactgggccttccggtctgcgagtcctgccacaaggatatggctggaacctgctgtacgggtcacttctactaggattggtgggaggcgtgtgtacgttgggggcagggctttatgcacgtgccagcttcctaacatttttgctggtgtccgggtctttggcctctgtactaattagcttcgtggccgtcggacccagagatattaggcttaccccacgcccagggcccaatgggagctctttacctccccggttcgggcatttcactggattcaatagcagtacactcaaagacaatttgggggccgggtatgcggaagactacaccacaggcgctgttatgaatttcgcaagcgtttttgcagtgctgtttaatggttgtaccggtatcatggctggtgccaatatgagcggcgaactcaaggacccctccagagccatccccctggggactatcgtcgccgtggcatatacattcttcgtttacgtgctcttattcttcttaagtagctttacatgtgataggacgttgctccaggaggactacggattttttagagctatcagcttatggcctcccttggtgctgattggcatctatgccaccgccttgtctgcatccatgagttccttgattggggcatctcgcatactccatgcactggcacgagatgatttatttggggtaatcctcgcgcccgctaaagttgtctctcggggcggtaacccctgggcagcggttctgtattcttggggcctggtccagctcgtgctgttagccggcaagttaaacactctcgccgccgtcgtgactgtgttttacctggtggcctacgccgccgttgacctgtcatgcttatctctcgagtgggcaagtgcgccgaactttcgccctacattcagtctgttctcatggcacacttgtctacttggggtggccagctgcttgttgatgatgtttttgatatctccgggcgctgcaggcggctcattgctgctgatggggttactagccgctctcttaaccgccaggggaggaccctcttcctgggggtacgtatctcaggcattgctgttccaccaagtgagaaagtacctcttaaggcttgatgtgcgcaaggaccatgttaaattttggcgcccgcagctattgttattggtggggaaccctcgcggcgcacttcccctactgcgactcgccaatcagctgaaaaaaggcggtctatacgtgctggggcacgttacacttggcgacctggatagccttccttccgaccctgtgcaaccccagtacggggcctggctctccctggtggatcgtgcccaagtgaaggcttttgtcgaccttactctgtcccccagcgtacggcagggggcccaacacctgttgcggatttctggactggagagcaattcgcatcccctgccttag

SEQ ID NO: 94947 - DNA, 1617 bp, Artificial Sequence
  derived and/or modified sequence
atggcatccgagtcttcaccgcttctggcgtatcgcctcctcggggaggagggcgtcgcgctcccagctaatggcgctggaggccctggtggtgcatccgcgaggaaactgtctacttttctgggagttgtcgtcccaacagtcctttctatgttctcaatagtcgtattcttgaggattgacgccaccggcccatcagggctaagagtgttgccacaggggtacggctggaacctgctctacggctctctgctactgggcctagtggggggagtgtgtacactgggggctggcctttatgcaagggcaagtttcctgacctttttattggtatccggctctcttgcctctgtgctgatatcatttgtggccgtgggcccaagggatatcaggctgacccctagacctggaccaaacggaagcagcctccctccccgattcggccattttactggattcaacagctcaacactcaaagataatcttggcgctggatatgcagaggactacaccacaggagccgtgatgaacttcgctagtgtgttcgcagtattatttaatggttgtactggcatcatggctggtgcaaacatgtcgggagaactgaaagacccttcccgcgctatccctcttggcaccatagtggctgtcgcatacacctttttcgtctacgttctgctgttcttcctgagctcctttacatgcgatcgcactctgcttcaggaggattacggcttcttccgggctatctctttatggccacccctcgtcctgattgggatctatgccacagcactatccgccagcatgtcaagtctaattggagcaagtagaattttgcacgccttagccagggatgacctcttcggagtcatccttgccccagccaaggtcgtgtcaagaggcggtaacccttgggctgctgtactgtactcatggggcctagtacagctggtgcttctcgctggcaaactgaataccctcgctgctgtggttactgttttttacctggtggcatacgccgcagtggacctaagctgcttgagcttagagtgggcttcggcgcctaactttcgccctacgttcagcctgttctcctggcacacttgcctcttaggggttgccagctgcttattgatgatgttcctgattagtcctggggctgccggtggttctctgttactcatgggcctcctggcggctttgctgactgctcggggaggaccctctagctggggttatgtgtctcaggccctgctctttcaccaggtccgcaagtatttgctccgtctggatgtccggaaggatcacgtgaagttctggagaccccagctcctcctgctggtcggcaacccgagaggcgcattgccactgttacgactggccaaccaacttaaaaaaggcggactgtatgtcctcggccatgtgactcttggagatctggatagcctgccttctgatcctgtacagccacagtatggggcttggctgagtcttgtggaccgagctcaggttaaagcctttgtggatctgacgcttagcccctccgtcagacaaggggctcagcacctgctgcggataagcggactggagtctaattcacaccccctcccttag

SEQ ID NO: 94948 - DNA, 1617 bp, Artificial Sequence
  derived and/or modified sequence
atggcgagcgagagtagcccgctgctagcataccgccttttaggtgaggagggggtcgctttgccagccaatggcgcagggggaccaggtggcgctagcgccagaaaactctccactttcctcggcgtggtggtgcccactgtcctgagcatgttttctatcgtggtgttcctgagaattgatgctacaggccctagtggactgagagtgctccctcagggttacgggtggaacttactgtacgggagtctcctgctcgggctggtcggcggagtttgtacactgggtgcgggattgtatgcccgtgccagttttctgacatttctacttgttagcggcagccttgccagtgtgctgattagctttgtcgccgtcggacccagagatatcaggctcaccccccgaccaggcccaaacggaagcagcctccccccaaggttcggacatttcaccggctttaatagttccaccctgaaggacaaccttggggcaggctatgccgaagattacacaaccggagctgtgatgaatttcgcatctgtttttgctgtccttttcaatggatgcacaggcattatggccggagccaatatgtccggtgagctcaaggaccccagccgagccatcccattaggaactattgttgcggtggcgtacacatttttcgtgtacgtactgctcttctttctctctagtttcacgtgtgataggaccctgcttcaagaggactacggcttttttagagctatttccctgtggcctcccctcgtgctgattggcatctacgctacagccctgtcagcctccatgtcctcccttattggtgcaagccgcatcctgcatgcccttgctagagacgatctcttcggcgtgatacttgcgcctgcaaaagttgtaagcagaggcggtaacccttgggccgctgtcctttactcatggggactcgtacaactcgtgttgctggccggaaaactgaacaccctcgccgcagtggtcaccgtcttctacctcgtcgcttacgcggcagtcgacctgtcctgcctgtctctggagtgggcgagtgctccaaattttaggccgactttctctctcttctcctggcatacctgcctgttgggagtggcctcatgtcttctgatgatgtttttaatttcaccaggggcagccggtggatcattattacttatgggtctgctggctgccttgctgaccgcacgcggaggacctagttcctggggatatgtctcccaggccctcctttttcatcaagttcgaaaatatttgcttcgcctggacgtgaggaaagaccatgtaaagttttggcggccacagttactgctgctcgtgggtaatcctagaggcgctctgcccctgctgcggcttgccaatcagctgaagaagggagggctgtatgtcctcggccacgtgacactgggcgatctcgacagtctgcccagcgatcctgttcagccccaatatggtgcatggctgtctctcgtcgacagagctcaggttaaagcctttgtggacctaacattgagcccctctgtcagacagggagcacagcatctgctacggattagtggcctggaatctaacagccatcccctaccctag

SEQ ID NO: 94949 - DNA, 1759 bp, Artificial Sequence
  derived and/or modified sequence
tcccggtagccgcagctgtcttttccggcccccgtgcactctccgcccgagcggagccccccggctcgcggggatcgcccccgagcgctgcgtcctgcgggtcacctaacccatttgtggcttcctctacctgtgctcagccatggccagcgagagctcacctctgctggcctaccggctcctgggggaggagggggttgccctccctgccaatggggccgggggtcctggaggggcgtctgcccggaagctgtccaccttcctgggtgtggtggtgcccactgtcctgtccatgttcagcatagttgtttttctgaggattgatgccacagggcccagtgggctccgggtcctgccccagggctacggctggaacctgctgtatggctccctgctgctgggccttgtgggtggggtctgcaccctgggagccggcctctatgcccgggcctcattcctcacattcctgctggtctctggctccctggcctctgtgctcatcagttttgtggctgtggggccgagggacatccgcttgactcctaggcctggccccaatggctcctccctgccgccccggtttggccacttcaccggcttcaacagcagtaccctgaaggacaacttgggcgctggctatgctgaggactacaccacgggagccgtgatgaattttgccagcgtctttgctgtcctctttaacggctgtacaggcatcatggctggggccaacatgtcaggggagctgaaggaccccagccgggcgatccctctgggcacgatcgtcgccgtcgcctacaccttcttcgtctatgtcctgcttttctttctctccagcttcacttgtgacaggaccctgctgcaggaagactatgggttcttccgcgccatcagcctgtggcccccactggtgttgatcggaatctatgccacagcgctctcagcgtccatgagctcgctcattggtgcctcccgcatcctccatgccctggcccgggatgacctctttggcgtgatcttggcaccggccaaggttgtgtcccgagggggaaacccctgggcagctgtactttattcttggggcctggtgcagctggtgctcctggctgggaagctgaacacactggctgctgtggtcactgtcttctacctggtggcctatgctgccgtggacctgtcctgcctgagcctggagtgggcctcggcccccaacttccgccccaccttcagcctgttctcctggcacacctgcctgctgggggtggcctcctgcctgctcatgatgttcctcatcagtcctggcgcggctggtggctccctgctcctcatgggtctgctggctgccctgctcaccgcgcgaggaggccccagtagctggggctatgtcagccaggccttgcttttccaccaggtgcgtaagtatctgcttcggctggacgtccggaaggatcacgtgaagttctggcggccccagctgctgctcctggtggggaacccccggggcgccctgcctctgctgcggttggccaaccagcttaagaagggggggctgtatgtgctgggccacgtcaccctgggagacctcgactccctgccctcggaccctgtacagccgcagtatggggcatggctcagcctggtggaccgtgcccaggtgaaggcttttgtggatctaaccctctcaccctccgtgcgccagggggctcagcatctgctgcgaatctccggcctcgagtcaaactcgcatcccctgccgtga

SEQ ID NO: 94950 - DNA, 1912 bp, Artificial Sequence
  derived and/or modified sequence
cccggtagccgcagctgtcttttccggcccccgtgcactctccgcccgagcggagccccccggctcgcggggatcgcccccgagcgctgcgtcctgcgggtgggtcacctaacccatttgtggcttcctctacctgtgctcagccatggccagcgagagctcacctctgctggcctaccggctcctgggggaggagggggttgccctccctgccaatggggccgggggtcctggaggggcgtctgcccggaagctgtccaccttcctgggtgtggtggtgcccactgtcctgtccatgttcagcatagttgtttttctgaggattgatgccacagggcccagtgggctccgggtcctgccccagggctacggctggaacctgctgtatggctccctgctgctgggccttgtgggtggggtctgcaccctgggagccggcctctatgcccgggcctcattcctcacattcctgctggtctctggctccctggcctctgtgctcatcagttttgtggctgtggggccgagggacatccgcttgactcctaggcctggccccaatggctcctccctgccgccccggtttggccacttcaccggcttcaacagcagtaccctgaaggacaacttgggcgctggctatgctgaggactacaccacgggagccgtgatgaattttgccagcgtctttgctgtcctctttaacggctgtacaggcatcatggctggggccaacatgtcaggggagctgaaggaccccagccgggcgatccctctgggcacgatcgtcgccgtcgcctacaccttcttcgtctatgtcctgcttttctttctctccagcttcacttgtgacaggaccctgctgcaggaagactatgggttcttccgcgccatcagcctgtggcccccactggtgttgatcggaatctatgccacagcgctctcagcgtccatgagctcgctcattggtgcctcccgcatcctccatgccctggcccgggatgacctctttggcgtgatcttggcaccggccaaggttgtgtcccgagggggaaacccctgggcagctgtactttattcttggggcctggtgcagctggtgctcctggctgggaagctgaacacactggctgctgtggtcactgtcttctacctggtggcctatgctgccgtggacctgtcctgcctgagcctggagtgggcctcggcccccaacttccgccccaccttcagcctgttctcctggcacacctgcctgctgggggtggcctcctgcctgctcatgatgttcctcatcagtcctggcgcggctggtggctccctgctcctcatgggtctgctggctgccctgctcaccgcgcgaggaggccccagtagctggggctatgtcagccaggccttgcttttccaccaggtgcgtaagtatctgcttcggctggacgtccggaaggatcacgtgaagttctggcggccccagctgctgctcctggtggggaacccccggggcgccctgcctctgctgcggttggccaaccagcttaagaagggggggctgtatgtgctgggccacgtcaccctgggagacctcgactccctgccctcggaccctgtacagccgcagtatggggcatggctcagcctggtggaccgtgcccaggtgaaggcttttgtggatctaaccctctcaccctccgtgcgccagggggctcagcatctgctgcgaatctccggcctcgagtcaaactcgcatcccctgccgtgaaacagatgccccgctagaagccgggagtggacagcatcctcctctccatagaattggagtgctcattagtggcaagaatcctaaggcgaactttgcctgtttaagtggaggagattagtcactgagataataaaataaatgcatgtgaaa

SEQ ID NO: 94951 - DNA, 462 bp, Artificial Sequence
  derived and/or modified sequence
atgcccgactacatggtgcacgaggagttcaaccccgaccaggccaacggcagctacgccagcagaagaggccccttcgacttcgacatgaagaccgtgtggcagagagaggccgaggagctggagaaggagaagaagaagctgagactgcccgccatcgacagcaagtacctgagcaaggccggcacccccctgggccccaagaaccccgccggcagcagactgagcttcccccccgtgaacggctacaaggacgagtggctgcagcagcagcagagagccgacagcgacaagagaacccccaagaccagcagagccagcgtgctgagccagagccccagagacctggagggcccccaggacgccgccagactgcaggacgccgaggccagcgagggccccgaggacacccccggccccgaggagagcgtgagcgccagcacccccgccgagctgaagtag

SEQ ID NO: 94952 - DNA, 462 bp, Artificial Sequence
  derived and/or modified sequence
atgccagactacatggttcatgaagagttcaatcctgaccaggcaaatggctcatatgcgagtcgcaggggtccattcgattttgatatgaaaacagtctggcaaagagaggcagaggaactcgagaaagagaagaagaagctcaggctccccgctatagattcgaaatatttgagcaaagccggcacaccactcgggcctaagaatcccgccggcagtagattgtctttcccaccggttaatgggtataaggacgagtggctgcagcagcagcagcgcgctgacagtgacaaaagaacccctaagaccagccgcgcctccgttttgtcacagtctccacgcgacctggaagggccacaggacgcagccaggctccaggacgccgaggcaagtgaggggcccgaggacacaccaggccccgaggagagcgtttccgcttccacaccagcagagctcaagtag

SEQ ID NO: 94953 - DNA, 462 bp, Artificial Sequence
  derived and/or modified sequence
atgccagactacatggtgcatgaggagttcaacccagaccaggccaacggcagctatgccagccggcggggcccctttgattttgacatgaagacagtgtggcagcgggaggccgaggagctggagaaggagaagaagaagctgcggctgcctgccatcgacagcaagtacctgagcaaggccggcacccccctgggccccaagaacccagctggcagccggctgtccttcccccctgtgaatggctacaaggatgagtggctgcagcagcagcagagagctgacagcgacaagaggacccccaagaccagccgggcctctgtgctgagccagagcccccgggacctggagggcccccaggatgctgcccggctgcaggatgctgaggccagcgagggccctgaggacaccccaggccctgaggagagcgtgtctgccagcaccccagctgagctgaagtag

SEQ ID NO: 94954 - DNA, 462 bp, Artificial Sequence
  derived and/or modified sequence
atgcccgactacatggtgcacgaggagttcaaccccgaccaggccaacggcagctacgcttccagaagaggacccttcgattttgacatgaaaaccgtgtggcagagggaagccgaagagttggagaaggagaagaagaaactgcgcttgcccgcaatagattccaagtacttgagcaaagcaggaacccccttagggcccaagaaccctgccggttcacgtctgagtttcccgcccgtgaatggctataaagacgagtggcttcaacagcagcaacgggccgactccgacaaaagaacccccaaaacttccagagcgagtgtcctgtctcaatcaccacgagatctcgaaggaccacaggacgctgcccggctccaggatgcggaggccagcgagggacctgaggacacccctggtcctgaggagagcgtgtccgcttccacaccagcagagctgaagtag

SEQ ID NO: 94955 - DNA, 462 bp, Artificial Sequence
  derived and/or modified sequence
atgccagattatatggtgcatgaagagttcaatcctgatcaagcaaacggatcatatgcctctcgcagagggccatttgatttcgacatgaagactgtatggcagcgcgaagccgaagagctggaaaaagagaagaaaaaacttcgcctccccgcaattgatagtaagtacttgagtaaggccggaacccccctcgggccaaagaacccagccggttctaggctcagctttccgcctgtgaatggctataaggatgaatggctgcaacaacagcagagagccgattccgataagaggaccccgaagacctccagggcatctgtcttgagccaatctccaagagatctggaaggtccccaggatgccgctcggctccaggacgccgaggccagcgaagggcctgaagacacacccggacctgaggagtcagtgagcgcgagcacgcccgctgagcttaagtag

SEQ ID NO: 94956 - DNA, 486 bp, Artificial Sequence
  derived and/or modified sequence
cgacgctccggcgctgggtccccgaggcccggcccctccccgggaggaggtgggcttcgagtcacgtgacccgtgccctacgggagggggtgcggtcggggacccggcaggaggcggccgagaagagaggaccgtgggggcgttcgcgtggctcccagcccgggaccccacccccgctggacagtgggggaaactgaggcctgagcgggcccacacaggaccatgaaggtgcttctcctcacagggctgggggccctgttcttcgcctattattgggatgacaacttcgacccagccagcctccagggagcgcgagtgctgctgacaggggccaacgctggtgttggtgaggagctggcctatcactacgcgcgtctgggctcccacctggtgctcactgcccacactgaggctctcctgcagaaggcacggtggctcacgcttgtagtcagcactttgggaggccgaggaaagtggatcacctga

SEQ ID NO: 94957 - DNA, 1575 bp, Artificial Sequence
  derived and/or modified sequence
gaagaccaggcgggcactgttgcccggcgacgctccggcgctgggtccccgaggcccggcccctccccgggaggaggtgggcttcgagtcacgtgacccgtgccctacgggagggggtgcggtcggggacccggcaggaggcggccgagaagagaggaccgtgggggcgttcgcgtggctcccagcccgggaccccacccccgctggacagtgggggaaactgaggcctgagcgggcccacacaggaccatgaaggtgcttctcctcacagggctgggggccctgttcttcgcctattattgggatgacaacttcgacccagccagcctccagggagcgcgagtgctgctgacaggggccaacgctggtgttggtgaggagctggcctatcactacgcgcgtctgggctcccacctggtgctcactgcccacactgaggctctcctgcagaaggcgggctggactacctcgtgctgaaccacatcggcggcgccccggccggcacgcgagcccgcagcccccaggcaactcgctggctcatgcaggtaaactttgtgagctacgtgcaactgacgtcgcgggcgctgcccagcctgacggacagcaagggctccctggtggtggtgtcctcgctgctcggccgcgtgcccacgtcgttctccactccctactcggcggccaagtttgcgctggacggcttcttcggctccctgcggcgggagctggacgtgcaggacgtgaacgtggccatcaccatgtgcgtcctgggcctccgagatcgcgcctccgccgccgaggcagtcaggggagtcacgagggtcaaggcggccccggggcccaaggcagccctggccgtgatccgcggcggcgccacgcgcgcggccggcgtcttctacccgtggcgtttccgcctgctgtgcttgctccggcgctggctaccgcgcccgcgggcctggtttatccgccaggagctcaacgtcacggccgcggcagcctgagcaccggggggtgcccctccagtcccagacggcaatgttcctccctccaactgtccctggagccagaacactcacagagacacccctgagagggtggccacagcccaagatgaagtcatcaagacagaaaagcaaaaccgagaaaaacgacgggcacctggaaccagtcacggcttgggaggtgcaggtgccccgtgttaggcgcctttgtcggggacttgcaaggcctcacctgtttggccatgattgatgacgtgactgcttccattttgcagatgaggaaactaaggctcagagaggccacgccacccttgagccacccatggacccctctccatctcctgcctgcgcctttaagtccctgatttattctttccattcattccatctgggaggaacccccccaactcctgccagcttcccctagctggggtctctggtactcttcacacctgcaggggcgtctacactgttcgtctacctggtggcagggtctgagcgggaggaggagggaaagagtgtgttctgagctggacccagcctcttgttcgagaataaaaactcttcttctcttgca

SEQ ID NO: 94958 - DNA, 1687 bp, Artificial Sequence
  derived and/or modified sequence
ctgctgggaggcgaagaccaggcgggcactgttgcccggcgacgctccggcgctgggtccccgaggcccggcccctccccgggaggaggtgggcttcgagtcacgtgacccgtgccctacgggagggggtgcggtcggggacccggcaggaggcggccgagaagagaggaccgtgggggcgttcgcgtggctcccagcccgggaccccacccccgctggacagtgggggaaactgaggcctgagcgggctggagtgcaatggcaaatctcggcacactacaacttctgcctcccaggttcaagcgattctcctgcctcagcctcccaaatatctggattacaggcatgcctgtgccggccacctctgtcccctgtccctctgcaggcccacacaggaccatgaaggtgcttctcctcacagggctgggggccctgttcttcgcctattattgggatgacaacttcgacccagccagcctccagggagcgcgagtgctgctgacaggggccaacgctggtgttggtgaggagctggcctatcactacgcgcgtctgggctcccacctggtgctcactgcccacactgaggctctcctgcagaaggtggtagggaactgccggaagctgggcgcccccaaggtcttctacatcgcggcggacatggcctcccctgaggcgcccgagagcgtggtgcagtttgcgctggacaagctgggcgggctggactacctcgtgctgaaccacatcggcggcgccccggccggcacgcgagcccgcagcccccaggcaactcgctggctcatgcaggtaaactttgtgagctacgtgcaactgacgtcgcgggcgctgcccagcctgacggacagcaagggctccctggtggtggtgtcctcgctgctcggccgcgtgcccacgtcgttctccactccctactcggcggccaagtttgcgctggacggcttcttcggctccctgcggcgggagctggacgtgcaggacgtgaacgtggccatcaccatgtgcgtcctgggcctccgagatcgcgcctccgccgccgaggcagtcaggggagtcacgagggtcaaggcggccccggggcccaaggcagccctggccgtgatccgcggcggcgccacgcgcgcggccggcgtcttctacccgtggcgtttccgcctgctgtgcttgctccggcgctggctaccgcgcccgcgggcctggtttatccgccaggagctcaacgtcacggccgcggcagcctgagcaccggggggtgcccctccagtcccagacggcaatgttcctccctccaactgtccctggagccagaacactcacagagacacccctgagagggtggccacagcccaagatgaagtcatcaagacagaaaagcaaaaccgagaaaaacgacgggcacctggaaccagtcacggcttgggaggtgcaggtgccccgtgttaggcgcctttgtcggggacttgcaaggcctcacctgtttggccatgattgatgacgtgactgcttccattttgcagatgaggaaactaaggctcagagaggccacgccacccttgagccacccatggacccctctccatctcctgcctgcgcctttaagtccctgatttattctttccattcattccatctgggaggaacccccccaactcctgccagcttcccctag

SEQ ID NO: 94959 - DNA, 1540 bp, Artificial Sequence
  derived and/or modified sequence
gggcggggccgggcccctgctgggaggcgaagaccaggcgggcactgttgcccggcgacgctccggcgctgggtccccgaggcccggcccctccccgggaggaggtgggcttcgagtcacgtgacccgtgccctacgggagggggtgcggtcggggacccggcaggaggcggccgagaagagaggaccgtgggggcgttcgcgtggctcccagcccgggaccccacccccgctggacagtgggggaaactgaggcctgagcggagtgaccaccccggctatggccagccagcctccagggagcgcgagtgctgctgacaggggccaacgctggtgttggtgaggagctggcctatcactacgcgcgtctgggctcccacctggtgctcactgcccacactgaggctctcctgcagaaggcgggctggactacctcgtgctgaaccacatcggcggcgccccggccggcacgcgagcccgcagcccccaggcaactcgctggctcatgcaggtaaactttgtgagctacgtgcaactgacgtcgcgggcgctgcccagcctgacggacagcaagggctccctggtggtggtgtcctcgctgctcggccgcgtgcccacgtcgttctccactccctactcggcggccaagtttgcgctggacggcttcttcggctccctgcggcgggagctggacgtgcaggacgtgaacgtggccatcaccatgtgcgtcctgggcctccgagatcgcgcctccgccgccgaggcagtcaggggagtcacgagggtcaaggcggccccggggcccaaggcagccctggccgtgatccgcggcggcgccacgcgcgcggccggcgtcttctacccgtggcgtttccgcctgctgtgcttgctccggcgctggctaccgcgcccgcgggcctggtttatccgccaggagctcaacgtcacggccgcggcagcctgagcaccggggggtgcccctccagtcccagacggcaatgttcctccctccaactgtccctggagccagaacactcacagagacacccctgagagggtggccacagcccaagatgaagtcatcaagacagaaaagcaaaaccgagaaaaacgacgggcacctggaaccagtcacggcttgggaggtgcaggtgccccgtgttaggcgcctttgtcggggacttgcaaggcctcacctgtttggccatgattgatgacgtgactgcttccattttgcagatgaggaaactaaggctcagagaggccacgccacccttgagccacccatggacccctctccatctcctgcctgcgcctttaagtccctgatttattctttccattcattccatctgggaggaacccccccaactcctgccagcttcccctagctggggtctctggtactcttcacacctgcaggggcgtctacactgttcgtctacctggtggcagggtctgagcgggaggaggagggaaagagtgtgttctgagctggacccagcctcttgttcgagaataaaaactcttcttctcttgca

SEQ ID NO: 94960 - DNA, 1659 bp, Artificial Sequence
  derived and/or modified sequence
cgacgctccggcgctgggtccccgaggcccggcccctccccgggaggaggtgggcttcgagtcacgtgacccgtgccctacgggagggggtgcggtcggggacccggcaggaggcggccgagaagagaggaccgtgggggcgttcgcgtggctcccagcccgggaccccacccccgctggacagtgggggaaactgaggcctgagcgggcccacacaggaccatgaaggtgcttctcctcacagggctgggggccctgttcttcgcctattattgggatgacaacttcgacccagccagcctccagggagcgcgagtgctgctgacaggggccaacgctggtgttggtgaggagctggcctatcactacgcgcgtctgggctcccacctggtgctcactgcccacactgaggctctcctgcagaaggtggtagggaactgccggaagctgggcgcccccaaggtcttctacatcgcggcggacatggcctcccctgaggcgcccgagagcgtggtgcagtttgcgctggacaagctgggcgggctggactacctcgtgctgaaccacatcggcggcgccccggccggcacgcgagcccgcagcccccaggcaactcgctggctcatgcaggtaaactttgtgagctacgtgcaactgacgtcgcgggcgctgcccagcctgacggacagcaagggctccctggtggtggtgtcctcgctgctcggccgcgtgcccacgtcgttctccactccctactcggcggccaagtttgcgctggacggcttcttcggctccctgcggcgggagctggacgtgcaggacgtgaacgtggccatcaccatgtgcgtcctgggcctccgagatcgcgcctccgccgccgaggcagtcaggggagtcacgagggtcaaggcggccccggggcccaaggcagccctggccgtgatccgcggcggcgccacgcgcgcggccggcgtcttctacccgtggcgtttccgcctgctgtgcttgctccggcgctggctaccgcgcccgcgggcctggtttatccgccaggagctcaacgtcacggccgcggcagcctgagcaccggggggtgcccctccagtcccagacggcaatgttcctccctccaactgtccctggagccagaacactcacagagacacccctgagagggtggccacagcccaagatgaagtcatcaagacagaaaagcaaaaccgagaaaaacgacgggcacctggaaccagtcacggcttgggaggtgcaggtgccccgtgttaggcgcctttgtcggggacttgcaaggcctcacctgtttggccatgattgatgacgtgactgcttccattttgcagatgaggaaactaaggctcagagaggccacgccacccttgagccacccatggacccctctccatctcctgcctgcgcctttaagtccctgatttattctttccattcattccatctgggaggaacccccccaactcctgccagcttcccctagctggggtctctggtactcttcacacctgcaggggcgtctacactgttcgtctacctggtggcagggtctgagcgggaggaggagggaaagagtgtgttctgagctggacccagcctcttgttcgagaataaaaactcttcttctcttgc

SEQ ID NO: 94961 - DNA, 459 bp, Artificial Sequence
  derived and/or modified sequence
atgcaggtgaacttcgtgagctacgtgcagctgaccagccgggccctcccatcattaactgactctaaagggtccctggtggtagtctcaagccttctgggccgagtgcctacatctttttccaccccttattccgcagcaaagtttgcactggatgggttcttcgggagtctccggcgggaactggacgtgcaagatgttaatgtggccatcacaatgtgcgttctggggcttagggaccgcgcatccgcagccgaggccgttaggggcgtcacacgggttaaagccgcaccaggacccaaggccgctttggctgtgattagaggcggagcgacgcgtgctgcaggcgtgttctacccatggcgttttcgcctcctttgtctcctcagacggtggcttccccgtccccgtgcctggtttatacgacaagagcttaacgtgaccgccgcggccgcttag

SEQ ID NO: 94962 - DNA, 459 bp, Artificial Sequence
  derived and/or modified sequence
atgcaggtcaattttgtttcatatgtgcagctaacatcacgggcattgccttccctgaccgactctaagggctccctagtcgtggtgagcagcctacttgggagagtgccaacttcgttttccacaccttactctgcagctaaatttgctctggacggattttttggaagtctgaggcgcgaacttgatgtacaggatgtcaatgtggctatcacgatgtgtgtactgggacttagggaccgagcctcagccgctgaggcagtaagaggtgtcactagagttaaagcagctccagggccaaaggcagcattggccgtgattagaggcggagcaaccagggctgctggggtattttatccttggagatttcgcctactgtgtctcctccggagatggctgccaagaccaagagcttggtttatcagacaggagctgaatgtgactgccgctgccgcttag

SEQ ID NO: 94963 - DNA, 459 bp, Artificial Sequence
  derived and/or modified sequence
atgcaggttaatttcgtatcctatgtccagttaacgtctagagcccttccatcactcaccgattcgaaaggctccctcgtggtggtctcatcactcctgggacgagtgccaacgtcattctccaccccttactcagctgccaaattcgcactcgacgggttttttggttccctcagaagagaactggatgtgcaagatgtcaatgtggcgatcactatgtgcgtgctcggattacgtgacagggcatcagccgccgaggcagtgcgtggagtgaccagagttaaggcagctccgggacctaaagcagctcttgctgttatacgtggcggcgccacccgagcggccggggttttctacccttggagattcagactgctgtgcctgctgaggcgttggctgccacggcctcgggcttggttcatccgccaggaacttaacgtcaccgccgccgcagcctag

SEQ ID NO: 94964 - DNA, 459 bp, Artificial Sequence
  derived and/or modified sequence
atgcaggttaactttgtatcctacgttcaactgaccagcagagcacttccatcactgacagatagcaagggctcactggtcgtcgtgtcatcgctcctgggccgagtacccacctcattttcaacgccttattcagccgctaagttcgccctagacggattctttgggagcctgagacgggaacttgacgtgcaggatgtcaacgtcgcaataaccatgtgtgtcttgggactgcgcgaccgagccagcgccgctgaagcagtaagaggtgtcacaagggtgaaagccgctcctggcccaaaggccgcattagctgtgattagggggggagcaacgagggccgcgggcgtgttttatccctggcgatttaggctgctgtgtcttctccgtcgatggctgcctagaccaagagcctggttcatccgacaggaactaaacgtgaccgccgctgctgcttag

SEQ ID NO: 94965 - DNA, 459 bp, Artificial Sequence
  derived and/or modified sequence
atgcaggtgaacttcgtgagctacgtgcagctgaccagcagagccctgcccagcctgaccgacagcaagggcagcctggtggtggtgagcagcctgctgggcagagtgcccaccagcttcagcaccccctacagcgccgccaagttcgccctggacggcttcttcggcagcctgagaagagagctggacgtgcaggacgtgaacgtggccatcaccatgtgcgtgctgggcctgagagacagagccagcgccgccgaggccgtgagaggcgtgaccagagtgaaggccgcccccggccccaaggccgccctggccgtgatcagaggcggcgccaccagagccgccggcgtgttctacccctggagattcagactgctgtgcctgctgagaagatggctgcccagacccagagcctggttcatcagacaggagctgaacgtgaccgccgccgccgcctag

SEQ ID NO: 94966 - DNA, 459 bp, Artificial Sequence
  derived and/or modified sequence
atgcaagtgaacttcgtcagctacgtacagctcacgtcacgagcgctaccatctctaacagattctaagggcagtcttgtggtcgtgtcatcccttttaggccgagtcccaacttccttctcaactccctattctgctgcaaagttcgccctcgatggtttttttggaagcctgcgtagggagctggatgtgcaggatgtcaatgtcgcgataactatgtgtgtgttgggattgcgggacagggctagtgcggccgaggctgtcaggggggtcacccgggtgaaggcggccccagggcccaaagccgccctagcagttattcgcgggggcgcaacacgggccgctggagtgttttacccatggcggtttaggctgctctgtctcctgagacgatggctcccccgaccacgggcctggtttatcaggcaggaactgaatgttacagcggccgccgcctag

SEQ ID NO: 94967 - DNA, 459 bp, Artificial Sequence
  derived and/or modified sequence
atgcaggtgaactttgtgtcctatgtgcagctgaccagccgggccctgcccagcctgacagacagcaagggcagcctggtggtggtgagcagcctgctgggccgggtgcccaccagcttcagcaccccctacagcgctgccaagtttgccctggatggcttcttcggcagcctgcggcgggagctggatgtgcaggatgtgaatgtggccatcaccatgtgtgtgctgggcctgcgggaccgggccagcgctgctgaggccgtgcggggcgtgaccagggtgaaggccgcccctggccccaaggccgccctggccgtcatccggggcggggccaccagggctgctggggtcttctacccctggaggttccggctgctgtgcctgctgcggcgctggctgccccggccccgggcctggttcatccggcaggagctgaatgtgacagctgctgctgcctag

SEQ ID NO: 94968 - RNA, 459 nt, Artificial Sequence
  derived and/or modified sequence
augcagguuaauuucguauccuauguccaguuaacgucuagagcccuuccaucacucaccgauucgaaaggcucccucgugguggucucaucacuccugggacgagugccaacgucauucuccaccccuuacucagcugccaaauucgcacucgacggguuuuuugguucccucagaagagaacuggaugugcaagaugucaauguggcgaucacuaugugcgugcucggauuacgugacagggcaucagccgccgaggcagugcguggagugaccagaguuaaggcagcuccgggaccuaaagcagcucuugcuguuauacguggcggcgccacccgagcggccgggguuuucuacccuuggagauucagacugcugugccugcugaggcguuggcugccacggccucgggcuugguucauccgccaggaacuuaacgucaccgccgccgcagccuag

SEQ ID NO: 94969 - RNA, 459 nt, Artificial Sequence
  derived and/or modified sequence
augcagguuaacuuuguauccuacguucaacugaccagcagagcacuuccaucacugacagauagcaagggcucacuggucgucgugucaucgcuccugggccgaguacccaccucauuuucaacgccuuauucagccgcuaaguucgcccuagacggauucuuugggagccugagacgggaacuugacgugcaggaugucaacgucgcaauaaccaugugugucuugggacugcgcgaccgagccagcgccgcugaagcaguaagaggugucacaagggugaaagccgcuccuggcccaaaggccgcauuagcugugauuagggggggagcaacgagggccgcgggcguguuuuaucccuggcgauuuaggcugcugugucuucuccgucgauggcugccuagaccaagagccugguucauccgacaggaacuaaacgugaccgccgcugcugcuuag

SEQ ID NO: 94970 - protein, 234 aa, Artificial Sequence
  derived and/or modified sequence
MKVLLLTGLGALFFAYYWDDNFDPGGLDYLVLNHIGGAPAGTRARSPQATRWLMQVNFVSYVQLTSRALPSLTDSKGSLVVVSSLLGRVPTSFSTPYSAAKFALDGFFGSLRRELDVQDVNVAITMCVLGLRDRASAAEAVRSSTSRPRQPEHRGVPLQSQTAMFLPPTVPGARTLTETPLRGWPQPKMKSSRQKSKTEKNDGHLEPVTAWEVQVPRVRRLCRGLARPHLFGHD

SEQ ID NO: 94971 - DNA, 705 bp, Artificial Sequence
  derived and/or modified sequence
atgaaggtgctgctgctgaccggcctgggcgccctgttcttcgcctactactgggacgacaacttcgaccccggcgggttggactatctggtactgaaccacataggcggtgcaccagccggtacgcgggcccgaagcccccaggccaccagatggctaatgcaagtgaacttcgtcagctacgtacagctgacttcacgggctcttccctctctcacagattctaagggatcactggtggtggtgtccagcttactgggtcgggtgcccactagtttctcaacgccatacagcgccgctaaattcgcactggatgggttttttggcagcttgagacgcgaacttgatgtccaggacgtaaatgtggccataacaatgtgtgtgctgggcctacgcgatcgagcatcagcggccgaggccgtgcggagctccacatcccggccccgccagcctgagcataggggagttcctttgcagagtcaaacagcgatgtttctgcccccgacagtgccaggagctcggacactgaccgaaacacctctacgagggtggcctcagcctaagatgaaatcttcacgacagaaaagcaaaacagagaaaaatgacggtcatctagagcctgtcacggcttgggaagtgcaagtcccaagagtccggaggctctgcagaggactcgcccgacctcatttatttggccacgactag

SEQ ID NO: 94972 - DNA, 1361 bp, Artificial Sequence
  derived and/or modified sequence
cctgctgggaggcgaagaccaggcgggcactgttgcccggcgacgctccggcgctgggtccccgaggcccggcccctccccgggaggaggtgggcttcgagtcacgtgacccgtgccctacgggagggggtgcggtcggggacccggcaggaggcggccgagaagagaggaccgtgggggcgttcgcgtggctcccagcccgggaccccacccccgctggacagtgggggaaactgaggcctgagcggagtgaccaccccggctatggccagccagcctccagggagcgcgagtgctgctgacaggggccaacgctggtgttggtgaggagctggcctatcactacgcgcgtctgggctcccacctggtgctcactgcccacactgaggctctcctgcagaaggcgggctggactacctcgtgctgaaccacatcggcggcgccccggccggcacgcgagcccgcagcccccaggcaactcgctggctcatgcaggtaaactttgtgagctacgtgcaactgacgtcgcgggcgctgcccagcctgacggacagcaagggctccctggtggtggtgtcctcgctgctcggccgcgtgcccacgtcgttctccactccctactcggcggccaagtttgcgctggacggcttcttcggctccctgcggcgggagctggacgtgcaggacgtgaacgtggccatcaccatgtgcgtcctgggcctccgagatcgcgcctccgccgccgaggcagtcaggagctcaacgtcacggccgcggcagcctgagcaccggggggtgcccctccagtcccagacggcaatgttcctccctccaactgtccctggagccagaacactcacagagacacccctgagagggtggccacagcccaagatgaagtcatcaagacagaaaagcaaaaccgagaaaaacgacgggcacctggaaccagtcacggcttgggaggtgcaggtgccccgtgttaggcgcctttgtcggggacttgcaaggcctcacctgtttggccatgattgatgacgtgactgcttccattttgcagatgaggaaactaaggctcagagaggccacgccacccttgagccacccatggacccctctccatctcctgcctgcgcctttaagtccctgatttattctttccattcattccatctgggaggaacccccccaactcctgccagcttcccctagctggggtctctggtactcttcacacctgcaggggcgtctacactgttcgtctacctggtggcagggtctgagcgggaggaggagggaaagagtgtgttctgagctggacccagcctcttgttcgagaataaaaactcttcttctcttgc

SEQ ID NO: 94973 - DNA, 705 bp, Artificial Sequence
  derived and/or modified sequence
atgaaagtgctgctgttgacaggccttggagccctcttctttgcctactattgggacgataattttgatcctgggggtcttgactacttggtgcttaatcacattggaggagctcctgcaggcacccgggcaagaagtccacaggcgacaagatggctcatgcaggtgaattttgtcagctatgtgcagctcacctcacgcgcacttccttctctcaccgatagcaaaggttcacttgtggtggtaagctctctgctgggcagggtgccaacaagctttagcacgccttatagtgcagccaaatttgccctcgacggcttctttggaagtcttagacgagagttagacgtgcaggacgttaacgtggctatcactatgtgcgtgctgggactccgcgatcgcgcttccgcagctgaggccgtccgtagctctaccagccggccacggcagccagagcataggggagtccctctgcaatcgcaaacagccatgttcttgcccccaaccgtgcctggcgcaagaacgctgaccgaaactcccctgcgtggttggccccagccaaagatgaaaagtagtagacagaagtccaagactgagaagaatgatgggcatctggagcccgtgaccgcctgggaggtgcaggtccctagggtgaggcggctgtgtcggggtctggccagacctcatctgtttggccacgattag

SEQ ID NO: 94974 - DNA, 705 bp, Artificial Sequence
  derived and/or modified sequence
atgaaagttctgctcttaacaggtttgggtgccctgttttttgcttattattgggatgacaatttcgatccgggaggactcgactatcttgtactgaaccatattggaggggcacctgccggcactagagcacggagtccccaggccactcgatggctgatgcaggttaacttcgttagctacgtgcaactgacttctagagctctaccaagtttgactgacagtaagggctccctcgtggttgtctcctccttgttgggccgggtgcctacctcattcagcaccccatactccgccgctaaattcgctctggatggcttctttggcagtttaagacgggaactggacgtccaggacgtaaacgtcgccataactatgtgtgtgcttgggctccgcgatcgcgccagcgccgcagaggccgtgcgatcatccacaagtagaccccgacagcccgagcatcggggagtgcccctacaatcacagaccgcaatgtttctcccccctaccgtgccaggcgcccggacactcacggaaacccccttgcgcgggtggccacaacccaaaatgaaaagttcccgccagaagtcaaaaaccgagaaaaacgatggtcatctcgagccagtcacggcatgggaagtccaagttccccgtgtgcgccgtctctgccgcggcctggctagaccacatctgttcggccatgattag

SEQ ID NO: 94975 - DNA, 705 bp, Artificial Sequence
  derived and/or modified sequence
atgaaagttcttctcttaactggtctaggagcccttttctttgcgtattactgggacgataactttgacccagggggactcgattacttagtcctaaaccatattggcggagccccagcaggcactagagccagatctccccaggccacgcgctggctaatgcaagtcaactttgtttcttacgttcagctcacatcccgcgcactgccatctctgaccgactcgaaaggctctctggtggtggtctcaagtctactaggaagagtcccgacatctttttctactccctacagcgcagcaaagttcgccttagacgggttttttggtagccttaggagagaactcgatgtgcaggacgtcaatgtcgccatcacaatgtgcgttctgggactcagagatcgggcctctgccgccgaagccgtaagatcctctacctctcgcccccgccagccggagcaccgaggtgttccactacaatctcagaccgcaatgtttctgccgccgactgttccaggtgcccggacacttaccgaaaccccactgagagggtggcctcagcccaagatgaagtcctcacgccaaaaaagcaagactgaaaaaaatgatgggcatctcgaaccagtaacagcctgggaggtacaggttcctcgagtgagaagactgtgccgaggactggctagaccacaccttttcggacacgactag

SEQ ID NO: 94976 - DNA, 1553 bp, Artificial Sequence
  derived and/or modified sequence
gtagttcggcccggccctggcaccgtgaggggaaagaggcgtcaggtgcctggctgaagcctgaaggtgacccgaaaacaagtcagagcccgagagatccacccgcgcccgcgcgggggaccaagggcccggatttaagaagagtgtgcctacaaggcggttgtcacggcaacgagagggcgggattgttcgagcgctgcggccccctcacgtgatcgattcggaggcggggcgtccgcccagtgggcggggccgggcccctgctgggaggcgaagaccaggcgggcactgttgcccggcgacgctccggcgctgggtccccgaggcccggcccctccccgggaggaggtgggcttcgagtcacgtgacccgtgccctacgggagggggtgcggtcggggacccggcaggaggcggccgagaagagaggaccgtgggggcgttcgcgtggctcccagcccgggaccccacccccgctggacagtgggggaaactgaggcctgagcgggcccacacaggaccatgaaggtgcttctcctcacagggctgggggccctgttcttcgcctattattgggatgacaacttcgacccaggcgggctggactacctcgtgctgaaccacatcggcggcgccccggccggcacgcgagcccgcagcccccaggcaactcgctggctcatgcaggtaaactttgtgagctacgtgcaactgacgtcgcgggcgctgcccagcctgacggacagcaagggctccctggtggtggtgtcctcgctgctcggccgcgtgcccacgtcgttctccactccctactcggcggccaagtttgcgctggacggcttcttcggctccctgcggcgggagctggacgtgcaggacgtgaacgtggccatcaccatgtgcgtcctgggcctccgagatcgcgcctccgccgccgaggcagtcaggagctcaacgtcacggccgcggcagcctgagcaccggggggtgcccctccagtcccagacggcaatgttcctccctccaactgtccctggagccagaacactcacagagacacccctgagagggtggccacagcccaagatgaagtcatcaagacagaaaagcaaaaccgagaaaaacgacgggcacctggaaccagtcacggcttgggaggtgcaggtgccccgtgttaggcgcctttgtcggggacttgcaaggcctcacctgtttggccatgattgatgacgtgactgcttccattttgcagatgaggaaactaaggctcagagaggccacgccacccttgagccacccatggacccctctccatctcctgcctgcgcctttaagtccctgatttattctttccattcattccatctgggaggaacccccccaactcctgccagcttcccctagctggggtctctggtactcttcacacctgcaggggcgtctacactgttcgtctacctggtggcagggtctgagcgggaggaggagggaaagagtgtgttctgagctggacccagcctcttgttcgagaataaaaactcttcttctcttgca

SEQ ID NO: 94977 - DNA, 705 bp, Artificial Sequence
  derived and/or modified sequence
atgaaggtgctgctgctgaccggcctgggcgccctgttcttcgcctactactgggacgacaacttcgaccccggcggcctggactacctggtgctgaaccacatcggcggcgcccccgccggcaccagagccagaagcccccaggccaccagatggctgatgcaggtgaacttcgtgagctacgtgcagctgaccagcagagccctgcccagcctgaccgacagcaagggcagcctggtggtggtgagcagcctgctgggcagagtgcccaccagcttcagcaccccctacagcgccgccaagttcgccctggacggcttcttcggcagcctgagaagagagctggacgtgcaggacgtgaacgtggccatcaccatgtgcgtgctgggcctgagagacagagccagcgccgccgaggccgtgagaagcagcaccagcagacccagacagcccgagcacagaggcgtgcccctgcagagccagaccgccatgttcctgccccccaccgtgcccggcgccagaaccctgaccgagacccccctgagaggctggccccagcccaagatgaagagcagcagacagaagagcaagaccgagaagaacgacggccacctggagcccgtgaccgcctgggaggtgcaggtgcccagagtgagaagactgtgcagaggcctggccagaccccacctgttcggccacgactag

SEQ ID NO: 94978 - DNA, 705 bp, Artificial Sequence
  derived and/or modified sequence
atgaaggtactgctgcttaccggccttggggcactgtttttcgcctactactgggacgataatttcgacccgggcggcctggattatctcgtgttgaatcacattggtggtgccccagccggtacaagggcacggtcccctcaagcgactcgctggctgatgcaagtcaactttgtgtcctacgttcaattgacttcccgcgctctgccctctttgactgactccaaagggtctctggtggtggtcagtagcctgctgggcagagtaccaacgtctttcagcaccccgtactcggctgccaaattcgctctcgacggattcttcggaagcctgagacgcgagctggacgtccaagatgtgaatgtcgccatcaccatgtgcgtgcttggattgcgcgatcgtgcatctgccgccgaggctgtgcgctccagcactagccggccaagacagcccgaacataggggagtgcctctacagtcccagacagccatgtttctgccacccacagtcccgggcgctcgaacgctcactgaaactccgcttcgggggtggcctcagcctaaaatgaagtcgtctagacagaagagcaagaccgaaaagaacgatggtcacttagaaccagtcaccgcttgggaggtgcaggtgcccagagttcggcgcctgtgccgcggcctggccaggccccaccttttcggacacgattag

SEQ ID NO: 94979 - DNA, 705 bp, Artificial Sequence
  derived and/or modified sequence
atgaaggtgctgctgctgaccggcctgggcgccctcttctttgcctactactgggatgacaactttgaccccggcggcctggactacctggtgctgaaccacatcggcggggccccagctggcacccgggcccggagcccccaggccacccgctggctgatgcaggtgaactttgtgtcctatgtgcagctgaccagccgggccctgcccagcctgacagacagcaagggcagcctggtggtggtgagcagcctgctgggccgggtgcccaccagcttcagcaccccctacagcgctgccaagtttgccctggatggcttcttcggcagcctgcggcgggagctggatgtgcaggatgtgaatgtggccatcaccatgtgtgtgctgggcctgcgggaccgggccagcgctgctgaggccgtgcgcagcagcaccagccggccccggcagcctgagcacagaggagtgcccctgcagagccagacagccatgttcctgcccccaacagtgcctggggcccggaccctgacagagacccccctgcggggctggccccagcccaagatgaagagcagccggcagaagagcaagacagagaagaatgatggccacctggagcctgtgacagcctgggaggtgcaggtgccccgggtgcggcggctgtgccggggcctggcccggccccacctgtttggacatgactag

SEQ ID NO: 94980 - RNA, 705 nt, Artificial Sequence
  derived and/or modified sequence
augaaaguucugcucuuaacagguuugggugcccuguuuuuugcuuauuauugggaugacaauuucgauccgggaggacucgacuaucuuguacugaaccauauuggaggggcaccugccggcacuagagcacggaguccccaggccacucgauggcugaugcagguuaacuucguuagcuacgugcaacugacuucuagagcucuaccaaguuugacugacaguaagggcucccucgugguugucuccuccuuguugggccgggugccuaccucauucagcaccccauacuccgccgcuaaauucgcucuggauggcuucuuuggcaguuuaagacgggaacuggacguccaggacguaaacgucgccauaacuaugugugugcuugggcuccgcgaucgcgccagcgccgcagaggccgugcgaucauccacaaguagaccccgacagcccgagcaucggggagugccccuacaaucacagaccgcaauguuucuccccccuaccgugccaggcgcccggacacucacggaaacccccuugcgcggguggccacaacccaaaaugaaaaguucccgccagaagucaaaaaccgagaaaaacgauggucaucucgagccagucacggcaugggaaguccaaguuccccgugugcgccgucucugccgcggccuggcuagaccacaucuguucggccaugauuag

SEQ ID NO: 94981 - RNA, 705 nt, Artificial Sequence
  derived and/or modified sequence
augaaaguucuucucuuaacuggucuaggagcccuuuucuuugcguauuacugggacgauaacuuugacccagggggacucgauuacuuaguccuaaaccauauuggcggagccccagcaggcacuagagccagaucuccccaggccacgcgcuggcuaaugcaagucaacuuuguuucuuacguucagcucacaucccgcgcacugccaucucugaccgacucgaaaggcucucuggugguggucucaagucuacuaggaagagucccgacaucuuuuucuacucccuacagcgcagcaaaguucgccuuagacggguuuuuugguagccuuaggagagaacucgaugugcaggacgucaaugucgccaucacaaugugcguucugggacucagagaucgggccucugccgccgaagccguaagauccucuaccucucgcccccgccagccggagcaccgagguguuccacuacaaucucagaccgcaauguuucugccgccgacuguuccaggugcccggacacuuaccgaaaccccacugagaggguggccucagcccaagaugaaguccucacgccaaaaaagcaagacugaaaaaaaugaugggcaucucgaaccaguaacagccugggagguacagguuccucgagugagaagacugugccgaggacuggcuagaccacaccuuuucggacacgacuag

SEQ ID NO: 94982 - protein, 536 aa, Artificial Sequence
  derived and/or modified sequence
MSSSLGKEKDSKEKDPKVPSAKEREKEAKASGGFGKESKEKEPKTKGKDAKDGKKDSSAAQPGVAFSVDNTIKRPNPAPGTRKKSSNAEVIKELNKCREENSMRLDLSKRSIHILPSSIKELTQLTELYLYSNKLQSLPAEVGCLVNLMTLALSENSLTSLPDSLDNLKKLRMLDLRHNKLREIPSVVYRLDSLTTLYLRFNRITTVEKDIKNLSKLSMLSIRENKIKQLPAEIGNLSSLSRLGLRYNRLSAIPRSLAKCSALEELNLENNNISTLPESLLSSLVKLNSLTLARNCFQLYPVGGPSQFSTIYSLNMEHNRINKIPFGIFSRAKVLSKLNMKDNQLTSLPLDFGTWTSMVELNLATNQLTKIPEDVSGLVSLEVLILSNNLLKKLPHGLGNLRKLRELDLEENKLESLPNEIAYLKDLQKLVLTNNQLTTLPRGIGHLTNLTHLGLGENLLTHLPEEIGTLENLEELYLNDNPNLHSLPFELALCSKLSIMSIENCPLSHLPPQIVAGGPSFIIQFLKMQGPYRAMV

SEQ ID NO: 94983 - protein, 372 aa, Artificial Sequence
  derived and/or modified sequence
LDNLKKLRMLDLRHNKLREIPSVVYRLDSLTTLYLRFNRITTVEKDIKNLSKLSMLSIRENKIKQLPAEIGNLSSLSRLGLRYNRLSAIPRSLAKCSALEELNLENNNISTLPESLLSSLVKLNSLTLARNCFQLYPVGGPSQFSTIYSLNMEHNRINKIPFGIFSRAKVLSKLNMKDNQLTSLPLDFGTWTSMVELNLATNQLTKIPEDVSGLVSLEVLILSNNLLKKLPHGLGNLRKLRELDLEENKLESLPNEIAYLKDLQKLVLTNNQLTTLPRGIGHLTNLTHLGLGENLLTHLPEEIGTLENLEELYLNDNPNLHSLPFELALCSKLSIMSIENCPLSHLPPQIVAGGPSFIIQFLKMQGPYRAMV

SEQ ID NO: 94984 - DNA, 1611 bp, Artificial Sequence
  derived and/or modified sequence
atgagttcatctctaggaaaagaaaaggattctaaggagaaagaccccaaagtgccgtctgccaaggaaagagagaaggaagccaaggcttctggcggattcggcaaagagtcgaaggaaaaggagccaaagactaagggaaaagatgccaaggacggcaagaaggattccagcgccgcacagccaggggttgctttttccgtggacaatacaattaaaagacccaatcctgcacctgggaccagaaagaaaagttccaatgctgaggtgatcaaggaactcaataagtgccgggaagagaatagcatgcgcttagatctatcaaagcggagcattcacatcttgccttcatcaatcaaggagctgactcaactgactgaactttacctttacagcaataagttgcagagcctccctgccgaggttggttgcctggttaacctaatgaccctggcgctcagcgaaaatagcctgactagtttacctgacagtctggacaatttgaagaaactgcgtatgctcgatctccgacataacaagttgagagaaattcccagcgtcgtctatcggctagatagtctcacgactctgtacctcagatttaacaggatcaccaccgttgagaaggacattaagaacctgagcaagctgagcatgctatcaattagggaaaacaaaattaagcaactgcctgccgaaataggcaatctcagtagcctgtccaggctgggactgaggtacaaccgcctctcggccatccctagaagcttagctaagtgctccgctctggaggagcttaacctggagaacaataatattagcacgttacccgaaagcctgctcagctccctcgtcaagcttaactctctcacactggcacgtaactgcttccagttgtatcccgttggtggcccctcgcagtttagtaccatctattctttaaacatggagcataataggattaacaaaatccccttcgggatctttagccgagctaaagttctgtcaaagcttaacatgaaagataaccagctcacctcattgcctttggactttggtacgtggacctccatggtagaattaaacctagcaacaaaccagttgaccaaaattcccgaagacgtgagcggccttgtgtcactcgaggtgctcatcctttctaacaacctcttaaagaagctgccacacggcctcggcaatctccgcaaactgcgggaactcgacttggaggagaataagctggagtctttacccaatgaaatcgcctaccttaaggacctccagaagctggtcctgacaaataatcaactgaccacattgccacgtggcattggtcacttaaccaaccttacacacttgggtttgggtgagaacctcttaacgcatttgccagaggaaattgggacccttgaaaatttggaagagctctacctaaacgataaccccaatctgcattctctccctttcgagctcgccctttgctccaaactgtccattatgtctatcgagaactgccccctgagccatctgcctccacagatagtagccggtgggccaagcttcattattcaatttctgaagatgcaggggccatatcgtgctatggtgtag

SEQ ID NO: 94985 - DNA, 1119 bp, Artificial Sequence
  derived and/or modified sequence
ctggacaacctcaagaaactgcgcatgctggatctgcgacacaacaaattacgcgagattccgtctgtggtataccggttggactcccttaccacattatatctccgcttcaatagaattaccactgttgagaaagacattaagaatctgtctaaactcagtatgctgagtatccgagaaaataaaatcaagcagctgccggctgaaattgggaacttatccagcctgagcaggctgggtctgcgctacaaccgccttagcgccatcccacggtctctggctaaatgctccgcccttgaggaactgaatctcgagaataataacataagcacactcccagagtcccttctgtcttccctggtaaaactcaactcacttaccctagcgcgaaactgcttccagctgtacccagtcggcgggccttctcagttctcgaccatctattctttgaacatggaacacaataggattaacaaaatcccctttggtatcttctcccgggctaaggtgctcagtaagctgaatatgaaggataatcaactcacaagcctgccactagacttcgggacctggacatcaatggtcgagctaaacctggctacgaaccaactgaccaaaatacctgaagatgtcagcggactggtctcactcgaagtgctgatcctgtcaaacaaccttcttaagaagctgccgcatggactcggcaacctgcgaaagcttcgcgaattggacctggaagagaacaaattggaatctctccccaatgagatcgcttacctgaaggacttgcagaaactagtgttgacaaataatcagctgactaccttacctaggggcatcgggcatttgactaaccttacccacctgggactcggagaaaatctgttgacccaccttcctgaagagataggcaccctggaaaacttggaggaactatacttgaacgataatcccaatctgcactctctgccgtttgaacttgcgctgtgttctaagctgagcatcatgtcaatcgagaactgcccactgtctcaccttcccccacagatagtcgccggaggaccgagttttattatccagtttctgaagatgcagggaccctatagagctatggtatag

SEQ ID NO: 94986 - DNA, 1611 bp, Artificial Sequence
  derived and/or modified sequence
atgagcagcagcctgggcaaggagaaggacagcaaggagaaggaccccaaggtgcccagcgccaaggagcgggagaaggaggccaaggccagcggcggctttgggaaggagagcaaggagaaggagcccaagaccaagggcaaggatgccaaggatggcaagaaggacagcagcgctgcccagcccggggtggccttctctgtggacaacaccatcaagaggcccaacccagcccctggcaccaggaagaagagcagcaatgctgaggtgatcaaggagctgaacaagtgccgggaggagaacagcatgaggctggacctgagcaagaggagcatccacatcctgcccagcagcatcaaggagctgacccagctgacagagctgtacctgtacagcaacaagctgcagagcctgcctgctgaggtgggctgcctggtgaacctgatgaccctggccctgtctgagaacagcctgaccagcctgcctgacagcctggacaacctgaagaagctgaggatgctggacctgcggcacaacaagctgcgggagatccccagcgtggtgtaccgcctggacagcctgaccaccctgtacctgcgcttcaaccgcatcaccaccgtggagaaggacatcaagaacctgagcaagctgtccatgctgagcatccgggagaacaagatcaagcagctgcctgctgagatcggcaacctgagcagcctgagccggctgggcctgcgctacaaccggctgagcgccatccccaggagcctggccaagtgcagcgccctggaggagctgaacctggagaacaacaacatcagcaccctgcctgagagcctgctgagcagcctggtgaagctgaacagcctgaccctggccaggaactgcttccagctgtaccctgtgggcggccccagccagttcagcaccatctacagcctgaacatggagcacaaccgcatcaacaagatccccttcggcatcttcagccgggccaaggtgctgagcaagctgaacatgaaggacaaccagctgaccagcctgcccctggactttggcacctggacctccatggtggagctgaacctggccaccaaccagctgaccaagatcccagaagatgtgtctggcctggtgtccctggaggtgctgatcctgagcaacaacctgctgaagaagctgccccacggcctgggcaacctgaggaagctgcgggagctggacctggaggagaacaagctggagagcctgcccaatgaaattgcctacctgaaggacctgcagaagctggtgctgaccaacaaccagctgaccaccctgccccggggcatcggccacctgaccaacctgacccacctgggcctgggggagaacctgctgacccacctgcctgaggagatcggcaccctggagaacctggaggagctgtacctgaatgacaaccccaacctgcacagcctgccctttgagctggccctgtgcagcaagctgagcatcatgagcattgagaactgccccctgagccacctgcccccccagatcgtggccggcggccccagcttcatcatccagttcctgaagatgcagggcccctaccgggccatggtgtag

SEQ ID NO: 94987 - DNA, 1119 bp, Artificial Sequence
  derived and/or modified sequence
ctggacaacctgaagaagctgaggatgctggacctgcggcacaacaagctgcgggagatccccagcgtggtgtaccgcctggacagcctgaccaccctgtacctgcgcttcaaccgcatcaccaccgtggagaaggacatcaagaacctgagcaagctgtccatgctgagcatccgggagaacaagatcaagcagctgcctgctgagatcggcaacctgagcagcctgagccggctgggcctgcgctacaaccggctgagcgccatccccaggagcctggccaagtgcagcgccctggaggagctgaacctggagaacaacaacatcagcaccctgcctgagagcctgctgagcagcctggtgaagctgaacagcctgaccctggccaggaactgcttccagctgtaccctgtgggcggccccagccagttcagcaccatctacagcctgaacatggagcacaaccgcatcaacaagatccccttcggcatcttcagccgggccaaggtgctgagcaagctgaacatgaaggacaaccagctgaccagcctgcccctggactttggcacctggacctccatggtggagctgaacctggccaccaaccagctgaccaagatcccagaagatgtgtctggcctggtgtccctggaggtgctgatcctgagcaacaacctgctgaagaagctgccccacggcctgggcaacctgaggaagctgcgggagctggacctggaggagaacaagctggagagcctgcccaatgaaattgcctacctgaaggacctgcagaagctggtgctgaccaacaaccagctgaccaccctgccccggggcatcggccacctgaccaacctgacccacctgggcctgggggagaacctgctgacccacctgcctgaggagatcggcaccctggagaacctggaggagctgtacctgaatgacaaccccaacctgcacagcctgccctttgagctggccctgtgcagcaagctgagcatcatgagcattgagaactgccccctgagccacctgcccccccagatcgtggccggcggccccagcttcatcatccagttcctgaagatgcagggcccctaccgggccatggtgtag

SEQ ID NO: 94988 - DNA, 1611 bp, Artificial Sequence
  derived and/or modified sequence
atgagcagcagcctgggcaaggagaaggacagcaaggagaaggacccaaaggtgccatccgccaaagaacgcgaaaaggaggctaaagcttctggcggtttcggaaaagagtctaaggagaaagagccgaagactaaaggaaaggatgcgaaggacggaaagaaggatagctccgcagcacagcctggcgttgccttctcagtagacaacacaatcaagcgccccaacccagccccagggactcggaagaaatcatctaacgcagaggtaataaaagagttaaataagtgtcgcgaagagaatagcatgcggctggatctaagcaagagaagtatccatattctgcctagtagtatcaaagagctcacccagctgactgaactatacctatattccaacaaactgcagtccctgcctgccgaagtcggatgtctggttaacctgatgaccttggcactcagtgaaaactctctgacctctctcccagacagtctcgataacctgaaaaaattaagaatgcttgacctcagacataacaaattacgagaaatccccagtgtagtctaccgcctggacagcctgacaactttgtatctcagatttaaccgtatcaccacagtggagaaggacattaagaaccttagcaaactcagcatgctgtccatcagggagaacaaaatcaaacagctgcccgcagaaatcggaaaccttagctctcttagccgactgggcctgcggtataatcggctgagcgctatcccccgatcgctcgctaaatgcagcgcccttgaggagctcaatctggagaataacaacatttctacactgcccgagagcttactttcctctctggttaaactgaacagtctcaccctcgctcgcaactgctttcagctgtacccagtgggaggccccagccagttcagcaccatttactcgctcaacatggagcataatcgtatcaataaaattcccttcgggatctttagccgagccaaggtgctgagcaaacttaacatgaaggacaatcagctgactagcctacctctggacttcgggacatggacaagcatggtggaactcaatctggccactaatcagctgaccaagatcccggaggatgtgagtggtctggtcagcctggaggtgcttatcctcagcaataacctcttgaagaagctgccccatggcctgggcaatctcaggaaattgagggagctggacctggaagagaacaagcttgaatcactgccaaacgaaatagcttacctgaaagatcttcagaagcttgtgctaacaaacaatcaactaaccactttgccccgcgggattgggcaccttacaaatcttactcacttgggactgggtgagaacttactaacccatctgccagaggagattggaactctcgaaaaccttgaggaactgtacctgaatgacaaccccaacctccactcacttcccttcgaattagccctctgcagcaagctctccattatgtccatcgagaactgccccctcagccatctgcccccacagattgtggccggcggtccctcgtttattatacagtttctgaagatgcagggcccttatcgagcaatggtgtag

SEQ ID NO: 94989 - DNA, 1119 bp, Artificial Sequence
  derived and/or modified sequence
ctggacaacctgaagaagctgcggatgctggacctgcggcacaacaagctgagagagatcccgtctgtggtgtaccgactggattccctgacaaccctgtacctgcgcttcaatcggatcactacggtggagaaagacatcaaaaacttgagcaagctaagcatgctatctattagagagaataaaatcaaacaactgcccgccgagataggaaacctgtcttcattatcccgactcggactgcgatacaaccgcttaagtgctattcccaggtccctggcaaagtgttccgcactagaggagctaaatctcgagaataataacatctctacactgcccgagtctctgctgtcttcactggttaagctgaacagcctcactctggcccggaattgctttcagctgtatcccgtgggcggtccttcacaatttagtaccatctactcccttaatatggaacacaacagaataaataaaatccccttcggaatattcagcagagcaaaggtgttaagtaaattgaacatgaaagataatcagctgacatcattacctctcgatttcggaacctggacgtcgatggtggagctcaacctcgctaccaatcagttgacaaaaatcccagaagacgttagcggactggtctcacttgaagttcttatcctgagcaacaacctcctgaagaaactgcctcacggtctggggaatcttagaaaactccgggagctggatctcgaagagaataagctagagagtctccccaatgagatcgcatacctaaaagacttacaaaagctagtgctcaccaacaaccagctaactaccctacctaggggaattggccaccttacaaatctcactcatctgggccttggagagaatctgttgactcacctgcctgaggaaatcgggacactcgagaatctcgaagaactgtatctgaacgataacccgaacttacattccctgccctttgagctggctctctgcagcaagctctctattatgtccatcgaaaactgtcctctgagccacttgcctcctcagattgtcgcaggcggacctagctttataatccagtttcttaagatgcagggtccgtacagagcaatggtttag

SEQ ID NO: 94990 - DNA, 1611 bp, Artificial Sequence
  derived and/or modified sequence
atgagctcgtctctcgggaaggaaaaggactcgaaggagaaggatcctaaggtacctagtgctaaggaaagggagaaggaagctaaggccagcggcggatttggtaaggagtctaaggagaaagagccaaagaccaaagggaaggatgccaaagacggaaagaaagattccagtgcggctcaaccgggtgtcgccttctcagtcgataacaccatcaaaagacccaatcccgctcccggaacacgcaagaaatctagcaatgcagaggtgatcaaggagctgaataagtgcagagaagagaatagtatgagattggatctgtcgaagaggagtatccacatccttccctcgtcaataaaagaactgacccagctgacagagctctacttatacagtaataaactgcagtctctcccagccgaagtgggttgtttggtgaaccttatgaccctggccctcagtgaaaactctctgacttctctgcctgattcgctggacaacctcaagaagttacgcatgctggacctgcgccataataaactgcgggagattccaagcgtagtgtaccggctggacagcctcaccactctttacctcagatttaacaggattacgacagttgagaaggacatcaaaaacctcagcaagctttctatgctttctatccgagagaacaagattaaacagctgcccgctgagatcgggaacttatcctctctttctcgcttgggtttgcgatataatagactctccgcaatacctcggagcctggctaagtgctcagcattggaggaactcaacctggagaataataacatttccacactccccgagtcactgctttcctccctggtcaaactgaattccttgactctggccagaaactgtttccagctataccccgttggcggtccgtctcaattcagtactatttattctctgaacatggaacataacagaatcaacaaaatacccttcggtattttttcacgcgctaaagtcttgtcaaagttaaatatgaaagacaatcaactgacctctttacctctcgacttcggaacgtggactagtatggtggagttgaatttggcgactaatcagctgaccaagataccggaagacgtgtcgggcctggtctcactcgaggtgttgatcctatccaacaatctgcttaagaaactgcctcacggacttggtaacctgagaaaattgcgagagttggacttggaagaaaacaaactggaaagcttgccgaacgagattgcgtacctgaaggacctccagaagctggtgttgaccaataaccagttgacaaccctaccgaggggtataggccatctcaccaaccttactcatcttggactgggcgagaatttgttgacccatctgcctgaggagattggtactctcgagaacctggaggagctgtacctgaatgataacccaaatctgcatagcctgcctttcgagcttgccctgtgctccaaactttctataatgtccatcgaaaactgccccctgtctcacttgccaccacagatcgtagcgggaggaccaagtttcatcatccaattcttaaaaatgcagggaccatatcgggctatggtctag

SEQ ID NO: 94991 - DNA, 1119 bp, Artificial Sequence
  derived and/or modified sequence
ctcgacaatctgaaaaaactgagaatgctagatttacgccataataagctccgcgaaataccaagcgtagtatatcggctagattctttgaccactctgtacctcagattcaatagaataacgacagtagagaaggacattaagaacctctcaaagctaagcatgctgtcgataagagagaataagatcaagcagctgcccgctgaaatcgggaatctcagcagcctgagcaggcttggcctacgctacaatcgcttaagcgctatccctcggtctctagcaaaatgctcagccctggaagagctgaacttggagaacaacaacatatccacacttcccgagtctttactgtccagccttgtgaagctgaattcccttaccctcgccaggaattgctttcaactctatccggttgggggtcctagccaatttagcacaatttattctttaaatatggaacacaatagaatcaataaaattccctttggtattttttcccgagccaaagtgctgtctaaacttaacatgaaagataaccagctcacttctttgcctctggactttggcacctggacctcaatggttgagctgaatctggcgaccaatcagctgacaaagatcccagaagatgtgtcaggcctcgtctcactggaagtgcttatcttgtccaacaatttacttaaaaagctcccacacgggcttgggaatctccgcaagctccgcgagttggacctcgaagagaataaactcgagtccctcccaaatgaaatcgcttacttaaaggatctccagaaactagtgctgaccaacaatcagctgaccacccttcccagaggtattggacatctcaccaatttaacacacctggggctgggcgagaatcttctgactcatctgccagaagaaattgggactctggagaacctggaggagctgtatttgaatgacaatcccaatctgcactcattaccttttgaattggctctgtgtagtaagttgtcaatcatgagcattgaaaattgcccgttgagtcacctgcctccgcagattgtcgccggtggaccctcttttataattcagtttctgaagatgcaggggccttaccgggctatggtgtag

SEQ ID NO: 94992 - DNA, 3806 bp, Artificial Sequence
  derived and/or modified sequence
gagtgggggaggggcgggcggggggcggcggttgggcagcgtcgcttcttaggaggaggaggaagaggaggaaggagggcgagcgaggaggatggcggagtcggggctcctgacggaactctaatgaatcattgattgaccagcactattttaccagttggaatgaatgatcagaaatgggcatagtgcttttagatccaacatgtaacagatggatgttactccatgctgattacttcttcaagccagtacttttttgattgtgtaggatctttgtctcttcatctttgaattcaattactggaaaataaaaggagttcatgtagtttttgtccaggcttgagtcaccatgagtagtagtttaggaaaagaaaaagactctaaagaaaaagatcccaaagtaccatcagccaaggaaagagaaaaggaggcaaaagcctctggaggttttgggaaagagagcaaagaaaaagaacctaagaccaaagggaaagatgccaaagatggaaagaaggactccagtgctgcccaaccaggggtggcattttcagttgacaatacgatcaaacggccaaacccagcacctgggactagaaaaaaatccagcaatgcagaggtgattaaagagctcaacaaatgccgggaagagaattcaatgcgtttggacttatccaagagatctatacacatattgccatcatcaatcaaagagttgactcaattaacagaactttatttatacagtaacaaattgcagtccctcccagcagaggtgggatgtttagtaaatctcatgacactggctctaagtgaaaattcacttaccagtttgcctgactctcttgataacttgaagaagctgcggatgcttgatttacggcataataaactgagagaaattccttcagtggtgtataggctggattctctcaccactctttaccttcgctttaatcgtataactactgtggaaaaggacatcaaaaacttgtcaaaactcagcatgcttagcattcgagagaacaaaattaaacaactacctgctgaaattggaaacctgtccagtttaagtcgtcttggtctgagatataacagactgtcagcaatacccagatcattagcaaaatgcagtgcacttgaagaattaaatttagagaacaataacatttctactttaccagagagtcttttatcaagtcttgtgaaactgaatagtttgaccttagctagaaattgcttccagttgtatccagtgggtggtccatctcagttttctaccatctattccctcaacatggaacacaatcgaatcaacaaaattccatttggaattttctccagagcaaaagtattaagtaagctgaatatgaaggacaatcagttaacatcacttcccttggattttggaacttggaccagtatggtagaattgaatttagccactaatcagctcacaaagatccctgaggatgtgtctggtctcgtttctcttgaggttcttatcttatcaaacaatcttctaaagaagcttccccatggtcttggaaaccttaggaagttaagagagttggatctagaagagaacaaattggaatccttgccaaatgaaattgcatatcttaaggatttacagaaattagtcttgacaaacaaccagttgaccactcttcccagaggcattggtcaccttactaatctcacacatctgggccttggagagaacctacttactcaccttcctgaagaaattggtacactggagaacctagaagaactgtatttgaatgacaaccccaacctgcatagccttccctttgagctggcactctgcagcaagctttcaatcatgagtattgagaactgtccactcagtcaccttccacctcagattgttgctggggggccttctttcatcattcagttcttaaagatgcagggtccatatcgtgccatggtctgatataaatctgctggtcccacacactgttcaaaaatagactgccattaatgtttcttatctatatctgtatctatttatgtagatattggtatatggcagatttataaaaattgcattatgtgtttctgctaatagaggaatcatagccatttagaattttttttaaattctgtacaaaaggcttatataagttttctttgctgaatttgatggatgtttttctgttgtgtaatctgatatgccagtttgcttaaaacatttgccaacacattatgaagttattaaatttaagggacagaggtagtatagttagatatactttctcttaggaaaaataatgggcaaaaatttttgttgcaacttttcatatatattttccccttaccaattgttttatccttatagtattgtaggccctgaaagtagaatttttctttaacttattttgagatttgagatttaaattttatgtattgtttacagtcagagtaaatcactggatttcttttgtttgttttgatttgctctgttttattcagtcaaatctagagtttgaatcctctgctaaagaatttgcatccactggtgtaaacagtgaaaggtatttgcttgttgaaaaaaaaaactggcaaagtgaaaagatacagtcaaaaatctagaatttctttaattttgcttctctgacgagttgtgaagcaaaatacctgaagtgagtctttgggtaggggaagggtattgagaccttttctagtatgaatattttttaagtttgggggaagagaaacttgcagtgaaaaggagttttttcattcctgaaagttgcagatccacaaaactaacaggataattgggcaaataaattacatataaacacacacaatctatatatgtatatacaatgctatatagatatgtatttattatatcataaactacagtaggtaactttaaggatttcttcctatccttgtacaatgacatgaatgtctttctttgaaaactgcaatgtatgtatgtttcaaggttatttaacagtgtactatggttttatatcttgacttgccttgtacatctttcaattctggaatatctgtgtctaagcacaatatcttcacactgtgctgtattgctgctgaactaaatgcacttttccccacatatggggcactggcttcaaacaattcagttcagtatcattacttttaatctcatctttcctttcttggtagttgttaatacagttatggaaaagaggcacattgcatagaagccattggggagttcagtggaagttctgtaagatgtgcatgtactatttgatgcgttttctttgcttcactgcttttaatacttagcagtattgttggtctaagtcaatttgattattgaggagtctcagagcaaggtgcgttctagatgtcatcctaaaaaacacttcatatataattaatcactattttgtataattacatattgctgcttgtgtgtttttttttttttccatttagttgggcgttgtgttttacacaaaaccatttttgaattaaggctatgatattaagatagaaatttggactgttgttctgcttttcctggcactcaaattcatgactagttttgaggtcaaacctatgttcgtaatgagagattttataaggatcaactaagaaatggaaggcaggtgaagatataaaaccctagaatgcttaaatgtgctgtaaaactattgtagatgtcactggattttaccaagtaatatcctttcttttttttttccccccatctgctgtggcttttcagttaaaattttgtttataaaaggaatttgtttattacagctctacct

SEQ ID NO: 94993 - DNA, 2967 bp, Artificial Sequence
  derived and/or modified sequence
cttgataacttgaagaagctgcggatgcttgatttacggcataataaactgagagaaattccttcagtggtgtataggctggattctctcaccactctttaccttcgctttaatcgtataactactgtggaaaaggacatcaaaaacttgtcaaaactcagcatgcttagcattcgagagaacaaaattaaacaactacctgctgaaattggaaacctgtccagtttaagtcgtcttggtctgagatataacagactgtcagcaatacccagatcattagcaaaatgcagtgcacttgaagaattaaatttagagaacaataacatttctactttaccagagagtcttttatcaagtcttgtgaaactgaatagtttgaccttagctagaaattgcttccagttgtatccagtgggtggtccatctcagttttctaccatctattccctcaacatggaacacaatcgaatcaacaaaattccatttggaattttctccagagcaaaagtattaagtaagctgaatatgaaggacaatcagttaacatcacttcccttggattttggaacttggaccagtatggtagaattgaatttagccactaatcagctcacaaagatccctgaggatgtgtctggtctcgtttctcttgaggttcttatcttatcaaacaatcttctaaagaagcttccccatggtcttggaaaccttaggaagttaagagagttggatctagaagagaacaaattggaatccttgccaaatgaaattgcatatcttaaggatttacagaaattagtcttgacaaacaaccagttgaccactcttcccagaggcattggtcaccttactaatctcacacatctgggccttggagagaacctacttactcaccttcctgaagaaattggtacactggagaacctagaagaactgtatttgaatgacaaccccaacctgcatagccttccctttgagctggcactctgcagcaagctttcaatcatgagtattgagaactgtccactcagtcaccttccacctcagattgttgctggggggccttctttcatcattcagttcttaaagatgcagggtccatatcgtgccatggtctgatataaatctgctggtcccacacactgttcaaaaatagactgccattaatgtttcttatctatatctgtatctatttatgtagatattggtatatggcagatttataaaaattgcattatgtgtttctgctaatagaggaatcatagccatttagaattttttttaaattctgtacaaaaggcttatataagttttctttgctgaatttgatggatgtttttctgttgtgtaatctgatatgccagtttgcttaaaacatttgccaacacattatgaagttattaaatttaagggacagaggtagtatagttagatatactttctcttaggaaaaataatgggcaaaaatttttgttgcaacttttcatatatattttccccttaccaattgttttatccttatagtattgtaggccctgaaagtagaatttttctttaacttattttgagatttgagatttaaattttatgtattgtttacagtcagagtaaatcactggatttcttttgtttgttttgatttgctctgttttattcagtcaaatctagagtttgaatcctctgctaaagaatttgcatccactggtgtaaacagtgaaaggtatttgcttgttgaaaaaaaaaactggcaaagtgaaaagatacagtcaaaaatctagaatttctttaattttgcttctctgacgagttgtgaagcaaaatacctgaagtgagtctttgggtaggggaagggtattgagaccttttctagtatgaatattttttaagtttgggggaagagaaacttgcagtgaaaaggagttttttcattcctgaaagttgcagatccacaaaactaacaggataattgggcaaataaattacatataaacacacacaatctatatatgtatatacaatgctatatagatatgtatttattatatcataaactacagtaggtaactttaaggatttcttcctatccttgtacaatgacatgaatgtctttctttgaaaactgcaatgtatgtatgtttcaaggttatttaacagtgtactatggttttatatcttgacttgccttgtacatctttcaattctggaatatctgtgtctaagcacaatatcttcacactgtgctgtattgctgctgaactaaatgcacttttccccacatatggggcactggcttcaaacaattcagttcagtatcattacttttaatctcatctttcctttcttggtagttgttaatacagttatggaaaagaggcacattgcatagaagccattggggagttcagtggaagttctgtaagatgtgcatgtactatttgatgcgttttctttgcttcactgcttttaatacttagcagtattgttggtctaagtcaatttgattattgaggagtctcagagcaaggtgcgttctagatgtcatcctaaaaaacacttcatatataattaatcactattttgtataattacatattgctgcttgtgtgtttttttttttttccatttagttgggcgttgtgttttacacaaaaccatttttgaattaaggctatgatattaagatagaaatttggactgttgttctgcttttcctggcactcaaattcatgactagttttgaggtcaaacctatgttcgtaatgagagattttataaggatcaactaagaaatggaaggcaggtgaagatataaaaccctagaatgcttaaatgtgctgtaaaactattgtagatgtcactggattttaccaagtaatatcctttcttttttttttccccccatctgctgtggcttttcagttaaaattttgtttataaaaggaatttgtttattacagctctacctag

SEQ ID NO: 94994 - DNA, 1611 bp, Artificial Sequence
  derived and/or modified sequence
atgagcagcagcctgggcaaggagaaggacagcaaggagaaggaccccaaggtgcccagcgccaaggagagagagaaggaggccaaggccagcggcggcttcggcaaggagagcaaggagaaggagcccaagaccaagggcaaggacgccaaggacggcaagaaggacagcagcgccgcccagcccggcgtggccttcagcgtggacaacaccatcaagagacccaaccccgcccccggcaccagaaagaagagcagcaacgccgaggtgatcaaggagctgaacaagtgcagagaggagaacagcatgagactggacctgagcaagagaagcatccacatcctgcccagcagcatcaaggagctgacccagctgaccgagctgtacctgtacagcaacaagctgcagagcctgcccgccgaggtgggctgcctggtgaacctgatgaccctggccctgagcgagaacagcctgaccagcctgcccgacagcctggacaacctgaagaagctgagaatgctggacctgagacacaacaagctgagagagatccccagcgtggtgtacagactggacagcctgaccaccctgtacctgagattcaacagaatcaccaccgtggagaaggacatcaagaacctgagcaagctgagcatgctgagcatcagagagaacaagatcaagcagctgcccgccgagatcggcaacctgagcagcctgagcagactgggcctgagatacaacagactgagcgccatccccagaagcctggccaagtgcagcgccctggaggagctgaacctggagaacaacaacatcagcaccctgcccgagagcctgctgagcagcctggtgaagctgaacagcctgaccctggccagaaactgcttccagctgtaccccgtgggcggccccagccagttcagcaccatctacagcctgaacatggagcacaacagaatcaacaagatccccttcggcatcttcagcagagccaaggtgctgagcaagctgaacatgaaggacaaccagctgaccagcctgcccctggacttcggcacctggaccagcatggtggagctgaacctggccaccaaccagctgaccaagatccccgaggacgtgagcggcctggtgagcctggaggtgctgatcctgagcaacaacctgctgaagaagctgccccacggcctgggcaacctgagaaagctgagagagctggacctggaggagaacaagctggagagcctgcccaacgagatcgcctacctgaaggacctgcagaagctggtgctgaccaacaaccagctgaccaccctgcccagaggcatcggccacctgaccaacctgacccacctgggcctgggcgagaacctgctgacccacctgcccgaggagatcggcaccctggagaacctggaggagctgtacctgaacgacaaccccaacctgcacagcctgcccttcgagctggccctgtgcagcaagctgagcatcatgagcatcgagaactgccccctgagccacctgcccccccagatcgtggccggcggccccagcttcatcatccagttcctgaagatgcagggcccctacagagccatggtgtag

SEQ ID NO: 94995 - DNA, 1119 bp, Artificial Sequence
  derived and/or modified sequence
ctggacaacctgaagaagctgagaatgctggacctgagacacaacaagctgagagagatccccagcgtggtgtacagactggacagcctgaccaccctgtacctgagattcaacagaatcaccaccgtggagaaggacatcaagaacctgagcaagctgagcatgctgagcatcagagagaacaagatcaagcagctgcccgccgagatcggcaacctgagcagcctgagcagactgggcctgagatacaacagactgagcgccatccccagaagcctggccaagtgcagcgccctggaggagctgaacctggagaacaacaacatcagcaccctgcccgagagcctgctgagcagcctggtgaagctgaacagcctgaccctggccagaaactgcttccagctgtaccccgtgggcggccccagccagttcagcaccatctacagcctgaacatggagcacaacagaatcaacaagatccccttcggcatcttcagcagagccaaggtgctgagcaagctgaacatgaaggacaaccagctgaccagcctgcccctggacttcggcacctggaccagcatggtggagctgaacctggccaccaaccagctgaccaagatccccgaggacgtgagcggcctggtgagcctggaggtgctgatcctgagcaacaacctgctgaagaagctgccccacggcctgggcaacctgagaaagctgagagagctggacctggaggagaacaagctggagagcctgcccaacgagatcgcctacctgaaggacctgcagaagctggtgctgaccaacaaccagctgaccaccctgcccagaggcatcggccacctgaccaacctgacccacctgggcctgggcgagaacctgctgacccacctgcccgaggagatcggcaccctggagaacctggaggagctgtacctgaacgacaaccccaacctgcacagcctgcccttcgagctggccctgtgcagcaagctgagcatcatgagcatcgagaactgccccctgagccacctgcccccccagatcgtggccggcggccccagcttcatcatccagttcctgaagatgcagggcccctacagagccatggtgtag

SEQ ID NO: 94996 - protein, 663 aa, Artificial Sequence
  derived and/or modified sequence
MAATEISVLSEQFTKIKELELMPEKGLKEEEKDGVCREKDHRSPSELEAERTSGAFQDSVLEEEVELVLAPSEESEKYILTLQTVHFTSEAVELQDMSLLSIQQQEGVQVVVQQPGPGLLWLEEGPRQSLQQCVAISIQQELYSPQEMEVLQFHALEENVMVASEDSKLAVSLAETTGLIKLEEEQEKNQLLAERTKEQLFFVETMSGDERSDEIVLTVSNSNVEEQEDQPTAGQADAEKAKSTKNQRKTKGAKGTFHCDVCMFTSSRMSSFNRHMKTHTSEKPHLCHLCLKTFRTVTLLRNHVNTHTGTRPYKCNDCNMAFVTSGELVRHRRYKHTHEKPFKCSMCKYASVEASKLKRHVRSHTGERPFQCCQCSYASRDTYKLKRHMRTHSGEKPYECHICHTRFTQSGTMKIHILQKHGENVPKYQCPHCATIIARKSDLRVHMRNLHAYSAAELKCRYCSAVFHERYALIQHQKTHKNEKRFKCKHCSYACKQERHMTAHIRTHTGEKPFTCLSCNKCFRQKQLLNAHFRKYHDANFIPTVYKCSKCGKGFSRWINLHRHSEKCGSGEAKSAASGKGRRTRKRKQTILKEATKGQKEAAKGWKEAANGDEAAAEEASTTKGEQFPGEMFPVACRETTARVKEEVDEGVTCEMLLNTMDK

SEQ ID NO: 94997 - DNA, 3493 bp, Artificial Sequence
  derived and/or modified sequence
acgcggtgcacgaggcagagcccacaagccaaagacggagtgggccgagcattccggccacgccttccgcggccaagtcattatggcagccactgagatctctgtcctttctgagcaattcaccaagatcaaagaactcgagttgatgccggaaaaaggcctgaaggaggaggaaaaagacggagtgtgcagagagaaagaccatcggagccctagtgagttggaggccgagcgtacctctggggccttccaggacagcgtcctggaggaagaagtggagctggtgctggccccctcggaggagagcgagaagtacatcctgaccctgcagacggtgcacttcacttctgaagctgtggagttgcaggatatgagcttgctgagcatacagcagcaagaaggggtgcaggtggtggtgcaacagcctggccctgggttgctgtggcttgaggaagggccccggcagagcctgcagcagtgtgtggccattagtatccagcaagagctgtactccccgcaagagatggaggtgttgcagttccacgctctagaggagaatgtgatggtggccagtgaagacagtaagttagcggtgagcctggctgaaactactggactgatcaagctcgaggaagagcaggagaagaaccagttattggctgaaagaacaaaggagcagctcttttttgtggaaacaatgtcaggagatgaaagaagtgacgaaattgttctcacagtttcaaattcaaatgtggaagaacaagaggatcaacctacagctggtcaagcagatgctgaaaaggccaaatctacaaaaaatcaaagaaagacaaagggagcaaaaggaaccttccactgtgatgtctgcatgttcacctcttctagaatgtcaagttttaatcgtcatatgaaaactcacaccagtgagaagcctcacctgtgtcacctctgcctgaaaaccttccgtacggtcactctgctgcggaaccatgttaacacccacacaggaaccaggccctacaagtgtaacgactgcaacatggcatttgtcaccagtggagaactcgtccgacacaggcgctataaacatactcatgagaaaccctttaaatgttccatgtgcaagtatgccagtgtggaggcaagtaaattgaagcgccatgtccgatcccacactggggagcgcccctttcagtgttgccagtgcagctatgccagcagagatacctacaagctgaaacgccacatgagaacgcactcaggtgagaagccttacgaatgccacatctgccacacccgcttcacccagagcgggaccatgaaaatacatattctgcagaaacacggcgaaaatgtccccaaataccagtgtccccattgtgccaccatcattgcacggaaaagcgacctacgtgtgcatatgcgcaacttgcatgcttacagcgctgcagagctgaaatgccgctactgttctgctgtcttccatgaacgctatgccctcattcagcaccagaaaactcataagaatgagaagaggttcaagtgcaaacactgcagttatgcctgcaagcaggaacgtcatatgaccgctcacattcgtacccacactggagagaaaccattcacctgcctttcttgcaataaatgtttccgacagaagcaacttctaaacgctcacttcaggaaataccacgatgcaaatttcatcccgactgtttacaaatgctccaagtgtggcaaaggcttttcccgctggattaacctgcacagacattcggagaagtgtggatcaggggaagcaaagtcggctgcttcaggaaagggaagaagaacaagaaagaggaagcagaccatcctgaaggaagccacaaagggtcagaaggaagctgcgaagggatggaaggaagccgcgaacggagacgaagctgctgctgaggaggcttccaccacgaagggagaacagttcccaggagagatgtttcctgtcgcctgcagagaaaccacagccagagtcaaagaggaagtggatgaaggcgtgacctgtgaaatgctcctcaacacgatggataagtgagagggattcgggttgcgtgttcactgcccccaattcctaaagcaagttagaagtttttagcatttaaggtgtgaaatgctcctcaacacgatggataagtgagagagagtcaggttgcatgttcactgcccctaattcctaaagcaagttagaaatttttagcattttctttgaaacaattaagttcatgacaatggatgacacaagtttgaggtagtgtctagaattgttctcctgtttgtagctggatatttcaaagaaacattgcaggtattttataaaagttttaaaccttgaatgagagggtaacacctcaaacctatggattcattcacttgatattggcaaggtggcccacaatgagtgagtagtgatttttggatatttcaaaatagtctagaccagctagtgcttccacagtcaaagctggacatttttatgttgcattatatacacccatgatatttctaataatatatggttttaaacattaaagacaaatgtttttatacaaatgaattttctacaaaatttaaagctaccataatgcttttaattagttctaaattcaaccaaaaaatgttttactcttataaaaaggaaaactgagtaggaaatgaaatactagattagactagaaaataaggaataaatcgattttactttggtataggagcaaggttcacctttagatttttgtattctcttttaattatgctccttggcaggtatgaaattgccctggttacattccattattgcttattagtatttcactccataacccttttttctgctaaaactactctttttatatttgtaaaataattggcagagtgagaagaaacataaaatcagataaggcaaatgtgtacctgtaaggaatttgtactttttcataatgcccagtgattagtgagtatttcccttttgccagttgacaagatttttccaccctcgagcagcgtgagagatgcctctttaacacttgaaattcatttctatctggatacagaggcagatttttcttcattgcttagttgagcagtttgttttgctgccaacctgtctccacccctgtatttcaagatcattgataagccctaaattcaaattcttaagatatggaccttttattgaaaatatcacaagttcagaatccctatacaatgtgaatatgtggaaataatttcccagcaggaagagcattatattctctttgtaccagcaaattaatttaactcaactcacatgagatttaaattctgtgggctgtagtatgccatcattgtgactgaatttgtgcaatggtttcttaatttttttactgttatttaaagatgttttacataattcaataaaatgaaatgacttaaaattgcaaaaaaaaaaaaaaaaaaaaaaaaaaaaaaaaaaaaa

SEQ ID NO: 94998 - DNA, 1992 bp, Artificial Sequence
  derived and/or modified sequence
atggctgctaccgagatctcagtgctgtccgaacagtttactaagatcaaagaactcgagcttatgccagagaaggggctcaaggaggaagaaaaggacggggtctgcagggaaaaggatcaccggtcacccagtgaactggaagcagaacggacgtcaggcgctttccaggattctgtgcttgaggaggaggttgaactggtgctggctcctagcgaggagtccgaaaaatatatcctgactcttcagacagtgcatttcaccagtgaagcagtggaactccaggacatgagcttactcagcatacagcagcaggaaggggtgcaggttgtcgtgcaacaacctggccctggcctgctgtggctcgaggaaggccccaggcagagcctgcaacagtgtgttgcgatctcaatccagcaagaattgtatagcccgcaagaaatggaagtcctccagttccacgcgctggaggaaaacgttatggtagcaagtgaagattcgaagctggctgtgagccttgccgagacaacgggtctaatcaagcttgaggaggaacaggagaagaatcagctactggctgagagaaccaaggagcagttgttttttgtcgaaacgatgtctggagatgagcgatccgatgaaattgtcctaacagttagcaattcgaatgtcgaagagcaagaggaccagcctactgctggtcaggctgatgccgaaaaagctaaatccacgaaaaatcagcgaaagacaaaaggagcaaaaggcacatttcattgcgatgtctgcatgtttacctcttccagaatgagcagcttcaaccggcatatgaagacccatacctctgaaaaaccacacctttgtcacctgtgtctgaagactttcaggaccgtcacattgctaagaaaccatgtgaatactcacaccggaacgaggccatacaaatgcaacgattgcaatatggcttttgtgacatccggggagctggtccggcaccggagatacaagcatacccacgaaaaacccttcaagtgttccatgtgtaagtacgccagcgtggaagccagcaagctgaagcgccatgtgagaagtcacaccggagaaagaccattccaatgctgtcagtgctcctatgcatctcgggacacgtataaactgaaacggcacatgaggacacatagcggagaaaaaccttatgaatgccacatctgtcacactagatttacacaaagcggaactatgaaaattcacatcctgcagaaacatggggaaaatgtgccgaaatatcagtgtcctcactgcgccacaatcattgccaggaagtctgatcttagggtgcacatgcgtaacttacacgcttacagtgctgcagaacttaagtgtcgctattgcagcgcagtgttccacgagcgctatgccttgatccagcatcaaaaaacacataagaacgaaaaacgatttaaatgcaagcactgcagctacgcgtgtaaacaggagaggcatatgactgcccacattcgaactcatacaggggagaagccattcacatgtctcagttgtaataaatgtttcaggcaaaaacagttgttgaacgcccactttcggaaatatcacgatgccaatttcatcccgaccgtctacaaatgctcaaagtgtggcaaaggattctccaggtggataaacctacatcgccattctgaaaaatgcggctcaggtgaggccaagagcgccgcatctgggaagggtcgaaggacgaggaaacgcaaacagaccattttgaaggaggccactaaggggcaaaaagaagccgcgaagggatggaaggaagcggcaaacggcgacgaggcggcggccgaggaggctagcacaacgaagggggaacagttccccggcgagatgttccccgtggcctgcagagagactactgcgcgagtgaaagaggaggttgatgaaggcgtgacatgtgaaatgttgcttaacacaatggacaagtag

SEQ ID NO: 94999 - DNA, 1992 bp, Artificial Sequence
  derived and/or modified sequence
atggccgccacagagatctcggtgttgtcagaacaatttacaaagataaaagagttggagcttatgccggagaaggggctaaaggaggaggaaaaggatggcgtatgcagggaaaaggaccataggagtcctagcgagctcgaggccgagaggactagcggggcatttcaggactccgtgcttgaagaagaagtggaactggtgctcgccccctccgaggagagtgagaaatatattctgacactgcagactgtccactttacctccgaagcagtcgagttgcaggatatgtcattgctgagtatccagcagcaggagggcgtacaggtggttgtgcagcaaccaggtcctgggctgctctggcttgaggaaggtcctcgccaatcactgcaacaatgcgtggccataagcatccagcaagagctatactcccctcaggaaatggaagtcctccagttccatgctctggaagagaatgttatggtggcaagcgaggattcaaaactcgctgtttcgctggccgagactaccggcctaatcaagttagaggaggagcaggagaagaaccaacttctagcagaacgaacaaaagagcagcttttcttcgtggaaacaatgagtggtgacgagcgttccgatgaaatcgtgttgaccgtgtccaacagtaacgtggaggagcaggaggaccagcccaccgcagggcaggcagacgctgaaaaggcgaaaagcacaaagaatcagagaaagactaagggggcaaaggggacgttccattgcgatgtctgcatgtttacaagcagtcggatgagctcattcaatcgacacatgaaaacccatacgtctgagaagccgcacctgtgccatctgtgcctgaaaaccttccggaccgtgaccctgctccggaaccatgtcaatacacatactgggacaagaccatataagtgcaatgattgtaacatggcatttgtgacgtccggcgagctggtgcggcatcgcaggtataaacacacacacgaaaaaccattcaaatgtagtatgtgtaaatatgccagtgtagaggcatcgaagttgaaaagacacgtccggtctcataccggcgaaaggcctttccagtgttgccagtgtagctacgcctcccgggacacatacaagctgaaaaggcacatgcgaacgcacagtggggagaagccctatgaatgtcacatctgtcacacaaggttcactcaatcagggaccatgaaaatccacattctgcagaaacatggcgaaaatgtgccgaaatatcagtgccctcactgtgccactattatcgcaagaaagtccgatctgcgcgtgcatatgcggaatctccacgcatactccgcagccgagctcaagtgtagatactgctccgccgtgttccatgagcgctatgcacttatccaacaccagaagacacacaaaaacgagaagagattcaaatgcaagcactgttcttacgcctgtaagcaggagcgccatatgactgcacatatacgaacccacacaggcgaaaaacctttcacgtgcctgagctgtaacaagtgtttccgtcagaaacagctgctgaacgcccacttccggaaataccacgatgccaatttcattccaaccgtgtataaatgttctaagtgcgggaaggggtttagtcgatggattaacctccatcgacacagcgaaaaatgtggttctggcgaagctaaatcagccgcatccgggaaggggcgtcgcaccaggaagaggaaacagaccattctgaaagaggctaccaaagggcagaaagaagccgctaagggatggaaggaggcggccaacggagatgaggctgcagctgaggaagcctccaccacaaaaggcgaacagttcccaggcgaaatgttccccgtagcttgtcgggagaccacagctagagtgaaagaggaggtggatgagggcgtcacttgcgaaatgctgctgaacacaatggacaagtag

SEQ ID NO: 95000 - DNA, 1992 bp, Artificial Sequence
  derived and/or modified sequence
atggccgccacagagatctctgtgctgtctgagcagttcaccaagatcaaggagctggagctgatgcctgagaagggcctgaaggaggaggagaaggatggagtgtgccgggagaaggaccacaggagccccagcgagctggaggccgagaggaccagcggggccttccaggacagcgtgctggaggaggaggtggagctggtgctggcccccagcgaggagagcgagaagtacatcctgaccctgcagacagtgcacttcaccagcgaggccgtggagctgcaggacatgagcctgctgagcatccagcagcaggagggcgtgcaggtggtggtgcagcagcccggccctggcctgctgtggctggaggagggcccccggcagagcctgcagcagtgtgtggccatcagcatccagcaggagctgtacagcccccaggagatggaggtgctgcagttccacgccctggaggagaatgtgatggtggccagcgaggacagcaagctggccgtgtccctggccgagaccaccggcctcatcaagctggaggaggagcaggagaagaaccagctgctggccgagaggaccaaggagcagctgttctttgtggagaccatgtctggagatgagaggagtgatgaaattgtgctgactgtgagcaacagcaatgtggaggagcaggaggaccagcccacagctggccaggctgatgctgagaaggccaagagcaccaagaaccagaggaagaccaagggggccaagggcaccttccactgtgatgtgtgcatgttcaccagcagcaggatgagcagcttcaacagacacatgaagacccacaccagcgagaagccccacctgtgccacctgtgcctgaagaccttcagaacagtgaccctgctgagaaatcatgtgaacacccacacaggcacccggccctacaagtgcaatgactgcaacatggcctttgtgaccagcggggagctggtgcgccaccggcgctacaagcacacccatgagaagcccttcaagtgcagcatgtgcaagtatgcctctgtggaggccagcaagctgaagagacatgtgcgcagccacactggagagcggcccttccagtgctgccagtgcagctatgccagccgggacacctacaagctgaagaggcacatgaggacccacagcggggagaagccctatgagtgccacatctgccacacccgcttcacccagagcggcaccatgaagatccacatcctgcagaagcatggagaaaatgtgcccaagtaccagtgcccccactgtgccaccatcatcgccaggaagagtgacctgcgggtgcacatgaggaacctgcacgcctacagcgctgctgagctgaagtgccgctactgcagcgctgtgttccacgagagatatgccctgatccagcaccagaagacccacaagaatgagaagcgcttcaagtgcaagcactgcagctatgcctgcaagcaggagcggcacatgacagcccacatccgcacccacactggagagaagcccttcacctgcctgagctgcaacaagtgcttccggcagaagcagctgctgaatgcccacttcaggaagtaccatgatgccaacttcatccccaccgtgtacaagtgcagcaaatgtgggaagggcttcagccgctggatcaacctgcaccgccacagcgagaagtgtggcagcggggaggccaagtctgctgccagcggcaagggccgccgcaccaggaagaggaagcagaccatcctgaaggaggccaccaagggccagaaggaggccgccaagggctggaaggaggccgccaatggagatgaagctgctgctgaggaggccagcaccaccaagggggagcagtttcctggagagatgtttcctgtggcctgccgggagaccacagcccgggtgaaggaggaggtggatgaaggagtgacctgtgagatgctgctgaacaccatggacaagtag

SEQ ID NO: 95001 - DNA, 1992 bp, Artificial Sequence
  derived and/or modified sequence
atggccgccaccgagatcagcgtgctgagcgagcagttcaccaagattaaagagctcgagctgatgccagaaaagggactgaaagaagaggaaaaggacggtgtttgtcgcgagaaggatcatcgtagcccatcagagctcgaagccgagagaacttcaggcgcatttcaggactcagtgctggaagaagaagtcgagttggtgttggctcctagcgaggagagtgagaagtacatccttaccctgcaaacagtccattttactagcgaggcagtcgagcttcaggacatgtcacttctaagcatccagcagcaggagggggtgcaagtcgttgtccagcaacccgggcctggactgctttggctggaagaaggaccacgtcagtctctgcaacaatgtgtggcaatttccatccaacaggaactgtatagcccccaggaaatggaagtgctccaattccatgccctagaggagaatgtgatggttgccagcgaagattctaagctagccgtgagcctagccgagacgacaggattaatcaaacttgaggaagagcaggaaaagaatcagctcctggccgagagaactaaagaacaactgttctttgtagagactatgtcaggagacgagaggtcagatgagatcgtcctcacagtctcgaacagtaacgttgaggaacaggaggaccaacccacagccggccaagcagacgccgagaaggcgaagagcaccaagaatcagcgcaaaaccaaaggtgcaaagggtactttccattgtgacgtgtgtatgtttacgtccagtcgaatgagttcatttaacaggcacatgaagactcacacatccgagaagccacacctttgccatctgtgtcttaaaactttccgcacagtgacattactgcgaaatcatgtgaatacccacacggggacccgcccttacaaatgtaacgattgtaatatggcatttgtgacctctggagagctggtccggcataggcggtacaagcatacccacgaaaagcctttcaagtgctctatgtgcaagtacgcaagcgtagaggcatcaaaactcaaacgacatgtaaggtcgcacacaggcgagcgcccattccagtgttgtcaatgcagctacgccagcagggacacatacaaacttaagcgtcatatgagaacccacagcggagaaaagccctatgagtgccacatctgccatacccggtttacacagtcagggacgatgaaaatccacattcttcagaagcacggcgagaatgtacccaaataccagtgtccccactgtgctacaataatcgcccgcaagtccgacctgagggtccatatgagaaatctgcatgcatacagcgcggcggaacttaagtgcaggtactgctctgccgtcttccacgaacgttatgccctaattcaacatcaaaagactcataagaatgaaaaacgatttaagtgcaaacactgctcctacgcatgcaaacaggagaggcatatgacagcgcacatccgtactcatactggcgaaaagccgttcacctgcctgagttgcaacaaatgtttcaggcaaaaacagttgctcaacgctcactttcggaaataccacgacgctaattttatccccaccgtttacaaatgctctaaatgtggcaagggcttttcgcgctggattaatttgcatcgacactcagagaaatgtggtagcggagaagctaagtctgccgcaagcggcaagggcaggcgcacccgcaagagaaagcaaaccatactaaaagaggccacaaagggtcagaaagaggctgcaaagggctggaaggaggccgctaatggagatgaagccgccgcggaagaagccagcacaaccaagggcgagcaattccctggggaaatgttccccgtggcatgcagggagaccacagcaagagtcaaagaggaggtggatgaaggggtcacttgtgaaatgctgttaaataccatggataaatag

SEQ ID NO: 95002 - DNA, 1992 bp, Artificial Sequence
  derived and/or modified sequence
atggccgccaccgagatcagcgtgctgagcgagcagttcaccaagatcaaggaactggaactgatgcctgagaaaggcctgaaggaagaggagaaggacggtgtatgtagagaaaaagaccacaggtctcctagcgagctcgaggcagagcgcactagcggagcgtttcaggacagcgtcttggaagaggaagtggagttagtgctggcgccctcagaggaatctgagaaatatatcctcacccttcagactgttcactttaccagtgaggcagtcgagcttcaggatatgagtcttctgtcgatccagcagcaggaaggggtgcaggtcgtggtccagcaacctggccctggcttgttgtggctggaggaaggcccccgacagtccttgcagcagtgcgttgccattagcattcaacaggagttgtactccccacaggagatggaggtgctgcagtttcacgctcttgaggagaacgtgatggtggcaagcgaagattccaaactggcagtgtcactcgcagaaacaactggtctcatcaaactcgaggaggagcaggaaaagaatcaacttctcgccgagaggacaaaagagcaattattctttgtcgaaacaatgtccggcgacgagcgatcagacgagatagtcctgacggtttcgaactctaacgtcgaagagcaggaggatcagccaacagcaggacaggccgatgcagaaaaggccaagtccacaaagaatcagcgaaagactaaaggcgcaaagggcacgtttcactgcgacgtctgcatgtttacctcgagccgaatgtctagcttcaatcgtcatatgaagactcatacgtctgaaaaacctcacctatgtcatctgtgtctcaagacattccgcaccgtcactctcctgaggaatcatgtaaacacccacacggggacccggccatataaatgcaatgattgtaacatggccttcgtgacttctggggagctcgttaggcatcggcggtataagcacacacatgaaaaaccctttaaatgttctatgtgtaagtatgcatccgttgaagcatccaaacttaaaaggcacgttaggtctcacacaggcgagagaccctttcagtgttgccagtgtagctatgcttccagggatacctataagttaaaacggcacatgcggacacattcaggcgaaaaaccatatgaatgtcatatttgccatacacggttcacacagtccggaacgatgaaaatccatatcctgcagaaacacggagagaacgtgcctaaatatcaatgtccccactgtgccacaattatcgcccgtaagtccgacctgcgagtccacatgcgtaatctacacgcgtattctgccgccgaactcaagtgccgatattgctcagcagtctttcacgaacgttatgcactgatacagcaccagaaaacccacaaaaatgagaaacgatttaaatgcaaacactgttcgtacgcctgcaaacaggagaggcacatgacagctcacattcgaacacataccggggaaaagcctttcacttgtctatcgtgcaacaaatgcttccggcagaagcagctcttaaacgctcattttcggaaataccacgacgccaacttcattccaactgtgtacaaatgcagcaaatgcggtaagggattcagtcgctggatcaatctgcaccgacatagtgagaagtgcggctctggggaggcaaagtcagccgcctctggaaaaggtcgtagaaccaggaaaaggaagcagactatcctgaaggaggcaacaaaggggcagaaagaagctgcaaaaggatggaaggaagccgcaaacggcgacgaggctgctgctgaggaggcctcaactactaaaggcgagcaatttcctggtgagatgttcccagtggcttgtagagagacgaccgccagagttaaagaagaggtggatgagggggtgacctgcgagatgctcctgaataccatggacaagtag

SEQ ID NO: 95003 - DNA, 1992 bp, Artificial Sequence
  derived and/or modified sequence
atggctgccactgagatatccgtgttgtccgagcaatttacgaagatcaaagagctcgagctgatgccggaaaaaggcctcaaagaagaggagaaggatggcgtttgccgcgagaaagatcatagatccccatccgagctggaggcggagagaacgtccggggcatttcaggattcggttctggaggaggaagttgaactggtcctggccccaagcgaggaatctgagaaatatatcctgactctacagactgtacattttacaagcgaggccgtagagctgcaggacatgtctctcctgtccattcaacagcaggaaggagtgcaggtagttgtgcagcaacctggacctggtcttttgtggctggaagaggggcctcgtcagtcactccagcagtgcgttgccatctccattcagcaagaactctacagccctcaggaaatggaggttctgcagttccacgccctcgaggaaaatgtgatggtggcgtcggaggattccaagctggccgtctccctagctgagacaacaggcctgatcaaactcgaagaggagcaagagaaaaaccagttgcttgctgaacgaaccaaagagcagctgttcttcgtcgaaacaatgtcaggggatgagcgctctgacgaaatagtgctgacggtgagcaattctaacgtggaggagcaagaagatcagcccacggccggacaggctgacgctgaaaaggccaaaagcaccaagaaccagcgcaagactaagggagcgaaaggcacattccattgcgacgtttgtatgtttacctcgtctaggatgagctcctttaaccggcacatgaaaacccataccagcgaaaaaccccatctatgtcacttatgtcttaaaacctttagaaccgtgactctcctccggaaccacgtgaacacacacacaggtacacgcccttataaatgtaacgattgcaacatggcctttgtgaccagtggcgagctggtcagacaccggcgttacaagcacacacatgagaagcccttcaaatgctctatgtgcaagtacgcaagcgttgaggcttccaaactcaagcgccacgttagatctcatacaggggaacggccttttcagtgctgccaatgctcttatgcttctcgcgatacttacaagctgaagaggcacatgcgaacccacagtggtgaaaagccatatgaatgtcatatttgccacacccggtttacccagtctgggaccatgaagattcatatcctacagaaacatggcgagaatgtccccaaataccagtgtcctcattgtgcgactattatcgccagaaagagtgatctgcgcgttcacatgaggaatctacatgcctattcagccgctgagctcaaatgccgctattgctctgccgtatttcacgagcggtacgccctgatccagcaccagaaaacccacaagaacgagaagcgtttcaaatgtaagcactgcagctacgcttgtaagcaggaacgtcatatgacagcccatatcagaacccacacaggcgagaaacccttcacttgcctttcatgcaataagtgctttaggcagaaacagctgttgaacgctcattttcgcaaataccacgacgcaaacttcatccctactgtgtacaaatgctccaagtgtggaaagggtttcagccgctggataaatttgcacaggcactccgagaagtgcgggtccggggaggccaagtccgccgctagcggcaaggggcgaaggaccaggaagaggaagcagacgattctgaaggaagccacgaagggacagaaagaggccgcaaagggctggaaagaggcagccaatggcgacgaggccgcagcggaggaggcttctacaacaaaaggagaacagttcccgggtgaaatgttccccgtggcttgccgcgaaacaacagcgagggttaaggaggaggtcgatgaaggggtaacctgcgagatgctgttgaatacaatggataagtag

SEQ ID NO: 95004 - DNA, 1992 bp, Artificial Sequence
  derived and/or modified sequence
atggctgctactgagattagcgtcctgagcgaacaatttaccaagatcaaggagctcgaattgatgcctgaaaaaggtttgaaggaggaggagaaggacggcgtttgtcgcgagaaagatcacagatcaccatctgagcttgaggccgagagaacttccggggcatttcaagacagtgtgctcgaggaagaagtggaactggtgttggccccttcggaggaaagtgagaaatatattctcaccttgcagaccgtgcactttacctctgaggccgtggagctccaggacatgtctctgctttcaatccagcagcaagagggtgttcaagttgtagtgcagcaaccaggcccaggcttgctgtggctggaggagggtcccaggcagtcactgcagcagtgtgttgccataagcatacagcaagagctgtattccccccaagaaatggaggtgctgcagtttcacgctctggaagagaatgtgatggttgcatccgaagattcgaaactggcagttagcctggccgagaccactggcctaattaaactggaggaggagcaagaaaaaaaccaactgcttgccgagaggaccaaagagcagttgttcttcgtggagacaatgtctggggacgaacgctccgatgagatcgtgttgacagttagcaacagtaacgtggaagaacaggaggaccagccaacagctggccaagcagacgccgagaaagccaagtcaacgaaaaatcagcgtaaaacaaaaggggctaagggcacctttcattgtgatgtttgcatgttcactagttcgcgcatgagcagctttaaccgtcacatgaaaacgcacacctctgagaaaccacacctgtgtcacttatgtctcaaaactttccgcacggtcacactcctgcggaaccacgtgaatactcacaccgggaccagaccatataaatgtaatgactgtaatatggccttcgtgacaagtggcgagttagtgaggcaccggcgatataaacatacccacgaaaaacctttcaagtgtagcatgtgcaagtacgctagcgtggaggcctccaagttgaaaaggcacgtgcggtctcacaccggcgagcggccattccaatgctgtcaatgctcttacgccagcagagacacttataagctgaaaagacacatgcggacacattctggcgaaaaaccctatgagtgccacatttgtcatactcgctttacccaaagcggaaccatgaaaattcatattttgcaaaagcacggagagaatgttcccaagtatcagtgcccccactgcgccactatcatcgccaggaaaagcgacctgagagtccacatgcggaacctccatgcttattccgctgccgaattaaaatgtaggtattgctctgccgtgttccatgagcgctacgccctcatccagcatcaaaagacgcacaaaaatgagaagaggtttaagtgcaaacactgctcatacgcatgcaagcaagagcggcacatgactgcgcatattcggacccatactggtgagaaacccttcacttgcctgtcttgcaacaaatgtttccgacagaagcaattattgaatgcacactttaggaaataccacgatgccaattttatcccaacagtttataaatgttccaaatgcgggaagggcttttcacggtggatcaatctgcacagacactcagagaagtgcggaagtggtgaggcgaagagtgcggcttctggcaaaggtagacgcactagaaaacgcaagcagactatccttaaagaagcaaccaaaggccaaaaggaggctgcaaaagggtggaaagaggcagctaatggagacgaggccgctgccgaggaggcctccactactaagggcgaacaatttccaggtgagatgtttcccgtcgcctgtcgagaaacaactgctcgggtgaaggaagaagtagacgaaggagtgacatgcgaaatgctcctgaatactatggacaagtag

SEQ ID NO: 95005 - DNA, 3567 bp, Artificial Sequence
  derived and/or modified sequence
aaccctgcctggctccgcccccttcacgccccctcttttccgctccgcgcctgcgcactgccaccctccactctcgcgccagcccggcggcggccggctgtgggctgcagcacgcggtgcacgaggcagagcccacaagccaaagacggagtgggccgagcattccggccacgccttccgcggccaagtcattatggcagccactgagatctctgtcctttctgagcaattcaccaagatcaaagaactcgagttgatgccggaaaaaggcctgaaggaggaggaaaaagacggagtgtgcagagagaaagaccatcggagccctagtgagttggaggccgagcgtacctctggggccttccaggacagcgtcctggaggaagaagtggagctggtgctggccccctcggaggagagcgagaagtacatcctgaccctgcagacggtgcacttcacttctgaagctgtggagttgcaggatatgagcttgctgagcatacagcagcaagaaggggtgcaggtggtggtgcaacagcctggccctgggttgctgtggcttgaggaagggccccggcagagcctgcagcagtgtgtggccattagtatccagcaagagctgtactccccgcaagagatggaggtgttgcagttccacgctctagaggagaatgtgatggtggccagtgaagacagtaagttagcggtgagcctggctgaaactactggactgatcaagctcgaggaagagcaggagaagaaccagttattggctgaaagaacaaaggagcagctcttttttgtggaaacaatgtcaggagatgaaagaagtgacgaaattgttctcacagtttcaaattcaaatgtggaagaacaagaggatcaacctacagctggtcaagcagatgctgaaaaggccaaatctacaaaaaatcaaagaaagacaaagggagcaaaaggaaccttccactgtgatgtctgcatgttcacctcttctagaatgtcaagttttaatcgtcatatgaaaactcacaccagtgagaagcctcacctgtgtcacctctgcctgaaaaccttccgtacggtcactctgctgcggaaccatgttaacacccacacaggaaccaggccctacaagtgtaacgactgcaacatggcatttgtcaccagtggagaactcgtccgacacaggcgctataaacatactcatgagaaaccctttaaatgttccatgtgcaagtatgccagtgtggaggcaagtaaattgaagcgccatgtccgatcccacactggggagcgcccctttcagtgttgccagtgcagctatgccagcagagatacctacaagctgaaacgccacatgagaacgcactcaggtgagaagccttacgaatgccacatctgccacacccgcttcacccagagcgggaccatgaaaatacatattctgcagaaacacggcgaaaatgtccccaaataccagtgtccccattgtgccaccatcattgcacggaaaagcgacctacgtgtgcatatgcgcaacttgcatgcttacagcgctgcagagctgaaatgccgctactgttctgctgtcttccatgaacgctatgccctcattcagcaccagaaaactcataagaatgagaagaggttcaagtgcaaacactgcagttatgcctgcaagcaggaacgtcatatgaccgctcacattcgtacccacactggagagaaaccattcacctgcctttcttgcaataaatgtttccgacagaagcaacttctaaacgctcacttcaggaaataccacgatgcaaatttcatcccgactgtttacaaatgctccaagtgtggcaaaggcttttcccgctggattaacctgcacagacattcggagaagtgtggatcaggggaagcaaagtcggctgcttcaggaaagggaagaagaacaagaaagaggaagcagaccatcctgaaggaagccacaaagggtcagaaggaagctgcgaagggatggaaggaagccgcgaacggagacgaagctgctgctgaggaggcttccaccacgaagggagaacagttcccaggagagatgtttcctgtcgcctgcagagaaaccacagccagagtcaaagaggaagtggatgaaggcgtgacctgtgaaatgctcctcaacacgatggataagtgagagggattcgggttgcgtgttcactgcccccaattcctaaagcaagttagaagtttttagcatttaaggtgtgaaatgctcctcaacacgatggataagtgagagagagtcaggttgcatgttcactgcccctaattcctaaagcaagttagaaatttttagcattttctttgaaacaattaagttcatgacaatggatgacacaagtttgaggtagtgtctagaattgttctcctgtttgtagctggatatttcaaagaaacattgcaggtattttataaaagttttaaaccttgaatgagagggtaacacctcaaacctatggattcattcacttgatattggcaaggtggcccacaatgagtgagtagtgatttttggatatttcaaaatagtctagaccagctagtgcttccacagtcaaagctggacatttttatgttgcattatatacacccatgatatttctaataatatatggttttaaacattaaagacaaatgtttttatacaaatgaattttctacaaaatttaaagctaccataatgcttttaattagttctaaattcaaccaaaaaatgttttactcttataaaaaggaaaactgagtaggaaatgaaatactagattagactagaaaataaggaataaatcgattttactttggtataggagcaaggttcacctttagatttttgtattctcttttaattatgctccttggcaggtatgaaattgccctggttacattccattattgcttattagtatttcactccataacccttttttctgctaaaactactctttttatatttgtaaaataattggcagagtgagaagaaacataaaatcagataaggcaaatgtgtacctgtaaggaatttgtactttttcataatgcccagtgattagtgagtatttcccttttgccagttgacaagatttttccaccctcgagcagcgtgagagatgcctctttaacacttgaaattcatttctatctggatacagaggcagatttttcttcattgcttagttgagcagtttgttttgctgccaacctgtctccacccctgtatttcaagatcattgataagccctaaattcaaattcttaagatatggaccttttattgaaaatatcacaagttcagaatccctatacaatgtgaatatgtggaaataatttcccagcaggaagagcattatattctctttgtaccagcaaattaatttaactcaactcacatgagatttaaattctgtgggctgtagtatgccatcattgtgactgaatttgtgcaatggtttcttaatttttttactgttatttaaagatgttttacataattcaataaaatgaaatgacttaaaattgc

SEQ ID NO: 95006 - DNA, 3491 bp, Artificial Sequence
  derived and/or modified sequence
tctcccaggccccctgcaggccctcgtgccctccttacttcccccccgggtctcccagcgccccctgcggggccctcctcccttcctcatccacttcaaccccaaggccaagtcattatggcagccactgagatctctgtcctttctgagcaattcaccaagatcaaagaactcgagttgatgccggaaaaaggcctgaaggaggaggaaaaagacggagtgtgcagagagaaagaccatcggagccctagtgagttggaggccgagcgtacctctggggccttccaggacagcgtcctggaggaagaagtggagctggtgctggccccctcggaggagagcgagaagtacatcctgaccctgcagacggtgcacttcacttctgaagctgtggagttgcaggatatgagcttgctgagcatacagcagcaagaaggggtgcaggtggtggtgcaacagcctggccctgggttgctgtggcttgaggaagggccccggcagagcctgcagcagtgtgtggccattagtatccagcaagagctgtactccccgcaagagatggaggtgttgcagttccacgctctagaggagaatgtgatggtggccagtgaagacagtaagttagcggtgagcctggctgaaactactggactgatcaagctcgaggaagagcaggagaagaaccagttattggctgaaagaacaaaggagcagctcttttttgtggaaacaatgtcaggagatgaaagaagtgacgaaattgttctcacagtttcaaattcaaatgtggaagaacaagaggatcaacctacagctggtcaagcagatgctgaaaaggccaaatctacaaaaaatcaaagaaagacaaagggagcaaaaggaaccttccactgtgatgtctgcatgttcacctcttctagaatgtcaagttttaatcgtcatatgaaaactcacaccagtgagaagcctcacctgtgtcacctctgcctgaaaaccttccgtacggtcactctgctgcggaaccatgttaacacccacacaggaaccaggccctacaagtgtaacgactgcaacatggcatttgtcaccagtggagaactcgtccgacacaggcgctataaacatactcatgagaaaccctttaaatgttccatgtgcaagtatgccagtgtggaggcaagtaaattgaagcgccatgtccgatcccacactggggagcgcccctttcagtgttgccagtgcagctatgccagcagagatacctacaagctgaaacgccacatgagaacgcactcaggtgagaagccttacgaatgccacatctgccacacccgcttcacccagagcgggaccatgaaaatacatattctgcagaaacacggcgaaaatgtccccaaataccagtgtccccattgtgccaccatcattgcacggaaaagcgacctacgtgtgcatatgcgcaacttgcatgcttacagcgctgcagagctgaaatgccgctactgttctgctgtcttccatgaacgctatgccctcattcagcaccagaaaactcataagaatgagaagaggttcaagtgcaaacactgcagttatgcctgcaagcaggaacgtcatatgaccgctcacattcgtacccacactggagagaaaccattcacctgcctttcttgcaataaatgtttccgacagaagcaacttctaaacgctcacttcaggaaataccacgatgcaaatttcatcccgactgtttacaaatgctccaagtgtggcaaaggcttttcccgctggattaacctgcacagacattcggagaagtgtggatcaggggaagcaaagtcggctgcttcaggaaagggaagaagaacaagaaagaggaagcagaccatcctgaaggaagccacaaagggtcagaaggaagctgcgaagggatggaaggaagccgcgaacggagacgaagctgctgctgaggaggcttccaccacgaagggagaacagttcccaggagagatgtttcctgtcgcctgcagagaaaccacagccagagtcaaagaggaagtggatgaaggcgtgacctgtgaaatgctcctcaacacgatggataagtgagagggattcgggttgcgtgttcactgcccccaattcctaaagcaagttagaagtttttagcatttaaggtgtgaaatgctcctcaacacgatggataagtgagagagagtcaggttgcatgttcactgcccctaattcctaaagcaagttagaaatttttagcattttctttgaaacaattaagttcatgacaatggatgacacaagtttgaggtagtgtctagaattgttctcctgtttgtagctggatatttcaaagaaacattgcaggtattttataaaagttttaaaccttgaatgagagggtaacacctcaaacctatggattcattcacttgatattggcaaggtggcccacaatgagtgagtagtgatttttggatatttcaaaatagtctagaccagctagtgcttccacagtcaaagctggacatttttatgttgcattatatacacccatgatatttctaataatatatggttttaaacattaaagacaaatgtttttatacaaatgaattttctacaaaatttaaagctaccataatgcttttaattagttctaaattcaaccaaaaaatgttttactcttataaaaaggaaaactgagtaggaaatgaaatactagattagactagaaaataaggaataaatcgattttactttggtataggagcaaggttcacctttagatttttgtattctcttttaattatgctccttggcaggtatgaaattgccctggttacattccattattgcttattagtatttcactccataacccttttttctgctaaaactactctttttatatttgtaaaataattggcagagtgagaagaaacataaaatcagataaggcaaatgtgtacctgtaaggaatttgtactttttcataatgcccagtgattagtgagtatttcccttttgccagttgacaagatttttccaccctcgagcagcgtgagagatgcctctttaacacttgaaattcatttctatctggatacagaggcagatttttcttcattgcttagttgagcagtttgttttgctgccaacctgtctccacccctgtatttcaagatcattgataagccctaaattcaaattcttaagatatggaccttttattgaaaatatcacaagttcagaatccctatacaatgtgaatatgtggaaataatttcccagcaggaagagcattatattctctttgtaccagcaaattaatttaactcaactcacatgagatttaaattctgtgggctgtagtatgccatcattgtgactgaatttgtgcaatggtttcttaatttttttactgttatttaaagatgttttacataattcaataaaatgaaatgacttaaaattgc

SEQ ID NO: 95007 - DNA, 1992 bp, Artificial Sequence
  derived and/or modified sequence
atggccgccaccgagatcagcgtgctgagcgagcagttcaccaagatcaaggagctggagctgatgcccgagaagggcctgaaggaggaggagaaggacggcgtgtgcagagagaaggaccacagaagccccagcgagctggaggccgagagaaccagcggcgccttccaggacagcgtgctggaggaggaggtggagctggtgctggcccccagcgaggagagcgagaagtacatcctgaccctgcagaccgtgcacttcaccagcgaggccgtggagctgcaggacatgagcctgctgagcatccagcagcaggagggcgtgcaggtggtggtgcagcagcccggccccggcctgctgtggctggaggagggccccagacagagcctgcagcagtgcgtggccatcagcatccagcaggagctgtacagcccccaggagatggaggtgctgcagttccacgccctggaggagaacgtgatggtggccagcgaggacagcaagctggccgtgagcctggccgagaccaccggcctgatcaagctggaggaggagcaggagaagaaccagctgctggccgagagaaccaaggagcagctgttcttcgtggagaccatgagcggcgacgagagaagcgacgagatcgtgctgaccgtgagcaacagcaacgtggaggagcaggaggaccagcccaccgccggccaggccgacgccgagaaggccaagagcaccaagaaccagagaaagaccaagggcgccaagggcaccttccactgcgacgtgtgcatgttcaccagcagcagaatgagcagcttcaacagacacatgaagacccacaccagcgagaagccccacctgtgccacctgtgcctgaagaccttcagaaccgtgaccctgctgagaaaccacgtgaacacccacaccggcaccagaccctacaagtgcaacgactgcaacatggccttcgtgaccagcggcgagctggtgagacacagaagatacaagcacacccacgagaagcccttcaagtgcagcatgtgcaagtacgccagcgtggaggccagcaagctgaagagacacgtgagaagccacaccggcgagagacccttccagtgctgccagtgcagctacgccagcagagacacctacaagctgaagagacacatgagaacccacagcggcgagaagccctacgagtgccacatctgccacaccagattcacccagagcggcaccatgaagatccacatcctgcagaagcacggcgagaacgtgcccaagtaccagtgcccccactgcgccaccatcatcgccagaaagagcgacctgagagtgcacatgagaaacctgcacgcctacagcgccgccgagctgaagtgcagatactgcagcgccgtgttccacgagagatacgccctgatccagcaccagaagacccacaagaacgagaagagattcaagtgcaagcactgcagctacgcctgcaagcaggagagacacatgaccgcccacatcagaacccacaccggcgagaagcccttcacctgcctgagctgcaacaagtgcttcagacagaagcagctgctgaacgcccacttcagaaagtaccacgacgccaacttcatccccaccgtgtacaagtgcagcaagtgcggcaagggcttcagcagatggatcaacctgcacagacacagcgagaagtgcggcagcggcgaggccaagagcgccgccagcggcaagggcagaagaaccagaaagagaaagcagaccatcctgaaggaggccaccaagggccagaaggaggccgccaagggctggaaggaggccgccaacggcgacgaggccgccgccgaggaggccagcaccaccaagggcgagcagttccccggcgagatgttccccgtggcctgcagagagaccaccgccagagtgaaggaggaggtggacgagggcgtgacctgcgagatgctgctgaacaccatggacaagtag

SEQ ID NO: 95008 - protein, 700 aa, Artificial Sequence
  derived and/or modified sequence
MAATEISVLSEQFTKIKELELMPEKGLKEEEKDGVCREKDHRSPSELEAERTSGAFQDSVLEEEVELVLAPSEESEKYILTLQTVHFTSEAVELQDMSLLSIQQQEGVQVVVQQPGPGLLWLEEGPRQSLQQCVAISIQQELYSPQEMEVLQFHALEENVMVASEDSKLAVSLAETTGLIKLEEEQEKNQLLAERTKEQLFFVETMSGDERSDEIVLTVSNSNVEEQEDQPTAGQADAEKAKSTKNQRKTKGAKGTFHCDVCMFTSSRMSSFNRHMKTHTSEKPHLCHLCLKTFRTVTLLRNHVNTHTGTRPYKCNDCNMAFVTSGELVRHRRYKHTHEKPFKCSMCKYASVEASKLKRHVRSHTGERPFQCCQCSYASRDTYKLKRHMRTHSGEKPYECHICHTRFTQSGTMKIHILQKHGENVPKYQCPHCATIIARKSDLRVHMRNLHAYSAAELKCRYCSAVFHERYALIQHQKTHKNEKRFKCKHCSYACKQERHMTAHIRTHTGEKPFTCLSCNKCFRQKQLLNAHFRKYHDANFIPTVYKCSKCGKGFSRWINLHRHSEKCGSGEAKSAASGKGRRTRKRKQTILKEATKGQKEAAKGWKEAANGDEAAAEEASTTKGEQFPGEMFPVACRETTARVKEEVDEGVTCEMLLNTMDNSAGCTGRMMLVSAWLLGRPQETYNQGRRRRGSRRVTW

SEQ ID NO: 95009 - protein, 451 aa, Artificial Sequence
  derived and/or modified sequence
MAATEISVLSEQFTKIKELELMPEKGLKEEEKDGVCREKDHRSPSELEAERTSGAFQDSVLEEEVELVLAPSEESEKYILTLQTVHFTSEAVELQDMSLLSIQQQEGVQVVVQQPGPGLLWLEEGPRQSLQQCVAISIQQELYSPQEMEVLQFHALEENVMVASEDSKLAVSLAETTGLIKLEEEQEKNQLLAERTKEQLFFVETMSGDERSDEIVLTVSNSNVEEQEDQPTAGQADAEKAKSTKNQRKTKGAKGTFHCDVCMFTSSRMSSFNRHMKTHTSEKPHLCHLCLKTFRTVTLLRNHVNTHTGTRPYKCNDCNMAFVTSGELVRHRRYKHTHEKPFKCSMCKYASVEASKLKRHVRSHTGERPFQCCQCSYASRDTYKLKRHMRTHSGEKPYECHICHTRFTQSGTMKIHILQKHGENVPKYQCPHCATIIARKSDLRFLGLPFP

SEQ ID NO: 95010 - DNA, 2103 bp, Artificial Sequence
  derived and/or modified sequence
atggccgctacggaaatctcagtgttgagcgaacaattcaccaagatcaaggaactcgaattaatgccagaaaagggactcaaagaagaagaaaaggatggcgtgtgtcgcgaaaaggaccatagatctccgtccgagctggaagcggagcgaactagcggcgcattccaggattcagtactggaagaagaagtggagctcgtcctcgccccaagcgaggaatcagagaagtacattctgacactccagacagtccacttcacaagtgaggccgtggagctccaggacatgagtctgttgagcattcagcagcaggaaggagttcaagttgtagtccagcaacccggcccagggttgctgtggcttgaggaagggccaaggcaatctctgcagcaatgcgttgcaataagcattcagcaggagctgtacagtccgcaggagatggaagtgctgcagtttcacgccctggaagaaaacgtcatggtggcatccgaggactctaaattggctgtatctctcgcggaaacaacgggtctgatcaagctggaagaggagcaggagaagaaccaacttctggctgagcgtacgaaagagcagctgttctttgtggaaaccatgtcaggtgatgagagaagtgatgaaatcgttctcaccgttagtaattctaacgtcgaggagcaagaggaccagccgacagcaggacaggcggacgctgagaaggcgaaatccacaaaaaatcagagaaagacgaagggcgctaagggcacattccattgtgatgtgtgcatgtttaccagtagcagaatgtcctctttcaaccgccacatgaagacccacacatcagaaaaaccacacctctgccatctgtgtctaaagacatttagaacggtgactcttttgcgaaatcacgtgaatactcacacgggaactcgtccatacaagtgtaacgattgcaatatggcttttgtgacttctggtgagctggtgcgccaccgccggtacaaacacactcacgagaagcccttcaaatgctctatgtgtaagtatgcctccgtggaggcctccaaactaaagagacacgtgcgctctcataccggagaaagacccttccagtgttgccaatgttcctatgcctctcgggacacctacaagctcaagaggcacatgcgaactcattctggggagaaaccgtacgagtgccatatctgccacacccgtttcacacagtccggaaccatgaaaattcatattttacagaagcatggagaaaacgttccaaagtatcagtgcccccattgcgcaactatcattgctcgaaaaagcgatctgcgtgtgcacatgcggaatcttcatgcatattctgcagccgaactgaagtgtaggtattgttctgctgtcttccatgaaaggtacgcccttattcagcatcaaaagacacacaaaaatgagaaacggtttaaatgtaagcattgcagctatgcctgcaaacaggaaagacacatgactgcccacatacgaacacatacgggggagaagccttttacgtgtttatcttgtaacaaatgtttcagacaaaaacagttgctaaacgcccatttcaggaagtaccatgatgctaacttcatacccacagtatacaaatgttctaaatgcggcaagggcttctcgagatggataaacctgcatcggcactcagaaaaatgcggtagtggtgaagcgaagagcgcagcctccggcaagggaagacggacacgtaagaggaagcagactatccttaaagaggctacgaaagggcagaaggaagccgccaagggctggaaggaagccgccaatggcgacgaagccgcagccgaagaagcttcaaccactaagggagagcagtttcccggagagatgtttccagtggcttgccgtgaaactacagctagagtgaaagaagaggttgacgagggagttacttgcgaaatgctccttaacactatggacaactctgctgggtgtaccggacggatgatgctggtctctgcgtggctcctgggcagaccacaggagacctataaccagggcaggagaagacggggcagcagaagggtgacctggtag

SEQ ID NO: 95011 - DNA, 2103 bp, Artificial Sequence
  derived and/or modified sequence
atggccgccacagagatctctgtgctgtctgagcagttcaccaagatcaaggagctggagctgatgcctgagaagggcctgaaggaggaggagaaggatggagtgtgccgggagaaggaccacaggagccccagcgagctggaggccgagaggaccagcggggccttccaggacagcgtgctggaggaggaggtggagctggtgctggcccccagcgaggagagcgagaagtacatcctgaccctgcagacagtgcacttcaccagcgaggccgtggagctgcaggacatgagcctgctgagcatccagcagcaggagggcgtgcaggtggtggtgcagcagcccggccctggcctgctgtggctggaggagggcccccggcagagcctgcagcagtgtgtggccatcagcatccagcaggagctgtacagcccccaggagatggaggtgctgcagttccacgccctggaggagaatgtgatggtggccagcgaggacagcaagctggccgtgtccctggccgagaccaccggcctcatcaagctggaggaggagcaggagaagaaccagctgctggccgagaggaccaaggagcagctgttctttgtggagaccatgtctggagatgagaggagtgatgaaattgtgctgactgtgagcaacagcaatgtggaggagcaggaggaccagcccacagctggccaggctgatgctgagaaggccaagagcaccaagaaccagaggaagaccaagggggccaagggcaccttccactgtgatgtgtgcatgttcaccagcagcaggatgagcagcttcaacagacacatgaagacccacaccagcgagaagccccacctgtgccacctgtgcctgaagaccttcagaacagtgaccctgctgagaaatcatgtgaacacccacacaggcacccggccctacaagtgcaatgactgcaacatggcctttgtgaccagcggggagctggtgcgccaccggcgctacaagcacacccatgagaagcccttcaagtgcagcatgtgcaagtatgcctctgtggaggccagcaagctgaagagacatgtgcgcagccacactggagagcggcccttccagtgctgccagtgcagctatgccagccgggacacctacaagctgaagaggcacatgaggacccacagcggggagaagccctatgagtgccacatctgccacacccgcttcacccagagcggcaccatgaagatccacatcctgcagaagcatggagaaaatgtgcccaagtaccagtgcccccactgtgccaccatcatcgccaggaagagtgacctgcgggtgcacatgaggaacctgcacgcctacagcgctgctgagctgaagtgccgctactgcagcgctgtgttccacgagagatatgccctgatccagcaccagaagacccacaagaatgagaagcgcttcaagtgcaagcactgcagctatgcctgcaagcaggagcggcacatgacagcccacatccgcacccacactggagagaagcccttcacctgcctgagctgcaacaagtgcttccggcagaagcagctgctgaatgcccacttcaggaagtaccatgatgccaacttcatccccaccgtgtacaagtgcagcaaatgtgggaagggcttcagccgctggatcaacctgcaccgccacagcgagaagtgtggcagcggggaggccaagtctgctgccagcggcaagggccgccgcaccaggaagaggaagcagaccatcctgaaggaggccaccaagggccagaaggaggccgccaagggctggaaggaggccgccaatggagatgaagctgctgctgaggaggccagcaccaccaagggggagcagtttcctggagagatgtttcctgtggcctgccgggagaccacagcccgggtgaaggaggaggtggatgaaggagtgacctgtgagatgctgctgaacaccatggacaacagcgctggctgcaccggccgcatgatgctggtgtctgcctggctgctgggccggccccaggagacctacaaccagggcagaagaagaagaggcagccggcgggtgacctggtag

SEQ ID NO: 95012 - DNA, 2103 bp, Artificial Sequence
  derived and/or modified sequence
atggccgccaccgagatcagcgtgctgagcgagcagttcaccaagatcaaagagttagagctcatgcccgagaagggattaaaggaagaagaaaaagatggtgtgtgtagggaaaaagaccacagatcccccagtgagttggaagctgagagaacatctggcgccttccaagattcagtgctggaggaggaggtagagctcgttctcgccccctccgaggagagtgagaagtacatcctcactcttcagaccgtacacttcacctccgaggccgttgagctgcaggacatgtccctgctgagcattcagcagcaagagggcgtccaggtggtcgtccagcagccaggcccaggtctgctttggttagaagaaggaccacgccagagtctgcaacagtgtgtcgcgatctctatccagcaagaactctatagccctcaggagatggaagtcctgcagtttcatgcgctggaggagaatgtgatggtggctagtgaagactcaaagctggctgtaagtttagccgaaacaactggcttaatcaagctggaggaggaacaggaaaaaaaccagctgttggccgagcgtactaaagagcagctgttttttgtggaaactatgtctggagatgagcgatcggacgagatcgtcctgactgtgtctaactctaatgtcgaagaacaggaggatcagcccactgcagggcaagccgatgctgaaaaagctaaatctaccaaaaaccagagaaagacaaagggagccaaaggaacgtttcactgcgacgtctgcatgtttacgagctcccgcatgtcctcttttaacaggcacatgaaaacacacacttccgagaaaccgcacctgtgtcatttatgtttaaagaccttccgcaccgtgacactgttgcggaaccatgttaatacccacacaggcactagaccttacaagtgtaacgactgtaacatggcctttgtcacgtcaggcgaactcgtgcgccaccgccgctacaagcatactcatgagaaaccgtttaagtgtagcatgtgcaaatatgcctcggtggaggcttcaaaattgaaaaggcacgttcggtcccataccggggaacgtccatttcagtgctgccagtgttcttatgcaagccgcgatacatacaagctcaaacgccatatgagaacccactccggtgaaaaaccatacgagtgccatatatgccacaccagattcacccagagcggaacgatgaaaatccacatcttgcagaagcacggggagaacgtgccaaagtatcagtgccctcattgcgccaccatcatcgcaagaaaatctgacttgcgagtgcatatgagaaatctacacgcctattctgccgcggaactgaagtgcagatactgcagcgccgtctttcacgagcggtatgccctgatccagcatcaaaagacgcacaagaacgagaagcggtttaagtgcaagcattgcagttacgcatgtaagcaggagagacacatgaccgctcatataagaactcatacaggagagaaacctttcacctgtctatcatgcaataagtgtttccgccaaaagcaactgctgaacgcacactttagaaaataccacgatgcaaattttattccaactgtctacaagtgctccaaatgcggcaaaggcttcagccgatggataaatctccaccgacattctgaaaagtgtggatctggggaggctaaaagtgctgcaagtggaaaggggcgcaggactcgaaaacggaaacagactatccttaaggaggctaccaagggacaaaaggaagctgcgaaaggctggaaggaagcagccaatggagacgaggctgcggccgaagaagcctcaaccaccaagggtgagcagttcccgggggagatgtttcctgtagcatgtcgggagaccacagctagggtgaaggaggaagtcgacgagggcgtgacatgtgaaatgctgttgaacaccatggataattcggccgggtgtactggacgtatgatgctggtgtccgcctggctacttggtagaccgcaggagacctataatcaaggtaggaggaggcggggatcacggcgggtgacatggtag

SEQ ID NO: 95013 - DNA, 2103 bp, Artificial Sequence
  derived and/or modified sequence
atggcagccacagaaatttccgtgctttccgagcaatttaccaaaataaaggagctagagctgatgcctgagaaaggccttaaagaggaggagaaggacggcgtctgcagggaaaaggaccaccgttcccctagcgagctagaagctgaacgtacgtccggcgctttccaagacagcgtcctggaggaggaggtagagctagtgttggcccctagcgaggaatccgagaagtatattctgaccctgcagaccgtacactttacatctgaagccgtggagctgcaagatatgtcattgctttccattcagcagcaggagggcgttcaggtggttgttcagcagcctgggccaggcctgctctggctcgaggaaggcccacgacagtccttgcagcagtgtgttgccatctcaattcagcaggaactgtattctccccaggagatggaggtgctccagttccatgccctggaagagaacgtaatggtcgccagcgaagatagcaaacttgccgtgtccctggctgagaccaccggcttgattaaactagaagaagaacaggagaagaatcagctgctggccgagcgaactaaggagcagctgttttttgtggagacgatgagtggagatgagagatccgatgagattgttctcacggtctccaactctaatgtggaggagcaggaggatcagcctactgcgggtcaggcggatgccgagaaagccaagagcactaagaaccagcggaaaactaagggggcaaaaggtacattccattgcgacgtttgcatgtttacctcttcaagaatgtccagctttaataggcacatgaagactcacacctcagagaaaccccacctgtgccacctgtgcctgaagactttcagaactgtgactctattacggaaccacgttaatacacacacaggtacccggccatacaaatgcaatgactgtaatatggcctttgtgacttccggtgagctggtaaggcatcggagatacaaacatacacacgaaaagccatttaagtgcagcatgtgtaagtacgcatcagtggaggcatcaaagttaaaaagacacgtgcgctctcataccggggagcgcccttttcagtgctgccagtgcagctatgcctcaagagacacatacaagttaaagcggcacatgaggacgcacagcggcgagaagccttacgaatgtcacatttgccatactcgattcacacagtcaggcactatgaagatccacattctgcaaaagcatggcgaaaacgtgcccaagtatcaatgccctcactgcgccactatcattgccagaaagtccgacctgcgggtccacatgaggaatctgcacgcctattccgctgccgaactcaagtgtcggtattgctctgctgtgtttcacgagagatacgctcttattcaacatcagaaaacccataagaatgaaaagcgttttaagtgcaagcactgcagttacgcgtgcaagcaagaaagacacatgacagcccacatacgtacacacacgggggagaagccgttcacatgtctttcttgcaacaaatgtttccggcagaagcagctgttgaacgctcactttcgaaagtatcacgatgccaattttataccaacagtgtataagtgcagcaagtgcgggaagggattcagccgctggattaatttacacagacatagcgaaaaatgcggatcaggggaagcaaaatctgcagcatccggtaaaggaaggcgcactcgcaagcgtaagcagaccatcctcaaggaggccaccaaaggccagaaagaagccgctaaggggtggaaagaggccgctaatggcgacgaggctgctgctgaagaagccagtaccacaaagggggagcagttccccggagaaatgttccctgtcgcatgccgggaaactactgctagagttaaagaggaggtggatgagggagtgacatgtgagatgttgctgaatactatggataattcagccggatgtacaggacgaatgatgcttgtgtctgcgtggttattaggtcgaccccaggagacttacaaccagggcagaagacgcagaggatcacgacgggtgacatggtag

SEQ ID NO: 95014 - DNA, 2479 bp, Artificial Sequence
  derived and/or modified sequence
ggctgcagcacgcggtgcacgaggcagagcccacaagccaaagacggagtgggccgagcattccggccacgccttccgcggccaagtcattatggcagccactgagatctctgtcctttctgagcaattcaccaagatcaaagaactcgagttgatgccggaaaaaggcctgaaggaggaggaaaaagacggagtgtgcagagagaaagaccatcggagccctagtgagttggaggccgagcgtacctctggggccttccaggacagcgtcctggaggaagaagtggagctggtgctggccccctcggaggagagcgagaagtacatcctgaccctgcagacggtgcacttcacttctgaagctgtggagttgcaggatatgagcttgctgagcatacagcagcaagaaggggtgcaggtggtggtgcaacagcctggccctgggttgctgtggcttgaggaagggccccggcagagcctgcagcagtgtgtggccattagtatccagcaagagctgtactccccgcaagagatggaggtgttgcagttccacgctctagaggagaatgtgatggtggccagtgaagacagtaagttagcggtgagcctggctgaaactactggactgatcaagctcgaggaagagcaggagaagaaccagttattggctgaaagaacaaaggagcagctcttttttgtggaaacaatgtcaggagatgaaagaagtgacgaaattgttctcacagtttcaaattcaaatgtggaagaacaagaggatcaacctacagctggtcaagcagatgctgaaaaggccaaatctacaaaaaatcaaagaaagacaaagggagcaaaaggaaccttccactgtgatgtctgcatgttcacctcttctagaatgtcaagttttaatcgtcatatgaaaactcacaccagtgagaagcctcacctgtgtcacctctgcctgaaaaccttccgtacggtcactctgctgcggaaccatgttaacacccacacaggaaccaggccctacaagtgtaacgactgcaacatggcatttgtcaccagtggagaactcgtccgacacaggcgctataaacatactcatgagaaaccctttaaatgttccatgtgcaagtatgccagtgtggaggcaagtaaattgaagcgccatgtccgatcccacactggggagcgcccctttcagtgttgccagtgcagctatgccagcagagatacctacaagctgaaacgccacatgagaacgcactcaggtgagaagccttacgaatgccacatctgccacacccgcttcacccagagcgggaccatgaaaatacatattctgcagaaacacggcgaaaatgtccccaaataccagtgtccccattgtgccaccatcattgcacggaaaagcgacctacgtgtgcatatgcgcaacttgcatgcttacagcgctgcagagctgaaatgccgctactgttctgctgtcttccatgaacgctatgccctcattcagcaccagaaaactcataagaatgagaagaggttcaagtgcaaacactgcagttatgcctgcaagcaggaacgtcatatgaccgctcacattcgtacccacactggagagaaaccattcacctgcctttcttgcaataaatgtttccgacagaagcaacttctaaacgctcacttcaggaaataccacgatgcaaatttcatcccgactgtttacaaatgctccaagtgtggcaaaggcttttcccgctggattaacctgcacagacattcggagaagtgtggatcaggggaagcaaagtcggctgcttcaggaaagggaagaagaacaagaaagaggaagcagaccatcctgaaggaagccacaaagggtcagaaggaagctgcgaagggatggaaggaagccgcgaacggagacgaagctgctgctgaggaggcttccaccacgaagggagaacagttcccaggagagatgtttcctgtcgcctgcagagaaaccacagccagagtcaaagaggaagtggatgaaggcgtgacctgtgaaatgctcctcaacacgatggataattccgcaggctgtacaggaaggatgatgttggtatctgcctggcttctggggaggcctcaggaaacttacaatcaaggcagaaggcgaagagggagtaggcgcgtcacatggtgaaagcaggagcgagagagggggaggcgccacactcctctgaacgaccagattccttgagaaccgccactgtcatgaggacagcaccaagcggatggtgctaaatcattcctaagaaaccgcccccgtgatccagtcacctcctaccaggccccacctccaacactggggattacaattcaacatgagctttggccagggacaaatatccaaactatatcatgtattttactacaaccaaatgtatgttaatttcaaaaacagataacataaatatgtttgaaaacg

SEQ ID NO: 95015 - DNA, 2103 bp, Artificial Sequence
  derived and/or modified sequence
atggccgccaccgagatcagcgtgctgagcgagcagttcaccaagatcaaggagctggagctgatgcccgagaagggcctgaaggaggaggagaaggacggcgtgtgcagagagaaggaccacagaagccccagcgagctggaggccgagagaaccagcggcgccttccaggacagcgtgctggaggaggaggtggagctggtgctggcccccagcgaggagagcgagaagtacatcctgaccctgcagaccgtgcacttcaccagcgaggccgtggagctgcaggacatgagcctgctgagcatccagcagcaggagggcgtgcaggtggtggtgcagcagcccggccccggcctgctgtggctggaggagggccccagacagagcctgcagcagtgcgtggccatcagcatccagcaggagctgtacagcccccaggagatggaggtgctgcagttccacgccctggaggagaacgtgatggtggccagcgaggacagcaagctggccgtgagcctggccgagaccaccggcctgatcaagctggaggaggagcaggagaagaaccagctgctggccgagagaaccaaggagcagctgttcttcgtggagaccatgagcggcgacgagagaagcgacgagatcgtgctgaccgtgagcaacagcaacgtggaggagcaggaggaccagcccaccgccggccaggccgacgccgagaaggccaagagcaccaagaaccagagaaagaccaagggcgccaagggcaccttccactgcgacgtgtgcatgttcaccagcagcagaatgagcagcttcaacagacacatgaagacccacaccagcgagaagccccacctgtgccacctgtgcctgaagaccttcagaaccgtgaccctgctgagaaaccacgtgaacacccacaccggcaccagaccctacaagtgcaacgactgcaacatggccttcgtgaccagcggcgagctggtgagacacagaagatacaagcacacccacgagaagcccttcaagtgcagcatgtgcaagtacgccagcgtggaggccagcaagctgaagagacacgtgagaagccacaccggcgagagacccttccagtgctgccagtgcagctacgccagcagagacacctacaagctgaagagacacatgagaacccacagcggcgagaagccctacgagtgccacatctgccacaccagattcacccagagcggcaccatgaagatccacatcctgcagaagcacggcgagaacgtgcccaagtaccagtgcccccactgcgccaccatcatcgccagaaagagcgacctgagagtgcacatgagaaacctgcacgcctacagcgccgccgagctgaagtgcagatactgcagcgccgtgttccacgagagatacgccctgatccagcaccagaagacccacaagaacgagaagagattcaagtgcaagcactgcagctacgcctgcaagcaggagagacacatgaccgcccacatcagaacccacaccggcgagaagcccttcacctgcctgagctgcaacaagtgcttcagacagaagcagctgctgaacgcccacttcagaaagtaccacgacgccaacttcatccccaccgtgtacaagtgcagcaagtgcggcaagggcttcagcagatggatcaacctgcacagacacagcgagaagtgcggcagcggcgaggccaagagcgccgccagcggcaagggcagaagaaccagaaagagaaagcagaccatcctgaaggaggccaccaagggccagaaggaggccgccaagggctggaaggaggccgccaacggcgacgaggccgccgccgaggaggccagcaccaccaagggcgagcagttccccggcgagatgttccccgtggcctgcagagagaccaccgccagagtgaaggaggaggtggacgagggcgtgacctgcgagatgctgctgaacaccatggacaacagcgccggctgcaccggcagaatgatgctggtgagcgcctggctgctgggcagaccccaggagacctacaaccagggcagaagaagaagaggcagcagaagagtgacctggtag

SEQ ID NO: 95016 - protein, 665 aa, Artificial Sequence
  derived and/or modified sequence
MAATEISVLSEQFTKIKELELMPEKGLKEEEKDGVCREKDHRSPSELEAERTSGAFQDSVLEEEVELVLAPSEESEKYILTLQTVHFTSEAVELQDMSLLSIQQQEGVQVVVQQPGPGLLWLEEGPRQSLQQCVAISIQQELYSPQEMEVLQFHALEENVMVASEDSKLAVSLAETTGLIKLEEEQEKNQLLAERTKEQLFFVETMSGDERSDEIVLTVSNSNVEEQEDQPTAGQADAEKAKSTKNQRKTKGAKGTFHCDVCMFTSSRMSSFNRHMKTHTSEKPHLCHLCLKTFRTVTLLRNHVNTHTGTRPYKCNDCNMAFVTSGELVRHRRYKHTHEKPFKCSMCKYASVEASKLKRHVRSHTGERPFQCCQCSYASRDTYKLKRHMRTHSGEKPYECHICHTRFTQSGTMKIHILQKHGENVPKYQCPHCATIIARKSDLRVHMRNLHAYSAAELKCRYCSAVFHERYALIQHQKTHKNEKRFKCKHCSYACKQERHMTAHIRTHTGEKPFTCLSCNKCFRQKQLLNAHFRKYHDANFIPTVYKCSKCGKGFSRWINLHRHSEKCGSGEAKSAASGKGRRTRKRKQTILKEATKGQKEAAKGWKEAANGDGVISAHRNLCLLGSSDSHASVSGAGITDARHHAWLIVLLFLVEMGFYHVSHS

SEQ ID NO: 95017 - protein, 403 aa, Artificial Sequence
  derived and/or modified sequence
MFTSSRMSSFNRHMKTHTSEKPHLCHLCLKTFRTVTLLRNHVNTHTGTRPYKCNDCNMAFVTSGELVRHRRYKHTHEKPFKCSMCKYASVEASKLKRHVRSHTGERPFQCCQCSYASRDTYKLKRHMRTHSGEKPYECHICHTRFTQSGTMKIHILQKHGENVPKYQCPHCATIIARKSDLRVHMRNLHAYSAAELKCRYCSAVFHERYALIQHQKTHKNEKRFKCKHCSYACKQERHMTAHIRTHTGEKPFTCLSCNKCFRQKQLLNAHFRKYHDANFIPTVYKCSKCGKGFSRWINLHRHSEKCGSGEAKSAASGKGRRTRKRKQTILKEATKGQKEAAKGWKEAANGDGVISAHRNLCLLGSSDSHASVSGAGITDARHHAWLIVLLFLVEMGFYHVSHS

SEQ ID NO: 95018 - DNA, 1998 bp, Artificial Sequence
  derived and/or modified sequence
atggccgccacagagattagtgtgctgtcagagcagtttaccaaaataaaagaactcgagcttatgcccgaaaaaggacttaaagaggaagagaaggatggcgtgtgccgggagaaggatcatagaagcccttcagagctggaggcagagcggaccagtggggcatttcaggatagcgtgctcgaagaggaggtagagcttgtgcttgccccgagtgaagaatcggaaaagtacatcctgactctgcagacagtgcatttcacatccgaagctgtggagctccaggatatgtccctgctctctatccagcagcaggagggtgtgcaggtggtggtacaacagccgggccctggcctcctatggctggaggaggggcctcggcaatcacttcagcagtgtgtggcgatcagtatccagcaggagttgtattccccacaagaaatggaggtcttacagtttcatgccctcgaagagaatgtgatggtcgcttcagaagatagtaagctagccgtcagcctcgccgaaacaacaggccttattaagcttgaagaggaacaggagaagaatcagcttctggccgagcggaccaaggaacagctttttttcgtggagaccatgagtggagatgagaggtcagatgagattgtgctgacagtgtccaatagcaacgtagaggagcaggaagaccagcctaccgctggccaagcagatgccgaaaaggctaagtccacgaagaaccaacgcaagaccaagggtgccaagggaaccttccactgtgatgtttgcatgtttacttccagtcgaatgagctcattcaatcggcacatgaagactcatacttccgagaaaccgcacttgtgccatctgtgtttgaagacattcaggacagttaccttattgcggaatcacgtgaatacccacacaggcacacgcccttataaatgcaacgactgtaacatggcttttgtgacgtctggggagctggtgagacaccgcaggtataagcacacacacgagaaaccctttaaatgttccatgtgcaagtatgctagcgtcgaggcctccaagctaaagcgtcatgtgcggtcacacacgggggaacgaccctttcagtgctgccaatgttcatacgcgtcaagggacacctataagctgaagagacatatgcgtacccattctggcgaaaaaccctacgaatgccacatctgccatacccgctttacccagagcgggaccatgaaaatacacatcttgcagaaacatggcgagaatgtaccaaagtatcagtgcccacattgtgcaacgattatcgctcggaaatcggatttaagggtccacatgaggaacctgcacgcgtattcagctgcagaactgaagtgccgctactgttcagccgttttccacgagagatacgccctgatccaacatcagaaaacacataaaaatgaaaagcggttcaaatgtaagcattgcagttatgcctgtaagcaggaacgacatatgaccgcccatatcaggacccatactggggagaaaccgtttacgtgtctctcctgtaacaaatgtttccggcagaagcagttgctgaatgctcatttcaggaagtaccacgatgccaatttcattccaacagtctacaagtgctccaagtgtggaaagggtttctccaggtggatcaacctgcatagacattcagaaaaatgcggctctggtgaagccaaatccgctgcttccggcaagggaagacggaccagaaaaaggaaacaaacaatcctgaaggaagccacaaagggccagaaagaagccgccaaggggtggaaggaggccgccaacggtgatggggtgatcagtgctcatcgtaacctgtgcctcctggggagttctgactcccacgcatccgtgagtggggcaggtattacagatgctagacatcatgcatggctgatagtcctgcttttcctggttgagatgggcttttatcatgtttcacattcttag

SEQ ID NO: 95019 - DNA, 1998 bp, Artificial Sequence
  derived and/or modified sequence
atggccgccacagagatctctgtgctgtctgagcagttcaccaagatcaaggagctggagctgatgcctgagaagggcctgaaggaggaggagaaggatggagtgtgccgggagaaggaccacaggagccccagcgagctggaggccgagaggaccagcggggccttccaggacagcgtgctggaggaggaggtggagctggtgctggcccccagcgaggagagcgagaagtacatcctgaccctgcagacagtgcacttcaccagcgaggccgtggagctgcaggacatgagcctgctgagcatccagcagcaggagggcgtgcaggtggtggtgcagcagcccggccctggcctgctgtggctggaggagggcccccggcagagcctgcagcagtgtgtggccatcagcatccagcaggagctgtacagcccccaggagatggaggtgctgcagttccacgccctggaggagaatgtgatggtggccagcgaggacagcaagctggccgtgtccctggccgagaccaccggcctcatcaagctggaggaggagcaggagaagaaccagctgctggccgagaggaccaaggagcagctgttctttgtggagaccatgtctggagatgagaggagtgatgaaattgtgctgactgtgagcaacagcaatgtggaggagcaggaggaccagcccacagctggccaggctgatgctgagaaggccaagagcaccaagaaccagaggaagaccaagggggccaagggcaccttccactgtgatgtgtgcatgttcaccagcagcaggatgagcagcttcaacagacacatgaagacccacaccagcgagaagccccacctgtgccacctgtgcctgaagaccttcagaacagtgaccctgctgagaaatcatgtgaacacccacacaggcacccggccctacaagtgcaatgactgcaacatggcctttgtgaccagcggggagctggtgcgccaccggcgctacaagcacacccatgagaagcccttcaagtgcagcatgtgcaagtatgcctctgtggaggccagcaagctgaagagacatgtgcgcagccacactggagagcggcccttccagtgctgccagtgcagctatgccagccgggacacctacaagctgaagaggcacatgaggacccacagcggggagaagccctatgagtgccacatctgccacacccgcttcacccagagcggcaccatgaagatccacatcctgcagaagcatggagaaaatgtgcccaagtaccagtgcccccactgtgccaccatcatcgccaggaagagtgacctgcgggtgcacatgaggaacctgcacgcctacagcgctgctgagctgaagtgccgctactgcagcgctgtgttccacgagagatatgccctgatccagcaccagaagacccacaagaatgagaagcgcttcaagtgcaagcactgcagctatgcctgcaagcaggagcggcacatgacagcccacatccgcacccacactggagagaagcccttcacctgcctgagctgcaacaagtgcttccggcagaagcagctgctgaatgcccacttcaggaagtaccatgatgccaacttcatccccaccgtgtacaagtgcagcaaatgtgggaagggcttcagccgctggatcaacctgcaccgccacagcgagaagtgtggcagcggggaggccaagtctgctgccagcggcaagggccgccgcaccaggaagaggaagcagaccatcctgaaggaggccaccaagggccagaaggaggccgccaagggctggaaggaggccgccaatggagatggagtcatcagcgcccacaggaacctgtgcctgctgggcagcagtgacagccacgcctctgtgtctggagctggcatcacagatgcccggcaccacgcctggctgattgtgctgctcttcctggtggagatgggcttctaccacgtgagccacagctag

SEQ ID NO: 95020 - DNA, 1998 bp, Artificial Sequence
  derived and/or modified sequence
atggccgccaccgagatcagcgtgctgagcgagcagttcaccaagatcaaggagctggagctcatgccggagaagggtttgaaggaagaggaaaaggacggcgtttgccgtgagaaagatcatcgttcacccagcgagctggaggccgaacggacaagcggggcctttcaggatagcgtgctggaggaagaggtggagctggtgctcgcaccatcggaggagtccgagaagtacatcttgaccctgcagaccgttcactttacctcggaagccgtggagctccaggacatgagcctccttagtatccagcagcaagagggtgtgcaggtggttgttcagcaacctggtccaggcttgctttggctagaagagggtcctcgtcaaagcctgcagcagtgtgtcgccatctccatccagcaggagttgtactccccacaggagatggaggtgctgcagttccatgccctcgaggagaatgtgatggtggccagcgaggactccaagctggccgtcagtttggcagagacaactggtctcatcaagcttgaggaggagcaggagaaaaatcagctcctggctgaacgtaccaaagagcagctgttctttgtggagactatgagtggggacgagcggagcgacgaaattgtgcttactgtgagcaacagcaacgtcgaagagcaggaggaccaacccaccgcggggcaggccgacgccgaaaaggccaaatccaccaagaatcagcgcaaaactaaaggtgctaaagggacatttcattgcgacgtatgtatgttcacctcaagtcggatgtctagctttaatagacatatgaaaacgcacacctccgagaagccccacctatgccatctgtgcctcaagacctttaggaccgtgacattgttgcggaaccatgtcaatactcatactggtaccaggccttataaatgcaacgactgtaacatggcttttgtgacttccggtgaactggtgcgtcaccgtcggtataagcacacccatgaaaaaccctttaaatgctctatgtgtaagtatgcttccgttgaggcaagcaaactgaaaagacacgtccgttctcacacaggcgaaagacccttccagtgctgccagtgctcttacgcctctcgcgacacctacaaactcaaacgccatatgagaacacattctggcgaaaagccctatgaatgccacatttgtcacacgcggtttacacaaagcgggacaatgaagattcatatcctgcagaaacacggggaaaatgttcctaaataccagtgcccacactgcgctacaatcatcgccagaaagtctgaccttcgcgtccacatgcggaatctgcatgcatactctgccgctgagctcaaatgccgctactgtagcgccgtgtttcacgaacgttatgccctcattcagcaccagaaaacccataagaacgagaagcgatttaaatgcaaacattgctcctatgcttgcaaacaggagagacacatgacagcccacatcagaacccacacaggggagaaaccctttacttgcctgagctgcaacaaatgtttcaggcagaaacaactcttgaatgctcatttcaggaaatatcacgatgccaactttattcccactgtgtataaatgttctaagtgcggcaaaggcttcagcagatggattaatcttcatcgccactctgagaagtgcgggtccggggaagccaagtccgcagcttcagggaaaggacgccgaacccgaaaaaggaaacagaccatcctcaaggaagctaccaaggggcagaaagaggcagccaaaggatggaaggaagctgccaacggggatggggtgattagtgcccacaggaatctttgtctcctgggaagctccgacagccacgcctctgtgtcaggcgccggcataacagatgcaaggcaccatgcgtggctgattgtcttgctgtttcttgttgaaatggggttttaccacgtgtcccactcttag

SEQ ID NO: 95021 - DNA, 1998 bp, Artificial Sequence
  derived and/or modified sequence
atggctgccaccgaaatttccgttctcagtgaacaattcacgaagattaaggaactggaactgatgccagagaagggactcaaagaggaggagaaggacggtgtatgtagagagaaagaccatcgttcaccctcggaactagaggctgaacgcacctccggcgcatttcaggattcggttctggaggaggaggtcgagctcgtgctagctcccagtgaggagagcgagaaatacatcctgactctgcagacagtccatttcacatctgaggcagtggagctgcaggacatgtcccttctaagcattcagcagcaggagggcgtacaggtcgttgtgcagcagccaggcccagggctgttgtggctggaagagggccctcggcagagcctgcagcaatgcgtcgctatcagcatacagcaggagctgtacagcccccaggagatggaagtcctccagttccacgccctggaggagaatgtcatggtggcttcagaggacagcaagctcgccgtgtccttggccgaaactaccggcctgattaaattagaggaggaacaggaaaagaaccaactgttagcggagcggacaaaagaacagctgttcttcgtcgagaccatgtcaggagatgagcgatctgatgagatcgtcctgaccgtcagcaatagcaacgtggaggagcaggaagaccagcccacggctgggcaagctgacgccgagaaggccaagagcacaaaaaaccagcggaaaaccaaaggggcaaaggggacttttcattgcgacgtgtgtatgttcaccagcagccgcatgtcgtcattcaatcgccacatgaaaacgcatactagtgaaaaaccacatttgtgtcatctgtgcctcaaaacttttaggaccgttactcttctccgcaatcacgtgaatactcacacgggtacaaggccatacaaatgcaatgactgcaacatggccttcgtgacatcaggtgagctcgtgagacatcggagatataagcacacacacgaaaagccatttaaatgctccatgtgtaagtacgcatcagtagaggcctccaaactcaaacgacatgtcagatcccataccggggagcgcccatttcagtgctgtcagtgcagttatgctagtcgagatacatacaaactgaagaggcatatgagaacacatagcggagaaaagccatatgaatgtcacatctgccacactcgcttcacccagtcagggaccatgaaaattcatatccttcaaaagcacggtgagaacgttccaaagtatcagtgtccgcattgcgctaccattatcgcaagaaaatcagatctgagggtgcatatgcgcaacttgcacgcatactcagcagctgaattgaagtgtaggtattgttctgccgtgttccatgagagatacgcccttattcagcaccagaaaacacataaaaacgaaaagagatttaaatgtaaacactgttcttatgcctgcaagcaggaacgccatatgactgcccacataagaactcacaccggcgagaaacctttcacatgtctgtcatgtaacaaatgcttcagacagaagcagctgctgaatgcccacttccgaaaataccatgatgctaacttcatacccactgtttacaaatgctccaaatgtggtaagggcttctctcgatggattaacctccacaggcatagcgaaaaatgcggatctggagaagcgaagagtgcagcttccgggaagggcagacggacaagaaaaaggaagcaaaccattctcaaagaagccacgaaggggcagaaggaggcagctaagggctggaaggaagccgcaaatggagacggagtgatctcagcccatcgcaacctgtgtctattgggctcatcagactcccatgcctcagtgagtggcgcaggaattacagatgcaagacaccacgcgtggttaattgtgctcctgttcctggtggaaatgggtttttaccacgtttcccattcatag

SEQ ID NO: 95022 - DNA, 3359 bp, Artificial Sequence
  derived and/or modified sequence
agggtaaagcaggggccctgccaggcctccgagggagtgtgcttggtctggccgagggctgcttggccaagtctgggtgggctcgaggccactaggcccaaagcctgcctggctctgagggtgctaggtctagaaccgtgcacgaggggaatgcctgctcgggcccgaacctcgctgggcgccgggtgtgcactggcccggggcctgcttggacctgaaacttgctaggcccaggatatgcactggccgagagcctgctgggcccaaaccttactaggcccaggatgttcactgactgaaccggctcaggcctaaccttgctaggcccaggatatgcactgggccagagtgtgctcaggcggaaccttgccaggcgcaggatgtgtgctggccctaagcctgctgaggcccaaacctgttcgttctagggttttgtacaaaatcctgctttagcctaaatcctgcttagccttgaccccctcctagacccaagccagatcagcattgttctgaccctactaagtccaaaaccttttgaggccagaccttgtttcaactccaaagcctgctaggttccagcaccccccgcatccctcctcataccacccccttctcccccctatggaaaccgcttgcttatttttcaaacaggccaagtcattatggcagccactgagatctctgtcctttctgagcaattcaccaagatcaaagaactcgagttgatgccggaaaaaggcctgaaggaggaggaaaaagacggagtgtgcagagagaaagaccatcggagccctagtgagttggaggccgagcgtacctctggggccttccaggacagcgtcctggaggaagaagtggagctggtgctggccccctcggaggagagcgagaagtacatcctgaccctgcagacggtgcacttcacttctgaagctgtggagttgcaggatatgagcttgctgagcatacagcagcaagaaggggtgcaggtggtggtgcaacagcctggccctgggttgctgtggcttgaggaagggccccggcagagcctgcagcagtgtgtggccattagtatccagcaagagctgtactccccgcaagagatggaggtgttgcagttccacgctctagaggagaatgtgatggtggccagtgaagacagtaagttagcggtgagcctggctgaaactactggactgatcaagctcgaggaagagcaggagaagaaccagttattggctgaaagaacaaaggagcagctcttttttgtggaaacaatgtcaggagatgaaagaagtgacgaaattgttctcacagtttcaaattcaaatgtggaagaacaagaggatcaacctacagctggtcaagcagatgctgaaaaggccaaatctacaaaaaatcaaagaaagacaaagggagcaaaaggaaccttccactgtgatgtctgcatgttcacctcttctagaatgtcaagttttaatcgtcatatgaaaactcacaccagtgagaagcctcacctgtgtcacctctgcctgaaaaccttccgtacggtcactctgctgcggaaccatgttaacacccacacaggaaccaggccctacaagtgtaacgactgcaacatggcatttgtcaccagtggagaactcgtccgacacaggcgctataaacatactcatgagaaaccctttaaatgttccatgtgcaagtatgccagtgtggaggcaagtaaattgaagcgccatgtccgatcccacactggggagcgcccctttcagtgttgccagtgcagctatgccagcagagatacctacaagctgaaacgccacatgagaacgcactcaggtgagaagccttacgaatgccacatctgccacacccgcttcacccagagcgggaccatgaaaatacatattctgcagaaacacggcgaaaatgtccccaaataccagtgtccccattgtgccaccatcattgcacggaaaagcgacctacgtgtgcatatgcgcaacttgcatgcttacagcgctgcagagctgaaatgccgctactgttctgctgtcttccatgaacgctatgccctcattcagcaccagaaaactcataagaatgagaagaggttcaagtgcaaacactgcagttatgcctgcaagcaggaacgtcatatgaccgctcacattcgtacccacactggagagaaaccattcacctgcctttcttgcaataaatgtttccgacagaagcaacttctaaacgctcacttcaggaaataccacgatgcaaatttcatcccgactgtttacaaatgctccaagtgtggcaaaggcttttcccgctggattaacctgcacagacattcggagaagtgtggatcaggggaagcaaagtcggctgcttcaggaaagggaagaagaacaagaaagaggaagcagaccatcctgaaggaagccacaaagggtcagaaggaagctgcgaagggatggaaggaagccgcgaacggagacggtgtgatctcagctcaccgcaacctctgcctcctgggttcaagtgattctcatgcctcagtctccggagctgggattacagatgcccgccaccacgcctggctaattgttctattatttttagtagagatggggttttaccatgtctctcactcctgacctcaagtgatctgcccgcctcggcctcccaaagtggtgggattacaggcatgagcccctgtgcctggcctgatggcaccagttttgtggatctcagtgtttcttttcatatccaagaactgggtcttcttgtctccctccatccaccaaaaaaaaaaaaaaaaaaatacttcaaggaagcatggacaaaaatatcctcagacaagttagaacatgagacagtcacgttcttcagtgtggcgctctgtggatgtttgggaaagtaatttggaaaatgagtagagcagggctccccaaccccccagccgtggacctgtgggctgttaggaactgggcctcccagcaggaggtgagcagtgggtgagggagtgaagctttgtattgacagccgctccccatcgggcgcatcaccgcctgagctccgcctcctgtcagatcagcggcagcgttagattctcatgagtgtgaaccctgttgtgaactctgcacgtgcaagggatctaggctgcacactccttacgagaatctaatgcccgacgatctgtcactgtctcccatcacccccagatgggactgtctagatgcaggaaaacaagcccagggctcccactgattctacattatggtgagctgtataattatttcattatatatcacaatgtaataataaaaataaagtacataagaaatgtaatgtgc

SEQ ID NO: 95023 - DNA, 1998 bp, Artificial Sequence
  derived and/or modified sequence
atggccgccaccgagatcagcgtgctgagcgagcagttcaccaagatcaaggagctggagctgatgcccgagaagggcctgaaggaggaggagaaggacggcgtgtgcagagagaaggaccacagaagccccagcgagctggaggccgagagaaccagcggcgccttccaggacagcgtgctggaggaggaggtggagctggtgctggcccccagcgaggagagcgagaagtacatcctgaccctgcagaccgtgcacttcaccagcgaggccgtggagctgcaggacatgagcctgctgagcatccagcagcaggagggcgtgcaggtggtggtgcagcagcccggccccggcctgctgtggctggaggagggccccagacagagcctgcagcagtgcgtggccatcagcatccagcaggagctgtacagcccccaggagatggaggtgctgcagttccacgccctggaggagaacgtgatggtggccagcgaggacagcaagctggccgtgagcctggccgagaccaccggcctgatcaagctggaggaggagcaggagaagaaccagctgctggccgagagaaccaaggagcagctgttcttcgtggagaccatgagcggcgacgagagaagcgacgagatcgtgctgaccgtgagcaacagcaacgtggaggagcaggaggaccagcccaccgccggccaggccgacgccgagaaggccaagagcaccaagaaccagagaaagaccaagggcgccaagggcaccttccactgcgacgtgtgcatgttcaccagcagcagaatgagcagcttcaacagacacatgaagacccacaccagcgagaagccccacctgtgccacctgtgcctgaagaccttcagaaccgtgaccctgctgagaaaccacgtgaacacccacaccggcaccagaccctacaagtgcaacgactgcaacatggccttcgtgaccagcggcgagctggtgagacacagaagatacaagcacacccacgagaagcccttcaagtgcagcatgtgcaagtacgccagcgtggaggccagcaagctgaagagacacgtgagaagccacaccggcgagagacccttccagtgctgccagtgcagctacgccagcagagacacctacaagctgaagagacacatgagaacccacagcggcgagaagccctacgagtgccacatctgccacaccagattcacccagagcggcaccatgaagatccacatcctgcagaagcacggcgagaacgtgcccaagtaccagtgcccccactgcgccaccatcatcgccagaaagagcgacctgagagtgcacatgagaaacctgcacgcctacagcgccgccgagctgaagtgcagatactgcagcgccgtgttccacgagagatacgccctgatccagcaccagaagacccacaagaacgagaagagattcaagtgcaagcactgcagctacgcctgcaagcaggagagacacatgaccgcccacatcagaacccacaccggcgagaagcccttcacctgcctgagctgcaacaagtgcttcagacagaagcagctgctgaacgcccacttcagaaagtaccacgacgccaacttcatccccaccgtgtacaagtgcagcaagtgcggcaagggcttcagcagatggatcaacctgcacagacacagcgagaagtgcggcagcggcgaggccaagagcgccgccagcggcaagggcagaagaaccagaaagagaaagcagaccatcctgaaggaggccaccaagggccagaaggaggccgccaagggctggaaggaggccgccaacggcgacggcgtgatcagcgcccacagaaacctgtgcctgctgggcagcagcgacagccacgccagcgtgagcggcgccggcatcaccgacgccagacaccacgcctggctgatcgtgctgctgttcctggtggagatgggcttctaccacgtgagccacagctag

SEQ ID NO: 95024 - protein, 422 aa, Artificial Sequence
  derived and/or modified sequence
MSGDERSDEIVLTVSNSNVEEQEDQPTAGQADAEKAKSTKNQRKTKGAKGTFHCDVCMFTSSRMSSFNRHMKTHTSEKPHLCHLCLKTFRTVTLLRNHVNTHTGTRPYKCNDCNMAFVTSGELVRHRRYKHTHEKPFKCSMCKYASVEASKLKRHVRSHTGERPFQCCQCSYASRDTYKLKRHMRTHSGEKPYECHICHTRFTQSGTMKIHILQKHGENVPKYQCPHCATIIARKSDLRVHMRNLHAYSAAELKCRYCSAVFHERYALIQHQKTHKNEKRFKCKHCSYACKQERHMTAHIRTHTGEKPFTCLSCNKCFRQKQLLNAHFRKYHDANFIPTVYKCSKCGKGFSRWILWVGNSEVAELGGPGSGPLLRLQSGCPPGLHHPKAGLGPEDPLPGQLRHTTAGTGLSSLLQGPLCRAA

SEQ ID NO: 95025 - DNA, 2966 bp, Artificial Sequence
  derived and/or modified sequence
attccacccctccccccagtatctcagtgcctcctgtgggccctcctcccctccttatccattccccctcagatctcccaggccccctgcaggccctcgtgccctccttacttcccccccgggtctcccagcgccccctgcggggccctcctcccttcctcatccacttcaaccccaaggccaagtcattatggcagccactgagatctctgtcctttctgagcaattcaccaagatcaaagaactcgagttgatgccggaaaaaggcctgaaggaggaggaaaaagacggagtgtgcagagagaaagaccatcggagccctagtgagttggaggccgagcgtacctctggggccttccaggacagcgtcctggaggaagaagtggagctggtgctggccccctcggaggagagcgagaagtacatcctgaccctgcagacggtgcacttcacttctgaagctgtggagttgcaggatatgagcttgctgagcatacagcagcaagaaggggtgcaggtggtggtgcaacagcctggccctgggttgctgtggcttgaggaagggccccggcagagcctgcagcagtgtgtggccattagtatccagcaagagctgtactccccgcaagagatggaggtgttgcagttccacgctctagaggagaatgtgatggtggccagtgaagacagtaagttagcggtgagcctggctgaaactactggactgatcaagctcgaggaagagcaggagaagaaccagttattggctgaaagaacaaaggagcagctcttttttgtggaaacaatgtcaggagatgaaagaagtgacgaaattgttctcacagtttcaaattcaaatgtggaagaacaagaggatcaacctacagctggtcaagcagatgctgaaaaggccaaatctacaaaaaatcaaagaaagacaaagggagcaaaaggaaccttccactgtgatgtctgcatgttcacctcttctagaatgtcaagttttaatcgtcatatgaaaactcacaccagtgagaagcctcacctgtgtcacctctgcctgaaaaccttccgtacggtcactctgctgcggaaccatgttaacacccacacaggaaccaggccctacaagtgtaacgactgcaacatggcatttgtcaccagtggagaactcgtccgacacaggcgctataaacatactcatgagaaaccctttaaatgttccatgtgcaagtatgccagtgtggaggcaagtaaattgaagcgccatgtccgatcccacactggggagcgcccctttcagtgttgccagtgcagctatgccagcagagatacctacaagctgaaacgccacatgagaacgcactcaggtgagaagccttacgaatgccacatctgccacacccgcttcacccagagcgggaccatgaaaatacatattctgcagaaacacggcgaaaatgtccccaaataccagtgtccccattgtgccaccatcattgcacggaaaagcgacctacgtgtgcatatgcgcaacttgcatgcttacagcgctgcagagctgaaatgccgctactgttctgctgtcttccatgaacgctatgccctcattcagcaccagaaaactcataagaatgagaagaggttcaagtgcaaacactgcagttatgcctgcaagcaggaacgtcatatgaccgctcacattcgtacccacactggagagaaaccattcacctgcctttcttgcaataaatgtttccgacagaagcaacttctaaacgctcacttcaggaaataccacgatgcaaatttcatcccgactgtttacaaatgctccaagtgtggcaaaggcttttcccgctggattacctcaaaatggagtggcttaaaaccacaaacatttatcacctgacagattctctgggttgggaactcggaagtggctgaactgggtggtcctggctcagggccactcctgaggctgcagtcaggatgtccgccagggctgcatcatccgaaggctggactggggccagaggatccacttccaggacagctccgccacacaactgctggcaccggcctcagttccttgctacagggacctctctgcagggctgcttgagtgtcctcctgactcagagcaagtgagagagtgcaagtaggaagccatggtgccttttgcagtctagtcctaaaagcggcacaacagccagctgtgggggctcacacctgtaatcccagtacttcgggaggccaaggcaggtggataacttgaggccaggagctcaagaccagcctggccaacatggtgaaaccctgtctctactttaaaaaaaaaaaaagaaaatagctaggcgtggtagtgcacgcttgtaatcccagctacttgggtggttgggacgggaggatcacttgaacccaggagacagaggttgcagtgagctgagattgtgccactggcctccagcctgggcgacagagcaagactctgtctcaaaaaaaaaaaaaaagtggcacattctagtcacaagaaatgaaccatgaagtcccacccacactcgagtggggaatgaagtttcttttgaaaggaacagcatcaaagaatttcaggacatttaaaaaccactgcacatggctagctagatccttggaccatgtaggcttcagcctaactttataaaagttttataaaagttgaatttcctgaagttgactatttttttaaaaatatttcttcttaaaacagtagtgtagttgtgtttttctgagtagcacagtgggatagttctggaatgtcaaccctattagtttaaaatttcaaataaaagctgtggcagtgctcccaaaacaccattgctcatgcaaaaattgtgaagagttaaaattaacgagtagaattctaaagagaaaaaaactgctctttggtgcaagaaataaaaatgtagagaaaagaacaagtctgc

SEQ ID NO: 95026 - DNA, 2262 bp, Artificial Sequence
  derived and/or modified sequence
ggctgcagcacgcggtgcacgaggcagagcccacaagccaaagacggagtgggccgagcattccggccacgccttccgcgctcgaggaagagcaggagaagaaccagttattggctgaaagaacaaaggagcagctcttttttgtggaaacaatgtcaggagatgaaagaagtgacgaaattgttctcacagtttcaaattcaaatgtggaagaacaagaggatcaacctacagctggtcaagcagatgctgaaaaggccaaatctacaaaaaatcaaagaaagacaaagggagcaaaaggaaccttccactgtgatgtctgcatgttcacctcttctagaatgtcaagttttaatcgtcatatgaaaactcacaccagtgagaagcctcacctgtgtcacctctgcctgaaaaccttccgtacggtcactctgctgcggaaccatgttaacacccacacaggaaccaggccctacaagtgtaacgactgcaacatggcatttgtcaccagtggagaactcgtccgacacaggcgctataaacatactcatgagaaaccctttaaatgttccatgtgcaagtatgccagtgtggaggcaagtaaattgaagcgccatgtccgatcccacactggggagcgcccctttcagtgttgccagtgcagctatgccagcagagatacctacaagctgaaacgccacatgagaacgcactcaggtgagaagccttacgaatgccacatctgccacacccgcttcacccagagcgggaccatgaaaatacatattctgcagaaacacggcgaaaatgtccccaaataccagtgtccccattgtgccaccatcattgcacggaaaagcgacctacgtgtgcatatgcgcaacttgcatgcttacagcgctgcagagctgaaatgccgctactgttctgctgtcttccatgaacgctatgccctcattcagcaccagaaaactcataagaatgagaagaggttcaagtgcaaacactgcagttatgcctgcaagcaggaacgtcatatgaccgctcacattcgtacccacactggagagaaaccattcacctgcctttcttgcaataaatgtttccgacagaagcaacttctaaacgctcacttcaggaaataccacgatgcaaatttcatcccgactgtttacaaatgctccaagtgtggcaaaggcttttcccgctggattctctgggttgggaactcggaagtggctgaactgggtggtcctggctcagggccactcctgaggctgcagtcaggatgtccgccagggctgcatcatccgaaggctggactggggccagaggatccacttccaggacagctccgccacacaactgctggcaccggcctcagttccttgctacagggacctctctgcagggctgcttgagtgtcctcctgactcagagcaagtgagagagtgcaagtaggaagccatggtgccttttgcagtctagtcctaaaagcggcacaacagccagctgtgggggctcacacctgtaatcccagtacttcgggaggccaaggcaggtggataacttgaggccaggagctcaagaccagcctggccaacatggtgaaaccctgtctctactttaaaaaaaaaaaaagaaaatagctaggcgtggtagtgcacgcttgtaatcccagctacttgggtggttgggacgggaggatcacttgaacccaggagacagaggttgcagtgagctgagattgtgccactggcctccagcctgggcgacagagcaagactctgtctcaaaaaaaaaaaaaaagtggcacattctagtcacaagaaatgaaccatgaagtcccacccacactcgagtggggaatgaagtttcttttgaaaggaacagcatcaaagaatttcaggacatttaaaaaccactgcacatggctagctagatccttggaccatgtaggcttcagcctaactttataaaagttttataaaagttgaatttcctgaagttgactatttttttaaaaatatttcttcttaaaacagtagtgtagttgtgtttttctgagtagcacagtgggatagttctggaatgtcaaccctattagtttaaaatttcaaataaaagctgtggcagtgctcccaaaacaccattgctcatgcaaaaattgtgaagagttaaaattaacgagtagaattctaaagagaaaaaaactgctctttggtgcaagaaataaaaatgtagagaaaagaacaagtctgc

SEQ ID NO: 95027 - protein, 427 aa, Artificial Sequence
  derived and/or modified sequence
MAATEISVLSEQFTKIKELELMPEKGLKEEEKDGVCREKDHRSPSELEAERTSGAFQDSVLEEEVELVLAPSEESEKYILTLQTVHFTSEAVELQDMSLLSIQQQEGVQVVVQQPGPGLLWLEEGPRQSLQQCVAISIQQELYSPQEMEVLQFHALEENVMVASEDSKLAVSLAETTGLIKLEEEQEKNQLLAERTKEQLFFVETMSGDERSDEIVLTVSNSNVEEQEDQPTAGQADAEKAKSTKNQRKTKGAKGTFHCDVCMFTSSRMSSFNRHMKTHTSEKPHLCHLCLKTFRTVTLLRNHVNTHTGTRPYKCNDCNMAFVTSGELVRHRRYKHTHEKPFKCSMCKYASVEASKLKRHVRSHTGERPFQCCQCSYASRDTYKLKRHMRTHSEATSKRSLQEIPRCKFHPDCLQMLQVWQRLFPLD

SEQ ID NO: 95028 - protein, 613 aa, Artificial Sequence
  derived and/or modified sequence
MAATEISVLSEQFTKIKELELMPEKGLKEEEKDGVCREKDHRSPSELEAERTSGAFQDSVLEEEVELVLAPSEESEKYILTLQTVHFTSEAVELQDMSLLSIQQQEGVQVVVQQPGPGLLWLEEGPRQSLQQCVAISIQQELYSPQEMEVLQFHALEENVMVASEDSKLAVSLAETTGLIKLEEEQEKNQLLAERTKEQLFFVETMSGDERSDEIVLTVSNSNVEEQEDQPTAGQADAEKAKSTKNQRKTKGAKGTFHCDVCMFTSSRMSSFNRHMKTHTSEKPHLCHLCLKTFRTVTLLRNHVNTHTGTRPYKCNDCNMAFVTSGELVRHRRYKHTHEKPFKCSMCKYASVEASKLKRHVRSHTGERPFQCCQCSYASRDTYKLKRHMRTHSGVHMRNLHAYSAAELKCRYCSAVFHERYALIQHQKTHKNEKRFKCKHCSYACKQERHMTAHIRTHTGEKPFTCLSCNKCFRQKQLLNAHFRKYHDANFIPTVYKCSKCGKGFSRWINLHRHSEKCGSGEAKSAASGKGRRTRKRKQTILKEATKGQKEAAKGWKEAANGDEAAAEEASTTKGEQFPGEMFPVACRETTARVKEEVDEGVTCEMLLNTMDK

SEQ ID NO: 95029 - DNA, 1842 bp, Artificial Sequence
  derived and/or modified sequence
atggctgccacagagatctcagtgttgtctgaacagtttaccaaaattaaagagctggagcttatgccagagaaaggtctgaaggaggaggaaaaagacggggtgtgtcgagaaaaggaccacaggtccccttccgagttggaggccgaacggactagcggcgccttccaagactcagtgcttgaggaagaggtggaactcgtgctggcacctagcgaagagtcggagaagtatatccttaccctccaaacagtgcattttacatccgaggctgtggaacttcaagacatgtctctcctcagcattcaacagcaggaaggcgtacaggtggttgtgcagcagcctgggccggggctcctgtggctggaggaggggcctagacagagcctgcagcagtgtgttgcaatatctatccagcaggagttatatagcccacaggagatggaggtactgcagtttcacgccctggaggaaaatgtgatggtggcatccgaggactctaaactggccgtaagtctcgctgagaccactggcctgatcaaattggaggaggaacaggaaaaaaaccagctcctggcagagaggactaaggaacaacttttttttgtagaaacaatgtccggcgatgagcgcagcgatgaaatcgtgcttacagttagcaattcaaatgtcgaagagcaggaggaccaacctaccgctggccaggctgacgccgagaaggcgaagtccaccaagaatcagagaaagactaagggcgccaagggcaccttccactgcgatgtgtgcatgttcacatcaagcaggatgagtagctttaatcggcatatgaagacacatacctctgaaaagcctcacctctgtcacctgtgtctaaagacgttcagaaccgtgacactgttacgcaaccacgttaatacacataccggtaccagaccctataagtgtaatgactgtaatatggccttcgttacgtctggagagctcgtacggcacaggagatataaacatactcacgagaagcccttcaaatgcagcatgtgcaagtatgcttctgtggaagcaagcaagctgaagaggcacgttcgctcccacacaggggaacgtccttttcagtgttgtcagtgcagttacgcctcccgcgacacttacaagctaaaacggcacatgcggacacacagtggagtccatatgaggaatctgcacgcctacagtgcagctgagttgaagtgcagatattgctccgccgtttttcacgaacggtatgcccttatccagcatcagaagacccacaaaaatgagaagcggttcaaatgtaagcactgcagctacgcctgcaaacaggagcggcacatgacagcccacatccgcacgcataccggcgagaaaccatttacctgtctcagctgtaacaaatgctttaggcaaaaacagcttttaaacgctcactttcgcaagtatcacgatgccaacttcatccccacagtgtacaagtgttcaaaatgcgggaaagggtttagccgatggataaacctgcacaggcatagcgaaaaatgtggatctggagaagcaaaaagtgcagccagcggtaaagggcgcagaacacggaaaagaaaacagacaattctcaaggaagccacaaaggggcagaaagaggccgccaagggatggaaagaggccgccaatggcgacgaggctgccgcggaagaggccagcacaacaaaaggcgagcagtttcccggagaaatgtttcccgtcgcgtgtcgcgagacgacggccagggttaaggaagaagtagatgagggcgttacctgtgagatgctgctgaacacaatggataaatag

SEQ ID NO: 95030 - DNA, 1842 bp, Artificial Sequence
  derived and/or modified sequence
atggccgccacagagatctctgtgctgtctgagcagttcaccaagatcaaggagctggagctgatgcctgagaagggcctgaaggaggaggagaaggatggagtgtgccgggagaaggaccacaggagccccagcgagctggaggccgagaggaccagcggggccttccaggacagcgtgctggaggaggaggtggagctggtgctggcccccagcgaggagagcgagaagtacatcctgaccctgcagacagtgcacttcaccagcgaggccgtggagctgcaggacatgagcctgctgagcatccagcagcaggagggcgtgcaggtggtggtgcagcagcccggccctggcctgctgtggctggaggagggcccccggcagagcctgcagcagtgtgtggccatcagcatccagcaggagctgtacagcccccaggagatggaggtgctgcagttccacgccctggaggagaatgtgatggtggccagcgaggacagcaagctggccgtgtccctggccgagaccaccggcctcatcaagctggaggaggagcaggagaagaaccagctgctggccgagaggaccaaggagcagctgttctttgtggagaccatgtctggagatgagaggagtgatgaaattgtgctgactgtgagcaacagcaatgtggaggagcaggaggaccagcccacagctggccaggctgatgctgagaaggccaagagcaccaagaaccagaggaagaccaagggggccaagggcaccttccactgtgatgtgtgcatgttcaccagcagcaggatgagcagcttcaacagacacatgaagacccacaccagcgagaagccccacctgtgccacctgtgcctgaagaccttcagaacagtgaccctgctgagaaatcatgtgaacacccacacaggcacccggccctacaagtgcaatgactgcaacatggcctttgtgaccagcggggagctggtgcgccaccggcgctacaagcacacccatgagaagcccttcaagtgcagcatgtgcaagtatgcctctgtggaggccagcaagctgaagagacatgtgcgcagccacactggagagcggcccttccagtgctgccagtgcagctatgccagccgggacacctacaagctgaagaggcacatgaggacccacagcggcgtgcacatgaggaacctgcacgcctacagcgctgctgagctgaagtgccgctactgcagcgctgtgttccacgagagatatgccctgatccagcaccagaagacccacaagaatgagaagcgcttcaagtgcaagcactgcagctatgcctgcaagcaggagcggcacatgacagcccacatccgcacccacactggagagaagcccttcacctgcctgagctgcaacaagtgcttccggcagaagcagctgctgaatgcccacttcaggaagtaccatgatgccaacttcatccccaccgtgtacaagtgcagcaaatgtgggaagggcttcagccgctggatcaacctgcaccgccacagcgagaagtgtggcagcggggaggccaagtctgctgccagcggcaagggccgccgcaccaggaagaggaagcagaccatcctgaaggaggccaccaagggccagaaggaggccgccaagggctggaaggaggccgccaatggagatgaagctgctgctgaggaggccagcaccaccaagggggagcagtttcctggagagatgtttcctgtggcctgccgggagaccacagcccgggtgaaggaggaggtggatgaaggagtgacctgtgagatgctgctgaacaccatggacaagtag

SEQ ID NO: 95031 - DNA, 1842 bp, Artificial Sequence
  derived and/or modified sequence
atggccgccaccgagatcagcgtgctgagcgagcagttcaccaagatcaaggaattagaacttatgccagaaaaaggcctaaaggaggaggagaaagatggcgtctgtcgggaaaaagaccaccgcagtccgtccgagctggaggccgaacgcacttccggtgccttccaggacagtgtgctagaggaggaagtcgaacttgtgctggctccaagcgaggaatcggagaagtatatactcaccctgcaaacagtgcactttaccagcgaggccgtcgaacttcaggacatgtccctactgtccattcagcaacaggagggagtccaagtagtcgttcagcagccagggcctggtctgctttggctggaagaaggccctcggcagagcctgcagcaatgcgttgctatttccattcagcaggaattgtactctccgcaagaaatggaggtgctgcaattccatgccttggaagaaaatgtaatggtcgcatccgaggacagcaaactggctgtgtctctcgccgaaactacaggcctgattaagctggaagaagagcaggaaaagaatcagttattggcagagcggaccaaagaacaattgttcttcgtagagaccatgtcaggcgatgagagaagcgatgaaatcgttctgaccgtctcaaactccaatgtagaagagcaggaagaccaacccactgccggccaggcagatgctgagaaggcgaaatctaccaaaaatcagcggaaaacaaaaggcgccaagggaaccttccactgtgatgtgtgtatgtttacgtcaagccggatgtctagcttcaataggcatatgaagacccacactagcgagaagcctcacctgtgccacctttgcctgaaaactttcagaaccgtgaccctgctcaggaatcacgtaaacacgcacacaggcaccaggccttacaagtgcaacgactgtaacatggcgtttgtaacatctggcgagttagttcggcaccggcgctacaaacatacccatgagaagccatttaaatgctccatgtgtaagtatgctagcgtcgaagcaagtaagctcaagagacacgtgagaagccacacaggcgaaagaccattccaatgttgtcagtgttcttacgctagtcgggacacatataagctgaagagacacatgaggactcactcaggagtacacatgagaaacctgcacgcctactccgctgcagagcttaaatgccgttattgtagcgctgttttccacgagcgctacgccttaattcaacatcagaagacccacaagaacgagaagcggttcaaatgcaagcactgctcctacgcatgcaagcaggagaggcatatgacagctcatatccgaacgcacaccggagaaaagccgttcacttgcctctcctgcaataagtgtttccggcagaaacagttgttgaacgctcatttccggaagtatcacgacgcgaacttcattccaaccgtctacaagtgctcgaaatgtggcaaagggttttctcggtggatcaacctgcatcgtcatagcgaaaagtgcggctccggagaggccaagtcagcagccagtggcaaaggccgacggacaaggaaaagaaaacaaactatcctgaaggaggctactaaaggccagaaagaagccgccaaaggctggaaggaggccgccaatggcgacgaagccgccgcagaagaggcctccaccacaaagggggaacagtttccaggcgagatgtttcccgttgcttgtagggaaacaaccgcacgggtgaaggaagaagtggatgagggggtgacctgtgagatgcttctcaataccatggataaatag

SEQ ID NO: 95032 - DNA, 1842 bp, Artificial Sequence
  derived and/or modified sequence
atggcggctactgaaatcagcgtgctttcagagcaatttactaaaatcaaagaactcgaattaatgcctgagaaggggcttaaggaagaggagaaggacggagtttgtagggagaaagaccaccggagtccaagcgagctggaggccgaacgcacctctggagctttccaggacagcgttctggaggaggaggtggagctcgtcctcgcaccatcagaggagtcggagaaatatatcttgaccctgcaaacagtccattttacaagcgaagccgtcgagctgcaagatatgtcgctgctctccattcagcaacaggaaggtgttcaggtcgtggtgcagcaacccggacccggtttgctctggctcgaggagggcccacgtcagagcttgcagcagtgcgtggctatttctatacagcaggaactgtacagtccacaggagatggaagtcttacagtttcacgccctggaagaaaacgtgatggttgcgagtgaggattcaaaactggccgtgtctctggcggaaaccaccggattaataaagttagaagaagagcaggagaagaaccaattactggctgaacgcaccaaggaacaactcttctttgtggagaccatgtcaggagatgagcgctccgacgaaattgtcttgaccgtgtccaattctaatgtcgaggaacaggaggaccagccaactgctggacaggctgacgctgagaaggcgaagagtacgaagaaccagcgtaagacaaaaggagctaaaggcacgttccactgcgacgtttgtatgtttaccagtagtagaatgtctagtttcaacagacacatgaagactcacactagcgagaagccccatctctgccacctttgtctgaagactttcagaacggttaccctgctgcggaaccacgtaaatacacacactggcactcggccatacaagtgtaatgactgcaatatggctttcgtcacgtcaggcgagctggtgaggcaccgtagatataagcacacacacgaaaagccctttaagtgtagcatgtgtaagtacgccagtgtagaggcgtcaaagttaaaaagacatgtgcggagccacactggcgaacggccatttcaatgctgccagtgctcttacgcgagcagggatacctacaagctgaagcgccatatgagaacacattccggcgtccacatgcgcaacctccatgcgtacagcgccgctgagctgaaatgtcggtactgctccgccgtttttcacgagagatatgcattgattcaacatcagaaaacccacaagaatgaaaagagatttaagtgcaagcactgcagttatgcgtgcaaacaagagcgccacatgacggcccatatccgcacacataccggggagaagccctttacttgcctatcatgcaacaagtgctttaggcaaaaacagctcctaaacgcacactttagaaaataccatgacgctaatttcattcctaccgtctacaaatgctcaaaatgtggaaagggcttcagtcggtggatcaacctccatcggcacagtgaaaagtgtggatccggggaggctaagtccgctgccagtgggaaaggacggagaacacggaaaaggaaacagacaatactgaaggaagctactaagggccagaaggaagctgctaagggctggaaagaggccgcaaatggagacgaggcagccgcagaagaggcctctaccacgaaaggggagcaatttcccggagagatgttccctgtagcttgccgggaaaccaccgccagggtgaaagaggaagtcgatgagggggtgacttgcgaaatgctgctgaataccatggataagtag

SEQ ID NO: 95033 - DNA, 3785 bp, Artificial Sequence
  derived and/or modified sequence
tcccaggccccctgcaggccctcgtgccctccttacttcccccccgggtctcccagcgccccctgcggggccctcctcccttcctcatccacttcaaccccaaggtatttccgtgcccctgcaggaccctcctcccctccttaggcgctcccccactacccagtcttccagtgccctgcaggctctcctcctctccttatccacccccaccccaggtctcccagtgccctgtatgggaccctcctcccctcctcatccacccccccaggtccaccagtgccccctctggggtcctcctcatccgtgctccccctccccctccctactccccttcccccctgcccccacagtacatcaccccctcccccaaccctgcctggctccgcccccttcacgccccctcttttccgctccgcgcctgcgcactgccaccctccactctcgcgccagcccggcggcggccggctgtgggctgcagcacgcggtgcacgaggcagagcccacaagccaaagacggagtgggccgagcattccggccacgccttccgcggccaagtcattatggcagccactgagatctctgtcctttctgagcaattcaccaagatcaaagaactcgagttgatgccggaaaaaggcctgaaggaggaggaaaaagacggagtgtgcagagagaaagaccatcggagccctagtgagttggaggccgagcgtacctctggggccttccaggacagcgtcctggaggaagaagtggagctggtgctggccccctcggaggagagcgagaagtacatcctgaccctgcagacggtgcacttcacttctgaagctgtggagttgcaggatatgagcttgctgagcatacagcagcaagaaggggtgcaggtggtggtgcaacagcctggccctgggttgctgtggcttgaggaagggccccggcagagcctgcagcagtgtgtggccattagtatccagcaagagctgtactccccgcaagagatggaggtgttgcagttccacgctctagaggagaatgtgatggtggccagtgaagacagtaagttagcggtgagcctggctgaaactactggactgatcaagctcgaggaagagcaggagaagaaccagttattggctgaaagaacaaaggagcagctcttttttgtggaaacaatgtcaggagatgaaagaagtgacgaaattgttctcacagtttcaaattcaaatgtggaagaacaagaggatcaacctacagctggtcaagcagatgctgaaaaggccaaatctacaaaaaatcaaagaaagacaaagggagcaaaaggaaccttccactgtgatgtctgcatgttcacctcttctagaatgtcaagttttaatcgtcatatgaaaactcacaccagtgagaagcctcacctgtgtcacctctgcctgaaaaccttccgtacggtcactctgctgcggaaccatgttaacacccacacaggaaccaggccctacaagtgtaacgactgcaacatggcatttgtcaccagtggagaactcgtccgacacaggcgctataaacatactcatgagaaaccctttaaatgttccatgtgcaagtatgccagtgtggaggcaagtaaattgaagcgccatgtccgatcccacactggggagcgcccctttcagtgttgccagtgcagctatgccagcagagatacctacaagctgaaacgccacatgagaacgcactcaggtgtgcatatgcgcaacttgcatgcttacagcgctgcagagctgaaatgccgctactgttctgctgtcttccatgaacgctatgccctcattcagcaccagaaaactcataagaatgagaagaggttcaagtgcaaacactgcagttatgcctgcaagcaggaacgtcatatgaccgctcacattcgtacccacactggagagaaaccattcacctgcctttcttgcaataaatgtttccgacagaagcaacttctaaacgctcacttcaggaaataccacgatgcaaatttcatcccgactgtttacaaatgctccaagtgtggcaaaggcttttcccgctggattaacctgcacagacattcggagaagtgtggatcaggggaagcaaagtcggctgcttcaggaaagggaagaagaacaagaaagaggaagcagaccatcctgaaggaagccacaaagggtcagaaggaagctgcgaagggatggaaggaagccgcgaacggagacgaagctgctgctgaggaggcttccaccacgaagggagaacagttcccaggagagatgtttcctgtcgcctgcagagaaaccacagccagagtcaaagaggaagtggatgaaggcgtgacctgtgaaatgctcctcaacacgatggataagtgagagggattcgggttgcgtgttcactgcccccaattcctaaagcaagttagaagtttttagcatttaaggtgtgaaatgctcctcaacacgatggataagtgagagagagtcaggttgcatgttcactgcccctaattcctaaagcaagttagaaatttttagcattttctttgaaacaattaagttcatgacaatggatgacacaagtttgaggtagtgtctagaattgttctcctgtttgtagctggatatttcaaagaaacattgcaggtattttataaaagttttaaaccttgaatgagagggtaacacctcaaacctatggattcattcacttgatattggcaaggtggcccacaatgagtgagtagtgatttttggatatttcaaaatagtctagaccagctagtgcttccacagtcaaagctggacatttttatgttgcattatatacacccatgatatttctaataatatatggttttaaacattaaagacaaatgtttttatacaaatgaattttctacaaaatttaaagctaccataatgcttttaattagttctaaattcaaccaaaaaatgttttactcttataaaaaggaaaactgagtaggaaatgaaatactagattagactagaaaataaggaataaatcgattttactttggtataggagcaaggttcacctttagatttttgtattctcttttaattatgctccttggcaggtatgaaattgccctggttacattccattattgcttattagtatttcactccataacccttttttctgctaaaactactctttttatatttgtaaaataattggcagagtgagaagaaacataaaatcagataaggcaaatgtgtacctgtaaggaatttgtactttttcataatgcccagtgattagtgagtatttcccttttgccagttgacaagatttttccaccctcgagcagcgtgagagatgcctctttaacacttgaaattcatttctatctggatacagaggcagatttttcttcattgcttagttgagcagtttgttttgctgccaacctgtctccacccctgtatttcaagatcattgataagccctaaattcaaattcttaagatatggaccttttattgaaaatatcacaagttcagaatccctatacaatgtgaatatgtggaaataatttcccagcaggaagagcattatattctctttgtaccagcaaattaatttaactcaactcacatgagatttaaattctgtgggctgtagtatgccatcattgtgactgaatttgtgcaatggtttcttaatttttttactgttatttaaagatgttttacataattcaataaaatgaaatgacttaaaattgc

SEQ ID NO: 95034 - DNA, 1842 bp, Artificial Sequence
  derived and/or modified sequence
atggccgccaccgagatcagcgtgctgagcgagcagttcaccaagatcaaggagctggagctgatgcccgagaagggcctgaaggaggaggagaaggacggcgtgtgcagagagaaggaccacagaagccccagcgagctggaggccgagagaaccagcggcgccttccaggacagcgtgctggaggaggaggtggagctggtgctggcccccagcgaggagagcgagaagtacatcctgaccctgcagaccgtgcacttcaccagcgaggccgtggagctgcaggacatgagcctgctgagcatccagcagcaggagggcgtgcaggtggtggtgcagcagcccggccccggcctgctgtggctggaggagggccccagacagagcctgcagcagtgcgtggccatcagcatccagcaggagctgtacagcccccaggagatggaggtgctgcagttccacgccctggaggagaacgtgatggtggccagcgaggacagcaagctggccgtgagcctggccgagaccaccggcctgatcaagctggaggaggagcaggagaagaaccagctgctggccgagagaaccaaggagcagctgttcttcgtggagaccatgagcggcgacgagagaagcgacgagatcgtgctgaccgtgagcaacagcaacgtggaggagcaggaggaccagcccaccgccggccaggccgacgccgagaaggccaagagcaccaagaaccagagaaagaccaagggcgccaagggcaccttccactgcgacgtgtgcatgttcaccagcagcagaatgagcagcttcaacagacacatgaagacccacaccagcgagaagccccacctgtgccacctgtgcctgaagaccttcagaaccgtgaccctgctgagaaaccacgtgaacacccacaccggcaccagaccctacaagtgcaacgactgcaacatggccttcgtgaccagcggcgagctggtgagacacagaagatacaagcacacccacgagaagcccttcaagtgcagcatgtgcaagtacgccagcgtggaggccagcaagctgaagagacacgtgagaagccacaccggcgagagacccttccagtgctgccagtgcagctacgccagcagagacacctacaagctgaagagacacatgagaacccacagcggcgtgcacatgagaaacctgcacgcctacagcgccgccgagctgaagtgcagatactgcagcgccgtgttccacgagagatacgccctgatccagcaccagaagacccacaagaacgagaagagattcaagtgcaagcactgcagctacgcctgcaagcaggagagacacatgaccgcccacatcagaacccacaccggcgagaagcccttcacctgcctgagctgcaacaagtgcttcagacagaagcagctgctgaacgcccacttcagaaagtaccacgacgccaacttcatccccaccgtgtacaagtgcagcaagtgcggcaagggcttcagcagatggatcaacctgcacagacacagcgagaagtgcggcagcggcgaggccaagagcgccgccagcggcaagggcagaagaaccagaaagagaaagcagaccatcctgaaggaggccaccaagggccagaaggaggccgccaagggctggaaggaggccgccaacggcgacgaggccgccgccgaggaggccagcaccaccaagggcgagcagttccccggcgagatgttccccgtggcctgcagagagaccaccgccagagtgaaggaggaggtggacgagggcgtgacctgcgagatgctgctgaacaccatggacaagtag

SEQ ID NO: 95035 - protein, 573 aa, Artificial Sequence
  derived and/or modified sequence
MAATEISVLSEQFTKIKELELMPEKGLKEEEKDGVCREKDHRSPSELEAERTSGAFQDSVLEEEVELVLAPSEESEKYILTLQTVHFTSEAVELQDMSLLSIQQQEGVQVVVQQPGPGLLWLEEGPRQSLQQCVAISIQQELYSPQEMEVLQFHALEENVMVASEDSKLAVSLAETTGLIKLEEEQEKNQLLAERTKEQLFFVETMSGDERSDEIVLTVSNSNVEEQEDQPTAGQADAEKAKSTKNQRKTKGAKGTFHCDVCMFTSSRMSSFNRHMKTHTSEKPHLCHLCLKTFRTVTLLRNHVNTHTGTRPYKCNDCNMAFVTSGELVRHRRYKHTHEKPFKCSMCKYASVEASKLKRHVRSHTGERPFQCCQCSYASRDTYKLKRHMRTHSGEKPYECHICHTRFTQSGTMKIHILQKHGENVPKYQCPHCATIIARKSDLRVHMRNLHAYSAAELKCRYCSAVFHERYALIQHQKTHKNEKRFKCKHCSYACKQERHMTAHIRTHTGEKPFTCLSCNKCFRQKQLLNAHFRKYHDANFIPTVYKCSKCGKGFSRWITSKWSGLKPQTFIT

SEQ ID NO: 95036 - DNA, 1284 bp, Artificial Sequence
  derived and/or modified sequence
atggctgccaccgaaataagtgtgctcagcgaacagttcacaaagatcaaggagctggagctcatgcccgaaaagggcttgaaagaggaggagaaggacggagtgtgcagagaaaaggatcacagatctccatctgagctggaggccgagcgcacatctggagcattccaggacagcgtgctggaagaggaggtggagctggtgctggccccttcagaagagagcgagaagtacatcctgacactccaaaccgtccattttacttccgaggctgtggagttgcaggatatgtcacttctcagtatacagcagcaagagggggtacaggtcgtggtacagcaaccaggtcccggtttattgtggcttgaagagggaccccggcaaagtctgcagcagtgcgtggcaatctcaattcagcaggagttgtattctccacaagagatggaggtgttgcagtttcacgctctcgaagaaaatgtcatggtggctagcgaggacagcaagctagccgtatcactggcagagacaacaggactgattaagctggaggaggagcaggagaaaaaccagctgctcgcagagcgaactaaagagcagctattctttgtggagaccatgagcggcgacgaacggagcgacgaaattgtgctgacagtgtcaaattctaacgtggaagaacaggaagaccagccgacggccggccaggcggacgctgagaaggctaaatcaactaaaaaccaaaggaaaacaaagggagctaagggcaccttccattgcgacgtttgtatgttcaccagttcccgcatgtcctctttcaacaggcatatgaaaacacacaccagcgagaagccgcacctgtgtcacttatgtttaaaaaccttcagaactgtgacacttctacgaaatcacgttaacacacatacagggacccggccttacaagtgcaatgattgtaatatggcattcgtgacaagcggcgagctggttcggcacagacggtacaagcatactcacgagaagccttttaaatgcagcatgtgtaaatacgccagcgttgaagccagcaagctgaaacgccacgtccgaagtcatacaggtgaaagacctttccagtgctgtcagtgcagttatgccagccgggatacatataaactgaaacgccatatgcgcacccactcagaggctacttccaagcgtagcctgcaggaaattccccgctgcaagttccatcccgactgtctccagatgctccaagtgtggcagcgcctatttcctctggattag

SEQ ID NO: 95037 - DNA, 1722 bp, Artificial Sequence
  derived and/or modified sequence
atggcagctactgagatttctgttttatctgagcagtttacgaagatcaaggaactggaattgatgcctgagaaagggctaaaagaggaagaaaaagacggcgtgtgtagggagaaagaccatcgtagcccttccgagctcgaagcggagaggactagcggcgccttccaggattctgtgctggaggaggaggttgagctcgtactagctccatctgaagagtctgagaagtacatcctcactcttcagacagtccacttcacctcggaggccgtagagttgcaggatatgagcttgctgagcattcagcaacaggaaggggtgcaggtggtcgtgcagcagcctgggccaggcctgctctggttggaggaagggcccagacagtcactccagcagtgtgtcgccatcagtatccaacaagaactgtactcccctcaggagatggaagtcctgcaattccatgctctcgaggagaatgtgatggtcgcctccgaggactccaagctggccgtgtcattggccgaaacgaccggcctgatcaaactggaagaggagcaggagaaaaatcagctgctggccgagcggactaaggagcaactgttcttcgtcgagactatgtcgggcgatgagaggagcgatgaaatagtgctgacagtttccaacagcaatgttgaggagcaggaagatcagcctacagccggacaggccgatgccgagaaagctaaaagtactaaaaaccaacgaaagactaaaggagctaagggcaccttccactgtgatgtgtgtatgttcacctcatcaaggatgagcagcttcaacagacacatgaagacacacacttcggaaaaacctcacctgtgccacttgtgtctcaaaacatttaggacagttacactgcttcgaaaccatgtgaatactcacacaggtactcgtccgtataaatgtaacgattgtaatatggcatttgtgacatccggcgagctcgtccgacaccgccgctacaaacacacccacgagaagccttttaagtgtagtatgtgcaagtacgcttctgtcgaggctagcaaactgaagcgccatgtaagatctcacaccggggagcgacccttccagtgttgtcagtgctcttatgcttcccgcgacacatataagctgaaacggcatatgcggacccatagtggcgaaaagccctacgagtgtcatatctgccatacccggtttacacaatctgggacaatgaaaattcacatcttacagaagcatggcgagaacgtgcctaaataccagtgcccacactgcgcaactataatcgcccgcaagagtgatcttagagtgcacatgcgcaatctgcacgcctacagcgctgcagagctcaaatgccgctactgttccgctgtgttccacgagcgctacgccctgatccagcaccagaagacacacaagaatgaaaagcgctttaagtgtaaacactgcagctacgcatgcaagcaggaaaggcatatgacagcccatatcaggacacacacgggcgagaaaccattcacttgtctctcttgcaacaaatgctttcggcaaaaacaacttttgaatgcgcattttagaaaatatcacgacgcaaatttcattccaaccgtgtataagtgctcgaaatgcggaaagggattttcaaggtggatcacttctaaatggagcgggctgaagcctcagacttttatcacatag

SEQ ID NO: 95038 - DNA, 1356 bp, Artificial Sequence
  derived and/or modified sequence
atggcagccaccgaaatctccgtgctcagcgagcagttcaccaaaatcaaggagttggaactcatgcctgagaaagggttaaaagaagaggaaaaggatggtgtgtgtcgcgaaaaggatcataggtctccatccgagctcgaggccgagcgtacgtctggcgcttttcaggacagcgtactagaagaggaggtggaactggtgcttgccccgtccgaagagagtgagaaatatattctgacactgcagaccgtgcatttcacgtctgaagccgttgagctgcaggacatgtctctgctgagtatacagcagcaagagggcgtgcaagtcgtggtgcagcagccagggcctggcctgctctggcttgaagagggcccccggcagtcgctgcagcagtgtgtggctattagcatacaacaggagttgtatagtccccaagaaatggaggtcctgcaattccacgctctggaagaaaatgtgatggttgctagcgaggatagtaagctggccgtctccctggccgaaaccacagggctgattaaactggaggaggagcaggaaaaaaatcagcttctggccgaacgcaccaaagagcaactcttctttgtggagactatgagcggggatgaacggtctgatgagattgttctgactgtcagtaactctaatgttgaggagcaagaggatcagcctactgcaggccaggctgacgcagaaaaggccaagtccaccaaaaaccagcggaaaactaagggcgccaaaggcacttttcattgcgacgtttgtatgttcacttcctcccggatgagctcctttaatcggcatatgaagacacatactagcgagaaaccacacctgtgccatttgtgtctgaaaacatttcgcactgtcaccctgcttcgcaaccatgtgaacactcacaccgggacacgcccatataaatgcaatgattgtaacatggctttcgtgacatccggcgaacttgttagacaccgccgttataagcacacacacgagaagcccttcaagtgcagcatgtgtaaatacgcctccgttgaggccagcaagctaaaaagacatgtgcggtctcatactggggaacgccccttccagtgctgccagtgctcatatgcctcccgggatacatacaagctcaagaggcatatgcgcacccactctggcgagaagccatacgagtgtcacatttgccacacccggtttacccagtcaggaaccatgaagatacacattttacaaaaacacggggaaaatgtgccgaagtaccagtgccctcactgcgccactattatagcacgaaaaagcgatctgcgattcttgggattgccatttccctag

SEQ ID NO: 95039 - DNA, 1284 bp, Artificial Sequence
  derived and/or modified sequence
atggccgccacagagatctctgtgctgtctgagcagttcaccaagatcaaggagctggagctgatgcctgagaagggcctgaaggaggaggagaaggatggagtgtgccgggagaaggaccacaggagccccagcgagctggaggccgagaggaccagcggggccttccaggacagcgtgctggaggaggaggtggagctggtgctggcccccagcgaggagagcgagaagtacatcctgaccctgcagacagtgcacttcaccagcgaggccgtggagctgcaggacatgagcctgctgagcatccagcagcaggagggcgtgcaggtggtggtgcagcagcccggccctggcctgctgtggctggaggagggcccccggcagagcctgcagcagtgtgtggccatcagcatccagcaggagctgtacagcccccaggagatggaggtgctgcagttccacgccctggaggagaatgtgatggtggccagcgaggacagcaagctggccgtgtccctggccgagaccaccggcctcatcaagctggaggaggagcaggagaagaaccagctgctggccgagaggaccaaggagcagctgttctttgtggagaccatgtctggagatgagaggagtgatgaaattgtgctgactgtgagcaacagcaatgtggaggagcaggaggaccagcccacagctggccaggctgatgctgagaaggccaagagcaccaagaaccagaggaagaccaagggggccaagggcaccttccactgtgatgtgtgcatgttcaccagcagcaggatgagcagcttcaacagacacatgaagacccacaccagcgagaagccccacctgtgccacctgtgcctgaagaccttcagaacagtgaccctgctgagaaatcatgtgaacacccacacaggcacccggccctacaagtgcaatgactgcaacatggcctttgtgaccagcggggagctggtgcgccaccggcgctacaagcacacccatgagaagcccttcaagtgcagcatgtgcaagtatgcctctgtggaggccagcaagctgaagagacatgtgcgcagccacactggagagcggcccttccagtgctgccagtgcagctatgccagccgggacacctacaagctgaagaggcacatgaggacccacagcgaggccaccagcaagaggagcctgcaggagatcccccgctgcaagttccacccagactgcctgcagatgctgcaggtgtggcagaggctcttccccctggactag

SEQ ID NO: 95040 - DNA, 1722 bp, Artificial Sequence
  derived and/or modified sequence
atggccgccacagagatctctgtgctgtctgagcagttcaccaagatcaaggagctggagctgatgcctgagaagggcctgaaggaggaggagaaggatggagtgtgccgggagaaggaccacaggagccccagcgagctggaggccgagaggaccagcggggccttccaggacagcgtgctggaggaggaggtggagctggtgctggcccccagcgaggagagcgagaagtacatcctgaccctgcagacagtgcacttcaccagcgaggccgtggagctgcaggacatgagcctgctgagcatccagcagcaggagggcgtgcaggtggtggtgcagcagcccggccctggcctgctgtggctggaggagggcccccggcagagcctgcagcagtgtgtggccatcagcatccagcaggagctgtacagcccccaggagatggaggtgctgcagttccacgccctggaggagaatgtgatggtggccagcgaggacagcaagctggccgtgtccctggccgagaccaccggcctcatcaagctggaggaggagcaggagaagaaccagctgctggccgagaggaccaaggagcagctgttctttgtggagaccatgtctggagatgagaggagtgatgaaattgtgctgactgtgagcaacagcaatgtggaggagcaggaggaccagcccacagctggccaggctgatgctgagaaggccaagagcaccaagaaccagaggaagaccaagggggccaagggcaccttccactgtgatgtgtgcatgttcaccagcagcaggatgagcagcttcaacagacacatgaagacccacaccagcgagaagccccacctgtgccacctgtgcctgaagaccttcagaacagtgaccctgctgagaaatcatgtgaacacccacacaggcacccggccctacaagtgcaatgactgcaacatggcctttgtgaccagcggggagctggtgcgccaccggcgctacaagcacacccatgagaagcccttcaagtgcagcatgtgcaagtatgcctctgtggaggccagcaagctgaagagacatgtgcgcagccacactggagagcggcccttccagtgctgccagtgcagctatgccagccgggacacctacaagctgaagaggcacatgaggacccacagcggggagaagccctatgagtgccacatctgccacacccgcttcacccagagcggcaccatgaagatccacatcctgcagaagcatggagaaaatgtgcccaagtaccagtgcccccactgtgccaccatcatcgccaggaagagtgacctgcgggtgcacatgaggaacctgcacgcctacagcgctgctgagctgaagtgccgctactgcagcgctgtgttccacgagagatatgccctgatccagcaccagaagacccacaagaatgagaagcgcttcaagtgcaagcactgcagctatgcctgcaagcaggagcggcacatgacagcccacatccgcacccacactggagagaagcccttcacctgcctgagctgcaacaagtgcttccggcagaagcagctgctgaatgcccacttcaggaagtaccatgatgccaacttcatccccaccgtgtacaagtgcagcaaatgtgggaagggcttcagccgctggatcaccagcaagtggagcggcctgaagccccagaccttcatcacctag

SEQ ID NO: 95041 - DNA, 1356 bp, Artificial Sequence
  derived and/or modified sequence
atggccgccacagagatctctgtgctgtctgagcagttcaccaagatcaaggagctggagctgatgcctgagaagggcctgaaggaggaggagaaggatggagtgtgccgggagaaggaccacaggagccccagcgagctggaggccgagaggaccagcggggccttccaggacagcgtgctggaggaggaggtggagctggtgctggcccccagcgaggagagcgagaagtacatcctgaccctgcagacagtgcacttcaccagcgaggccgtggagctgcaggacatgagcctgctgagcatccagcagcaggagggcgtgcaggtggtggtgcagcagcccggccctggcctgctgtggctggaggagggcccccggcagagcctgcagcagtgtgtggccatcagcatccagcaggagctgtacagcccccaggagatggaggtgctgcagttccacgccctggaggagaatgtgatggtggccagcgaggacagcaagctggccgtgtccctggccgagaccaccggcctcatcaagctggaggaggagcaggagaagaaccagctgctggccgagaggaccaaggagcagctgttctttgtggagaccatgtctggagatgagaggagtgatgaaattgtgctgactgtgagcaacagcaatgtggaggagcaggaggaccagcccacagctggccaggctgatgctgagaaggccaagagcaccaagaaccagaggaagaccaagggggccaagggcaccttccactgtgatgtgtgcatgttcaccagcagcaggatgagcagcttcaacagacacatgaagacccacaccagcgagaagccccacctgtgccacctgtgcctgaagaccttcagaacagtgaccctgctgagaaatcatgtgaacacccacacaggcacccggccctacaagtgcaatgactgcaacatggcctttgtgaccagcggggagctggtgcgccaccggcgctacaagcacacccatgagaagcccttcaagtgcagcatgtgcaagtatgcctctgtggaggccagcaagctgaagagacatgtgcgcagccacactggagagcggcccttccagtgctgccagtgcagctatgccagccgggacacctacaagctgaagaggcacatgaggacccacagcggggagaagccctatgagtgccacatctgccacacccgcttcacccagagcggcaccatgaagatccacatcctgcagaagcatggagaaaatgtgcccaagtaccagtgcccccactgtgccaccatcatcgccaggaagagtgacctgcgcttcctgggcctgcccttcccctag

SEQ ID NO: 95042 - DNA, 1284 bp, Artificial Sequence
  derived and/or modified sequence
atggccgccaccgagatcagcgtgctgagcgagcagttcaccaagattaaagaactggaactcatgcccgaaaaagggttgaaagaagaggaaaaggatggcgtttgtcgcgagaaagatcaccgaagtccatccgagctcgaagctgaacgtacctcaggtgccttccaggactcagtactcgaagaggaggtggagctcgtgctggctccgagcgaagaatccgaaaagtacatcctcacattacagactgtgcactttacatccgaggctgtggaattgcaggatatgtctttactcagcattcaacaacaggagggagtccaagttgtggttcagcagccagggccagggttgttatggctcgaggaagggcctaggcagtcattgcagcagtgtgtagccatttcaattcagcaagagctgtattccccacaggagatggaggttctgcagtttcacgcccttgaagagaatgtgatggttgcaagcgaagattctaagctggcggtctccttggcggaaactacaggccttattaagctggaggaggagcaggagaagaaccaacttctcgccgaacgaaccaaagaacagctgttctttgtggaaacgatgtcgggcgacgagagaagcgacgaaattgttctgacagtgtctaacagcaacgtggaagagcaggaggaccagcctacagccggtcaagccgacgccgagaaggctaagtctacgaaaaaccagaggaagacgaagggcgcaaagggtaccttccattgcgatgtatgcatgtttacttcctcccgcatgtctagcttcaatagacacatgaaaacgcatacctccgagaagccacacctgtgccacctctgccttaagacgttcagaactgttacccttctccggaatcacgtgaatacgcacactggtacaaggccgtacaaatgtaatgattgtaacatggcatttgtcacttcaggggaactggtccggcatcgaagatacaaacacacacatgagaaaccattcaaatgcagtatgtgcaaatacgcatctgtagaagctagcaaactcaagagacacgttcggagccataccggcgaacgtccttttcagtgttgtcagtgctcctacgcttctcgtgacacttacaagctcaaacgtcatatgcggacacattctgaggccacgagcaagcgttccctccaggagatccctcggtgtaaattccatcccgattgcctccaaatgctgcaggtttggcagcggctgttcccacttgactag

SEQ ID NO: 95043 - DNA, 1722 bp, Artificial Sequence
  derived and/or modified sequence
atggccgccaccgagatcagcgtgctgagcgagcagttcaccaagattaaggagctggaactgatgcctgaaaaggggctgaaggaggaagaaaaggacggtgtttgtagggagaaagatcaccgttcccccagtgagctcgaagcggagagaacctctggagctttccaggacagtgtcctggaagaagaagtcgaactggtgctcgctccgtctgaggaatcagaaaagtacatcctcacactgcagactgtccactttacttctgaggctgtggaactgcaggacatgagtctcctttctatccagcagcaggaaggggtacaggtcgtggttcaacagcccggccctggacttttatggctagaagagggcccccgtcaatctctgcagcagtgtgtggcaataagcatacaacaggagctctacagtcctcaggaaatggaggtattgcagtttcacgcgctcgaggagaacgtgatggttgcctcagaggactctaagctggctgtgagcttggccgaaactacagggctgattaagctcgaggaggagcaggaaaagaatcagttactcgcagagcggacgaaggaacaactgtttttcgttgaaaccatgtctggagatgaaagaagcgacgagattgttttgaccgttagtaatagcaatgtggaagaacaggaggaccagcctacagctggtcaggcggatgccgaaaaagctaagtcaaccaaaaatcagagaaagaccaaaggtgcgaagggaacattccactgcgacgtgtgtatgtttaccagttcgcgaatgtcttcttttaaccgccacatgaagacacatacctctgagaaacctcacctctgccatctgtgtctcaagacctttagaaccgtgactctcttgagaaaccacgtgaacacacacacaggaacacggccttataagtgcaacgattgcaatatggcctttgtgacgagtggagaacttgtgcgccacagaaggtacaagcacacacatgagaagccatttaagtgttccatgtgcaagtacgcatctgtggaggcctcaaagctaaaacggcacgtgcgatcccacactggtgagaggccattccagtgctgtcagtgttcgtacgcctcccgggatacctataaactgaagcgacatatgcgcacgcactctggagaaaaaccctacgagtgtcacatctgtcatactaggttcactcagagcgggaccatgaaaattcacatcctccagaagcacggcgagaacgttccgaagtaccagtgcccgcattgtgcaaccatcatcgctcggaaaagtgatctacgagtgcatatgagaaatctgcacgcttactcagctgcggaactgaagtgtcggtactgcagcgctgtcttccatgagcggtacgcgttgatccagcaccaaaagacccacaaaaatgaaaagcggttcaagtgcaagcattgcagttacgcttgtaaacaggagagacacatgaccgcacatattagaacacacactggggagaagccgttcacttgcctgagctgcaataagtgttttcgacagaaacaactgctcaacgcacactttaggaagtaccacgatgccaacttcataccgaccgtttataagtgctctaagtgcggcaaaggattttctagatggattacctctaagtggtccggcctgaagccacagacatttattacctag

SEQ ID NO: 95044 - DNA, 1356 bp, Artificial Sequence
  derived and/or modified sequence
atggccgccaccgagatcagcgtgctgagcgagcagttcaccaagattaaggaactggagctgatgcccgaaaaaggccttaaggaagaggaaaaggatggcgtatgccgcgagaaagaccatcgaagtccgtctgagctagaggctgaacggacaagtggagcgtttcaagattccgtactggaagaagaggtggagttagttctcgccccttccgaagagagtgagaagtatatcctgaccctgcagactgttcattttactagcgaggcggtagagctccaagatatgtctcttctctccattcagcagcaagaaggtgttcaagtagtagtccagcaacctggacccggactgctctggctggaggaggggcctcgccagtctttgcagcagtgtgttgcaatcagcattcagcaggagctgtattcccctcaagagatggaggttctacagtttcacgccttagaggaaaatgtaatggtcgccagtgaggactccaagctggcggtctctcttgcagaaactaccggcttgattaaactcgaagaggaacaggagaagaatcagctgctggcggaaaggaccaaggaacagctttttttcgtagaaactatgagtggggatgagcgaagcgatgaaatcgtgttaacggtgtcaaactccaacgtggaagaacaggaggaccaacccacagcggggcaggcggacgcagagaaagctaaatccacgaaaaatcagaggaagaccaagggcgccaaggggacatttcattgtgacgtgtgcatgtttacatcaagcagaatgagttccttcaacaggcacatgaaaactcacacgagcgagaaaccacacctgtgccatctgtgtctcaagaccttccgaaccgttacactcctccggaaccacgtgaatacacacactggcactagaccttacaagtgtaacgactgcaacatggcatttgttacctctggcgagcttgtccgccaccgacggtataaacacactcacgagaagcccttcaagtgtagtatgtgcaagtatgcatccgtggaggctagcaagctaaaacgtcatgtgagatcccacactggagagcggcccttccagtgttgtcagtgtagctatgcgagcagagatacatacaaattgaagcgacacatgcgtacacactcgggcgaaaagccttatgagtgtcacatctgccacaccagatttacccagagcggcactatgaaaatacatatcctgcagaaacacggggaaaacgtccccaagtatcagtgtccccattgcgcaacaattattgcacggaaatcagatttacgctttctcggcctgcccttcccgtag

SEQ ID NO: 95045 - DNA, 1284 bp, Artificial Sequence
  derived and/or modified sequence
atggcggctacagagatatcggtcctgtcagagcagttcaccaagattaaggagctcgagctgatgccggagaagggtttgaaagaggaggagaaagacggggtctgtagggagaaagaccaccgcagtccctccgagctagaggcggagcggacttctggagcattccaagactctgtcttggaggaggaagtggaactagtcctggcgccttcagaggaaagtgagaagtacatcctgacactgcagacagtgcacttcacttcagaagctgtggagctgcaggatatgtccctgctctcaattcagcaacaagaaggcgtgcaggttgtggtgcagcagccaggtccaggactactgtggctggaggaagggcctcggcagtccctgcagcagtgtgtggcaataagcattcagcaggagttgtacagccctcaggagatggaagtcctgcagtttcatgccctggaagagaatgtgatggtggcatcagaggacagcaaacttgccgtttccctggctgagacaaccggactcattaagctcgaggaagagcaggagaagaatcagctgttagctgagaggaccaaggagcagctgtttttcgtggagacgatgagtggggacgagagatccgacgagattgtactgaccgtgtcaaacagtaacgtggaagagcaggaagatcagccgacggcagggcaggcagatgcagaaaaggccaaatccaccaaaaatcaaaggaaaaccaagggtgctaagggcacgtttcattgcgatgtgtgcatgtttaccagcagccggatgtctagctttaacagacacatgaagacccacacaagcgaaaagccccacctgtgccatctgtgtctaaaaacattccgcacagtcactctgttgcggaatcacgtgaacactcacaccgggactaggccgtacaagtgtaacgactgtaatatggctttcgtgaccagcggagaactggttcgccatagacggtacaagcacacgcacgagaaaccattcaaatgtagtatgtgcaaatatgcaagcgtggaagcctcaaaacttaagcgtcatgttcgttctcacaccggcgaaaggccattccagtgctgtcagtgctcatacgccagcagggatacgtacaaactaaagcggcacatgcgaacgcattcagaagccacatctaagcgcagcctgcaagaaatccctaggtgcaagtttcatcccgactgtttgcagatgttgcaagtctggcagcgactgttccccttggattag

SEQ ID NO: 95046 - DNA, 1722 bp, Artificial Sequence
  derived and/or modified sequence
atggccgcaaccgagatcagcgtgctaagcgagcagtttactaaaatcaaagaactagaactcatgccagagaaaggcctgaaggaagaggaaaaagacggagtgtgccgagagaaagatcacaggtctccctcagagctggaggccgagcggacttccggcgcatttcaggattcagtgctcgaggaggaggtggagctggtcttagccccttccgaggagagcgaaaaatacatactcacacttcagaccgtacacttcacatcagaagccgtggagttgcaggacatgtctttgctttcaatccagcaacaagaaggtgtccaggtagtcgtgcagcagcctgggcctggcctcttatggctggaagagggacccagacaatccctccaacagtgcgtggctatctcaatacaacaggagttgtattctcctcaggagatggaggttttgcagttccacgccctcgaagaaaatgtcatggtggcttctgaagactcaaagctcgccgtgtctctagctgagaccactggattgataaagttggaggaagagcaggagaaaaaccaattattggctgagcgcacaaaagagcagctctttttcgtcgaaactatgtccggcgatgaacgatcggacgagattgtattgactgtgtccaactccaacgttgaggaacaggaagaccagccgactgccggtcaggccgacgctgagaaggcaaagtcaacgaagaaccagagaaagacgaaaggagccaaagggacattccactgcgacgtgtgcatgtttactagctcccgaatgagtagtttcaaccgccacatgaagacccatacttccgagaaacctcacctctgtcacctatgcctgaagacctttcgcacagtgaccctcctcagaaaccatgttaatactcatactggaacgaggccatacaaatgtaacgattgcaacatggccttcgtaacctcaggcgagttagttcgacataggagatacaagcacactcatgaaaaaccattcaagtgcagtatgtgcaaatatgctagcgtggaagctagcaagctgaagcgccatgttcggagtcacactggtgagcgcccatttcaatgctgtcagtgttcgtatgcgtctcgagacacatacaaacttaagcgacacatgagaacacactcgggcgagaaaccatatgagtgccacatctgtcatacacgctttacacaaagtgggactatgaagatacacattctacagaagcatggagaaaacgtgcctaagtatcaatgcccgcactgcgccaccatcatcgcccgaaaaagtgacctgcgagtacacatgaggaacttgcatgcctacagtgccgctgagctcaaatgtcggtactgttccgccgtattccatgagcgatacgccctgatccagcatcaaaagacccacaaaaacgaaaaacggtttaagtgtaagcactgttcgtacgcttgcaagcaggaacgccatatgacggcacacatcaggacccataccggcgaaaaaccatttacctgtctcagttgtaacaaatgtttccggcagaaacaactgctcaacgctcattttcgcaagtaccatgatgccaattttatccccactgtttataaatgcagcaaatgtggtaaaggcttttctcgctggataacatccaaatggtctggccttaaacctcagacattcattacctag

SEQ ID NO: 95047 - DNA, 1356 bp, Artificial Sequence
  derived and/or modified sequence
atggcagcaacagaaatctctgttctgtctgaacaatttaccaaaatcaaagagttagaactgatgcccgagaagggcctaaaagaagaagagaaggatggggtgtgccgtgagaaagatcatcgctctccatcagaattagaggccgagaggacttccggggcttttcaggacagcgtactagaagaagaggtggaattggttctggctccgtctgaagagagtgagaagtatatcctcaccttacagacagtgcacttcacctctgaggcggtcgaactgcaggatatgtccctactcagtatccaacaacaagagggagtccaggtggtggtgcagcagcccggtcctggacttctgtggttggaggagggccctcgccaatcactgcagcaatgcgttgctatttctatccagcaggaactctactcgcctcaggaaatggaggtcctgcagtttcacgcactggaggaaaacgttatggtggcgtcggaggactctaagcttgctgtgagcctcgccgagaccacaggcctaattaaattggaggaagagcaggaaaaaaatcagttacttgcagaaagaaccaaagaacagctgttcttcgtagagacaatgagcggagacgagcgctcagatgagattgttttaacagtctctaattccaacgtcgaggaacaggaggaccagcctaccgcagggcaggcagatgccgaaaaagcaaagtcaactaaaaatcagaggaagacgaagggcgcaaagggtacatttcactgtgacgtttgtatgttcacatcatctcgaatgtcatctttcaaccgacacatgaaaacacacacttcagagaagccccatttatgccacttatgtctgaaaacgtttaggaccgtgactctactgcgcaatcacgttaatacccacaccggcaccagaccatacaaatgcaatgactgcaatatggcgttcgttactagcggtgagctcgtgagacaccggcgatataagcatacccacgaaaagccctttaaatgctccatgtgcaaatatgcctccgttgaggcatctaagcttaaaaggcacgtgcgtagccacaccggcgagcggccttttcaatgctgccagtgttcttacgccagtcgggacacatacaaactgaagaggcacatgagaacacatagcggggaaaaaccatatgaatgtcatatttgccatacaagatttacccagtcgggaactatgaagattcacattctgcagaaacatggggagaatgtgccaaagtaccagtgtccacactgtgccaccatcattgcacgcaagtcagatctgcggttcctaggcctaccatttccctag

SEQ ID NO: 95048 - DNA, 2964 bp, Artificial Sequence
  derived and/or modified sequence
agggtaaagcaggggccctgccaggcctccgagggagtgtgcttggtctggccgagggctgcttggccaagtctgggtgggctcgaggccactaggcccaaagcctgcctggctctgagggtgctaggtctagaaccgtgcacgaggggaatgcctgctcgggcccgaacctcgctgggcgccgggtgtgcactggcccggggcctgcttggacctgaaacttgctaggcccaggatatgcactggccgagagcctgctgggcccaaaccttactaggcccaggatgttcactgactgaaccggctcaggcctaaccttgctaggcccaggatatgcactgggccagagtgtgctcaggcggaaccttgccaggcgcaggatgtgtgctggccctaagcctgctgaggcccaaacctgttcgttctagggttttgtacaaaatcctgctttagcctaaatcctgcttagccttgaccccctcctagacccaagccagatcagcattgttctgaccctactaagtccaaaaccttttgaggccagaccttgtttcaactccaaagcctgctaggttccagcaccccccgcatccctcctcataccacccccttctcccccctatggaaaccgcttgcttatttttcaaacaggccaagtcattatggcagccactgagatctctgtcctttctgagcaattcaccaagatcaaagaactcgagttgatgccggaaaaaggcctgaaggaggaggaaaaagacggagtgtgcagagagaaagaccatcggagccctagtgagttggaggccgagcgtacctctggggccttccaggacagcgtcctggaggaagaagtggagctggtgctggccccctcggaggagagcgagaagtacatcctgaccctgcagacggtgcacttcacttctgaagctgtggagttgcaggatatgagcttgctgagcatacagcagcaagaaggggtgcaggtggtggtgcaacagcctggccctgggttgctgtggcttgaggaagggccccggcagagcctgcagcagtgtgtggccattagtatccagcaagagctgtactccccgcaagagatggaggtgttgcagttccacgctctagaggagaatgtgatggtggccagtgaagacagtaagttagcggtgagcctggctgaaactactggactgatcaagctcgaggaagagcaggagaagaaccagttattggctgaaagaacaaaggagcagctcttttttgtggaaacaatgtcaggagatgaaagaagtgacgaaattgttctcacagtttcaaattcaaatgtggaagaacaagaggatcaacctacagctggtcaagcagatgctgaaaaggccaaatctacaaaaaatcaaagaaagacaaagggagcaaaaggaaccttccactgtgatgtctgcatgttcacctcttctagaatgtcaagttttaatcgtcatatgaaaactcacaccagtgagaagcctcacctgtgtcacctctgcctgaaaaccttccgtacggtcactctgctgcggaaccatgttaacacccacacaggaaccaggccctacaagtgtaacgactgcaacatggcatttgtcaccagtggagaactcgtccgacacaggcgctataaacatactcatgagaaaccctttaaatgttccatgtgcaagtatgccagtgtggaggcaagtaaattgaagcgccatgtccgatcccacactggggagcgcccctttcagtgttgccagtgcagctatgccagcagagatacctacaagctgaaacgccacatgagaacgcactcagaagcaacttctaaacgctcacttcaggaaataccacgatgcaaatttcatcccgactgtttacaaatgctccaagtgtggcaaaggcttttcccgctggattaacctgcacagacattcggagaagtgtggatcaggggaagcaaagtcggctgcttcaggaaagggaagaagaacaagaaagaggaagcagaccatcctgaaggaagccacaaagggtcagaaggaagctgcgaagggatggaaggaagccgcgaacggagacggtgtgatctcagctcaccgcaacctctgcctcctgggttcaagtgattctcatgcctcagtctccggagctgggattacagatgcccgccaccacgcctggctaattgttctattatttttagtagagatggggttttaccatgtctctcactcctgacctcaagtgatctgcccgcctcggcctcccaaagtggtgggattacaggcatgagcccctgtgcctggcctgatggcaccagttttgtggatctcagtgtttcttttcatatccaagaactgggtcttcttgtctccctccatccaccaaaaaaaaaaaaaaaaaaatacttcaaggaagcatggacaaaaatatcctcagacaagttagaacatgagacagtcacgttcttcagtgtggcgctctgtggatgtttgggaaagtaatttggaaaatgagtagagcagggctccccaaccccccagccgtggacctgtgggctgttaggaactgggcctcccagcaggaggtgagcagtgggtgagggagtgaagctttgtattgacagccgctccccatcgggcgcatcaccgcctgagctccgcctcctgtcagatcagcggcagcgttagattctcatgagtgtgaaccctgttgtgaactctgcacgtgcaagggatctaggctgcacactccttacgagaatctaatgcccgacgatctgtcactgtctcccatcacccccagatgggactgtctagatgcaggaaaacaagcccagggctcccactgattctacattatggtgagctgtataattatttcattatatatcacaatgtaataataaaaataaagtacataagaaatgtaatgtgc

SEQ ID NO: 95049 - DNA, 3996 bp, Artificial Sequence
  derived and/or modified sequence
agggtaaagcaggggccctgccaggcctccgagggagtgtgcttggtctggccgagggctgcttggccaagtctgggtgggctcgaggccactaggcccaaagcctgcctggctctgagggtgctaggtctagaaccgtgcacgaggggaatgcctgctcgggcccgaacctcgctgggcgccgggtgtgcactggcccggggcctgcttggacctgaaacttgctaggcccaggatatgcactggccgagagcctgctgggcccaaaccttactaggcccaggatgttcactgactgaaccggctcaggcctaaccttgctaggcccaggatatgcactgggccagagtgtgctcaggcggaaccttgccaggcgcaggatgtgtgctggccctaagcctgctgaggcccaaacctgttcgttctagggttttgtacaaaatcctgctttagcctaaatcctgcttagccttgaccccctcctagacccaagccagatcagcattgttctgaccctactaagtccaaaaccttttgaggccagaccttgtttcaactccaaagcctgctaggttccagcaccccccgcatccctcctcataccacccccttctcccccctatggaaaccgcttgcttatttttcaaacaggccaagtcattatggcagccactgagatctctgtcctttctgagcaattcaccaagatcaaagaactcgagttgatgccggaaaaaggcctgaaggaggaggaaaaagacggagtgtgcagagagaaagaccatcggagccctagtgagttggaggccgagcgtacctctggggccttccaggacagcgtcctggaggaagaagtggagctggtgctggccccctcggaggagagcgagaagtacatcctgaccctgcagacggtgcacttcacttctgaagctgtggagttgcaggatatgagcttgctgagcatacagcagcaagaaggggtgcaggtggtggtgcaacagcctggccctgggttgctgtggcttgaggaagggccccggcagagcctgcagcagtgtgtggccattagtatccagcaagagctgtactccccgcaagagatggaggtgttgcagttccacgctctagaggagaatgtgatggtggccagtgaagacagtaagttagcggtgagcctggctgaaactactggactgatcaagctcgaggaagagcaggagaagaaccagttattggctgaaagaacaaaggagcagctcttttttgtggaaacaatgtcaggagatgaaagaagtgacgaaattgttctcacagtttcaaattcaaatgtggaagaacaagaggatcaacctacagctggtcaagcagatgctgaaaaggccaaatctacaaaaaatcaaagaaagacaaagggagcaaaaggaaccttccactgtgatgtctgcatgttcacctcttctagaatgtcaagttttaatcgtcatatgaaaactcacaccagtgagaagcctcacctgtgtcacctctgcctgaaaaccttccgtacggtcactctgctgcggaaccatgttaacacccacacaggaaccaggccctacaagtgtaacgactgcaacatggcatttgtcaccagtggagaactcgtccgacacaggcgctataaacatactcatgagaaaccctttaaatgttccatgtgcaagtatgccagtgtggaggcaagtaaattgaagcgccatgtccgatcccacactggggagcgcccctttcagtgttgccagtgcagctatgccagcagagatacctacaagctgaaacgccacatgagaacgcactcaggtgagaagccttacgaatgccacatctgccacacccgcttcacccagagcgggaccatgaaaatacatattctgcagaaacacggcgaaaatgtccccaaataccagtgtccccattgtgccaccatcattgcacggaaaagcgacctacgattcctgggcctcccttttccatgatcttatttctctttccaaaatatatgacactgtgatacacaaaaatatgttagcagaacaaaaaatttgacccttttgcccaaagagattctggagatgagatgaatttttttgaaaacctttctgaaaggcgaaaggtgttccacaaagtcttcacttttatttttcatctggaccattctgtcattgttgccgtagataccagcacatcacaaaacacagtccagtggggcttggtggggcacaagtctagccagttgctagacttttttgacaccatggcaaagtaacatggtttatatccatctcatgccagtgggtgatacactccacatagccctataagatgctttataaacacattaattcttccttcccatgactgtatgagaaatcaagctctctaaatgtctgagtcactgtgggtaaggtggagtagctccatcacacagctgtccattgtcatttggcttcttacacaagtatcacaagaccatcatgctttagacttagatgagcaaacccagccagaccttaccatgtgtctcaggttaatttcaacataggaaataacagggcactgacttctaacaacgagtggattatttaaggtgtgcatatgcgcaacttgcatgcttacagcgctgcagagctgaaatgccgctactgttctgctgtcttccatgaacgctatgccctcattcagcaccagaaaactcataagaatgagaagaggttcaagtgcaaacactgcagttatgcctgcaagcaggaacgtcatatgaccgctcacattcgtacccacactggagagaaaccattcacctgcctttcttgcaataaatgtttccgacagaagcaacttctaaacgctcacttcaggaaataccacgatgcaaatttcatcccgactgtttacaaatgctccaagtgtggcaaaggcttttcccgctggattaacctgcacagacattcggagaagtgtggatcaggggaagcaaagtcggctgcttcaggaaagggaagaagaacaagaaagaggaagcagaccatcctgaaggaagccacaaagggtcagaaggaagctgcgaagggatggaaggaagccgcgaacggagacggtgtgatctcagctcaccgcaacctctgcctcctgggttcaagtgattctcatgcctcagtctccggagctgggattacagatgcccgccaccacgcctggctaattgttctattatttttagtagagatggggttttaccatgtctctcactcctgacctcaagtgatctgcccgcctcggcctcccaaagtggtgggattacaggcatgagcccctgtgcctggcctgatggcaccagttttgtggatctcagtgtttcttttcatatccaagaactgggtcttcttgtctccctccatccaccaaaaaaaaaaaaaaaaaaatacttcaaggaagcatggacaaaaatatcctcagacaagttagaacatgagacagtcacgttcttcagtgtggcgctctgtggatgtttgggaaagtaatttggaaaatgagtagagcagggctccccaaccccccagccgtggacctgtgggctgttaggaactgggcctcccagcaggaggtgagcagtgggtgagggagtgaagctttgtattgacagccgctccccatcgggcgcatcaccgcctgagctccgcctcctgtcagatcagcggcagcgttagattctcatgagtgtgaaccctgttgtgaactctgcacgtgcaagggatctaggctgcacactccttacgagaatctaatgcccgacgatctgtcactgtctcccatcacccccagatgggactgtctagatgcaggaaaacaagcccagggctcccactgattctacattatggtgagctgtataattatttcattatatatcacaatgtaataataaaaataaagtacataagaaatgtaatgtgc

SEQ ID NO: 95050 - DNA, 1284 bp, Artificial Sequence
  derived and/or modified sequence
atggccgccaccgagatcagcgtgctgagcgagcagttcaccaagatcaaggagctggagctgatgcccgagaagggcctgaaggaggaggagaaggacggcgtgtgcagagagaaggaccacagaagccccagcgagctggaggccgagagaaccagcggcgccttccaggacagcgtgctggaggaggaggtggagctggtgctggcccccagcgaggagagcgagaagtacatcctgaccctgcagaccgtgcacttcaccagcgaggccgtggagctgcaggacatgagcctgctgagcatccagcagcaggagggcgtgcaggtggtggtgcagcagcccggccccggcctgctgtggctggaggagggccccagacagagcctgcagcagtgcgtggccatcagcatccagcaggagctgtacagcccccaggagatggaggtgctgcagttccacgccctggaggagaacgtgatggtggccagcgaggacagcaagctggccgtgagcctggccgagaccaccggcctgatcaagctggaggaggagcaggagaagaaccagctgctggccgagagaaccaaggagcagctgttcttcgtggagaccatgagcggcgacgagagaagcgacgagatcgtgctgaccgtgagcaacagcaacgtggaggagcaggaggaccagcccaccgccggccaggccgacgccgagaaggccaagagcaccaagaaccagagaaagaccaagggcgccaagggcaccttccactgcgacgtgtgcatgttcaccagcagcagaatgagcagcttcaacagacacatgaagacccacaccagcgagaagccccacctgtgccacctgtgcctgaagaccttcagaaccgtgaccctgctgagaaaccacgtgaacacccacaccggcaccagaccctacaagtgcaacgactgcaacatggccttcgtgaccagcggcgagctggtgagacacagaagatacaagcacacccacgagaagcccttcaagtgcagcatgtgcaagtacgccagcgtggaggccagcaagctgaagagacacgtgagaagccacaccggcgagagacccttccagtgctgccagtgcagctacgccagcagagacacctacaagctgaagagacacatgagaacccacagcgaggccaccagcaagagaagcctgcaggagatccccagatgcaagttccaccccgactgcctgcagatgctgcaggtgtggcagagactgttccccctggactag

SEQ ID NO: 95051 - DNA, 1722 bp, Artificial Sequence
  derived and/or modified sequence
atggccgccaccgagatcagcgtgctgagcgagcagttcaccaagatcaaggagctggagctgatgcccgagaagggcctgaaggaggaggagaaggacggcgtgtgcagagagaaggaccacagaagccccagcgagctggaggccgagagaaccagcggcgccttccaggacagcgtgctggaggaggaggtggagctggtgctggcccccagcgaggagagcgagaagtacatcctgaccctgcagaccgtgcacttcaccagcgaggccgtggagctgcaggacatgagcctgctgagcatccagcagcaggagggcgtgcaggtggtggtgcagcagcccggccccggcctgctgtggctggaggagggccccagacagagcctgcagcagtgcgtggccatcagcatccagcaggagctgtacagcccccaggagatggaggtgctgcagttccacgccctggaggagaacgtgatggtggccagcgaggacagcaagctggccgtgagcctggccgagaccaccggcctgatcaagctggaggaggagcaggagaagaaccagctgctggccgagagaaccaaggagcagctgttcttcgtggagaccatgagcggcgacgagagaagcgacgagatcgtgctgaccgtgagcaacagcaacgtggaggagcaggaggaccagcccaccgccggccaggccgacgccgagaaggccaagagcaccaagaaccagagaaagaccaagggcgccaagggcaccttccactgcgacgtgtgcatgttcaccagcagcagaatgagcagcttcaacagacacatgaagacccacaccagcgagaagccccacctgtgccacctgtgcctgaagaccttcagaaccgtgaccctgctgagaaaccacgtgaacacccacaccggcaccagaccctacaagtgcaacgactgcaacatggccttcgtgaccagcggcgagctggtgagacacagaagatacaagcacacccacgagaagcccttcaagtgcagcatgtgcaagtacgccagcgtggaggccagcaagctgaagagacacgtgagaagccacaccggcgagagacccttccagtgctgccagtgcagctacgccagcagagacacctacaagctgaagagacacatgagaacccacagcggcgagaagccctacgagtgccacatctgccacaccagattcacccagagcggcaccatgaagatccacatcctgcagaagcacggcgagaacgtgcccaagtaccagtgcccccactgcgccaccatcatcgccagaaagagcgacctgagagtgcacatgagaaacctgcacgcctacagcgccgccgagctgaagtgcagatactgcagcgccgtgttccacgagagatacgccctgatccagcaccagaagacccacaagaacgagaagagattcaagtgcaagcactgcagctacgcctgcaagcaggagagacacatgaccgcccacatcagaacccacaccggcgagaagcccttcacctgcctgagctgcaacaagtgcttcagacagaagcagctgctgaacgcccacttcagaaagtaccacgacgccaacttcatccccaccgtgtacaagtgcagcaagtgcggcaagggcttcagcagatggatcaccagcaagtggagcggcctgaagccccagaccttcatcacctag

SEQ ID NO: 95052 - DNA, 1356 bp, Artificial Sequence
  derived and/or modified sequence
atggccgccaccgagatcagcgtgctgagcgagcagttcaccaagatcaaggagctggagctgatgcccgagaagggcctgaaggaggaggagaaggacggcgtgtgcagagagaaggaccacagaagccccagcgagctggaggccgagagaaccagcggcgccttccaggacagcgtgctggaggaggaggtggagctggtgctggcccccagcgaggagagcgagaagtacatcctgaccctgcagaccgtgcacttcaccagcgaggccgtggagctgcaggacatgagcctgctgagcatccagcagcaggagggcgtgcaggtggtggtgcagcagcccggccccggcctgctgtggctggaggagggccccagacagagcctgcagcagtgcgtggccatcagcatccagcaggagctgtacagcccccaggagatggaggtgctgcagttccacgccctggaggagaacgtgatggtggccagcgaggacagcaagctggccgtgagcctggccgagaccaccggcctgatcaagctggaggaggagcaggagaagaaccagctgctggccgagagaaccaaggagcagctgttcttcgtggagaccatgagcggcgacgagagaagcgacgagatcgtgctgaccgtgagcaacagcaacgtggaggagcaggaggaccagcccaccgccggccaggccgacgccgagaaggccaagagcaccaagaaccagagaaagaccaagggcgccaagggcaccttccactgcgacgtgtgcatgttcaccagcagcagaatgagcagcttcaacagacacatgaagacccacaccagcgagaagccccacctgtgccacctgtgcctgaagaccttcagaaccgtgaccctgctgagaaaccacgtgaacacccacaccggcaccagaccctacaagtgcaacgactgcaacatggccttcgtgaccagcggcgagctggtgagacacagaagatacaagcacacccacgagaagcccttcaagtgcagcatgtgcaagtacgccagcgtggaggccagcaagctgaagagacacgtgagaagccacaccggcgagagacccttccagtgctgccagtgcagctacgccagcagagacacctacaagctgaagagacacatgagaacccacagcggcgagaagccctacgagtgccacatctgccacaccagattcacccagagcggcaccatgaagatccacatcctgcagaagcacggcgagaacgtgcccaagtaccagtgcccccactgcgccaccatcatcgccagaaagagcgacctgagattcctgggcctgcccttcccctag

SEQ ID NO: 95053 - protein, 483 aa, Artificial Sequence
  derived and/or modified sequence
MAATEISVLSEQFTKIKELELMPEKGLKEEEKDGVCREKDHRSPSELEAERTSGAFQDSVLEEEVELVLAPSEESEKYILTLQTVHFTSEAVELQDMSLLSIQQQEGVQVVVQQPGPGLLWLEEGPRQSLQQCVAISIQQELYSPQEMEVLQFHALEENVMVASEDSKLAVSLAETTGLIKLEEEQEKNQLLAERTKEQLFFVETMSGDERSDEIVLTVSNSNVEEQEDQPTAGQADAEKAKSTKNQRKTKGAKGTFHCDVCMFTSSRMSSFNRHMKTHTSEKPHLCHLCLKTFRTVTLLRNHVNTHTGTRPYKCNDCNMAFVTSGELVRHRRYKHTHEKPFKCSMCKYASVEERHMTAHIRTHTGEKPFTCLSCNKCFRQKQLLNAHFRKYHDANFIPTVYKCSKCGKGFSRWILWVGNSEVAELGGPGSGPLLRLQSGCPPGLHHPKAGLGPEDPLPGQLRHTTAGTGLSSLLQGPLCRAA

SEQ ID NO: 95054 - DNA, 1452 bp, Artificial Sequence
  derived and/or modified sequence
atggccgctactgaaatctctgttcttagcgaacaatttaccaaaattaaggaacttgagcttatgccagagaagggactgaaagaggaagaaaaagatggcgtgtgtcgggaaaaggaccataggagtccttcagagttggaagcggaacgcacgtctggtgcatttcaagatagcgtcttagaagaagaggttgaactcgttctggccccctcggaggagtccgagaagtacattctgacactccagacagtgcatttcacaagcgaggccgtggagctgcaagatatgtccctcttgtccatccagcaacaggaaggggtccaagtagtggtacaacagcccggacctggactgctctggctagaggaggggcccaggcagtctctccagcagtgcgtggctatcagcatacaacaggaactgtattcccctcaggaaatggaagtcctacagttccacgccttagaagagaacgttatggtcgcatccgaggattcgaagttggccgtatccctggcagagaccactgggcttattaaattggaagaagagcaggagaagaatcagctgttagccgaaaggaccaaggaacagttgttcttcgtggagacgatgagtggggatgagaggtccgacgagatcgtcttgaccgtgtccaatagtaatgttgaggagcaggaagaccaacctacagccgggcaggccgacgcagaaaaggccaaatccaccaaaaatcagaggaagaccaagggtgcgaaggggacattccattgtgatgtttgcatgtttacatcctcccgtatgagttcctttaacagacatatgaagacacacacgtcggaaaaaccacatctatgccatctttgtttgaaaacgtttaggactgtaaccctgctgaggaatcatgtgaacactcacacggggacccgaccctataaatgcaacgactgtaacatggcttttgtcaccagtggcgagctcgtgagacaccggcgctataagcacactcatgagaagccttttaaatgttccatgtgcaaatacgcaagtgttgaagagagacacatgactgctcatattcggacacacaccggagagaaacccttcacatgtctctcatgtaataagtgcttcaggcaaaaacagcttctaaacgctcatttccggaagtaccacgatgccaatttcatccccactgtgtataaatgtagcaaatgcggcaaaggattcagtaggtggattctatgggttggaaattctgaagtggcagagctgggcggacctgggagtggtcccctgctcagactgcagtcagggtgtcccccagggctgcaccatcctaaggccggactcgggcctgaggatcctctacccggccagttgcggcatacaactgcaggcacaggcctcagtagcctgctgcagggcccactttgccgcgcagcctag

SEQ ID NO: 95055 - DNA, 1452 bp, Artificial Sequence
  derived and/or modified sequence
atggccgccacagagatctctgtgctgtctgagcagttcaccaagatcaaggagctggagctgatgcctgagaagggcctgaaggaggaggagaaggatggagtgtgccgggagaaggaccacaggagccccagcgagctggaggccgagaggaccagcggggccttccaggacagcgtgctggaggaggaggtggagctggtgctggcccccagcgaggagagcgagaagtacatcctgaccctgcagacagtgcacttcaccagcgaggccgtggagctgcaggacatgagcctgctgagcatccagcagcaggagggcgtgcaggtggtggtgcagcagcccggccctggcctgctgtggctggaggagggcccccggcagagcctgcagcagtgtgtggccatcagcatccagcaggagctgtacagcccccaggagatggaggtgctgcagttccacgccctggaggagaatgtgatggtggccagcgaggacagcaagctggccgtgtccctggccgagaccaccggcctcatcaagctggaggaggagcaggagaagaaccagctgctggccgagaggaccaaggagcagctgttctttgtggagaccatgtctggagatgagaggagtgatgaaattgtgctgactgtgagcaacagcaatgtggaggagcaggaggaccagcccacagctggccaggctgatgctgagaaggccaagagcaccaagaaccagaggaagaccaagggggccaagggcaccttccactgtgatgtgtgcatgttcaccagcagcaggatgagcagcttcaacagacacatgaagacccacaccagcgagaagccccacctgtgccacctgtgcctgaagaccttcagaacagtgaccctgctgagaaatcatgtgaacacccacacaggcacccggccctacaagtgcaatgactgcaacatggcctttgtgaccagcggggagctggtgcgccaccggcgctacaagcacacccatgagaagcccttcaagtgcagcatgtgcaagtatgcctctgtggaggagcggcacatgacagcccacatccgcacccacactggagagaagcccttcacctgcctgagctgcaacaagtgcttccggcagaagcagctgctgaatgcccacttcaggaagtaccatgatgccaacttcatccccaccgtgtacaagtgcagcaaatgtgggaagggcttcagccgctggatcctgtgggtgggcaacagcgaggtggccgagctgggcggccctggcagcggccccctgctgcggctgcagagcggctgccccccaggcctgcaccaccccaaggccggcctgggccctgaggaccccctgcccggccagctgcggcacaccacagctggcaccggcctgagcagcctgctgcagggccccctgtgccgggccgcctag

SEQ ID NO: 95056 - DNA, 1452 bp, Artificial Sequence
  derived and/or modified sequence
atggccgccaccgagatcagcgtgctgagcgagcagttcaccaagattaaggaactcgagctgatgcccgaaaagggtttgaaagaggaggaaaaggacggagtgtgccgggagaaggaccacagaagcccctccgagctcgaggcagaaaggacttccggagcatttcaggactctgtgcttgaggaagaggtggagttggtgctggctccctccgaggaatccgaaaaatatattttgaccttgcaaactgtacatttcactagcgaagcagtggagttacaggacatgagtctgttgagtattcaacagcaggagggcgtgcaagtggtggtccagcagccaggacctgggctgttatggttggaggaagggcctcggcagtcattacagcagtgcgtagccatcagcatccagcaagagctttactctcctcaggaaatggaggtgttacagttccacgcactcgaagaaaacgtaatggtggccagcgaggattctaaactggcggtcagtttggcagagactacaggccttatcaaattggaggaggagcaagaaaagaaccagctgctggctgagagaacgaaagaacaactgttctttgtcgagaccatgagcggcgacgaaaggtccgacgagatcgtgctgacggtctcaaactcaaacgtggaagagcaggaggaccagcccacagcaggacaagctgatgcagagaaggctaagtcgaccaaaaaccagcgtaaaacaaagggcgctaaaggcacattccattgcgatgtctgcatgttcacctcctctaggatgtccagtttcaatcggcacatgaaaactcatacaagtgagaagcctcatctgtgccacctgtgccttaaaacttttcggacagtaacacttctcaggaatcacgtcaacacacatacgggaacccgtccatacaagtgtaacgactgcaatatggccttcgtcacgagcggagaactggtgcgacatcggagatacaagcacacgcatgaaaagccatttaagtgttcaatgtgtaaatatgcatcagtggaagagagacatatgactgcgcatattaggactcacactggagaaaaaccctttacatgtctgtcgtgcaacaaatgcttcaggcagaagcagctcctgaatgcccattttaggaaatatcacgatgccaacttcattcctactgtctacaaatgttcgaaatgtggaaaggggttctcccgatggattctctgggtgggaaattcagaggtggccgagctgggcgggcctggcagtggtccattgctgcggctgcagagcggctgcccacccggactgcatcaccctaaggctggccttggcccagaggaccctctgcctggtcagctgagacacacaactgcgggtacaggtctgagctccctactgcaaggtccactgtgccgggctgcatag

SEQ ID NO: 95057 - DNA, 1452 bp, Artificial Sequence
  derived and/or modified sequence
atggccgcaacagagattagcgtacttagtgagcaattcactaagatcaaggagctcgagcttatgccagaaaagggtctgaaggaggaggaaaaagatggcgtgtgtagggaaaaagatcacaggtccccaagcgagcttgaagcagagcgcacttccggcgctttccaggacagcgtgttggaggaggaagtagagctcgtgttggcaccaagtgaagaatcagaaaagtacatcctgacccttcaaacggtgcactttacctcagaagccgtggaactacaagacatgagtctactttccatccaacaacaagaaggcgtgcaggtggtggtccagcagcccggtcctggacttctgtggctagaggagggccctaggcagtccctgcaacagtgtgtggccatcagcattcagcaagagctgtactcccctcaggagatggaggtgctacaattccatgctctggaagaaaacgtgatggtggcgtctgaggacagtaagcttgccgtaagtctggctgagacaacaggactgattaaactggaggaggaacaggaaaagaatcaactgcttgccgaaaggaccaaggaacaactatttttcgtggagacaatgtccggggatgaacgctccgacgaaatcgtgctcaccgtgagtaactccaacgtcgaggaacaggaagaccagcctaccgctggtcaggccgatgctgaaaaggccaaatcaacaaagaatcagaggaagacaaagggcgctaaagggacttttcattgtgatgtgtgtatgttcactagttcccgaatgagtagcttcaaccgacacatgaagacccatacctctgaaaaaccccacctttgccacctctgcctgaagactttccggacagtgacccttttaagaaatcacgttaatacgcacactggaacacgcccatataagtgcaatgactgtaacatggcgtttgtaaccagcggcgagttagtgaggcatcggaggtataaacatacgcacgaaaagcccttcaagtgcagcatgtgtaagtatgcatccgtggaggagagacatatgaccgcccacatacgcacccacacgggggagaagccctttacctgtctgtcctgcaacaaatgtttcaggcagaagcagctgctgaacgcccattttcgtaagtaccatgacgctaatttcatcccaaccgtgtacaagtgcagtaaatgtggcaagggcttttctcggtggatcctgtgggtgggcaatagcgaagtcgctgagctggggggaccaggctcgggaccattactgcggctgcagtccgggtgtcctcccggactacaccatccaaaagccggactcggccctgaagatcctctgcctggccagctgcgtcataccactgccggtacgggcttgagctccctgctgcagggcccattgtgtagagcagcctag

SEQ ID NO: 95058 - DNA, 2955 bp, Artificial Sequence
  derived and/or modified sequence
agggtaaagcaggggccctgccaggcctccgagggagtgtgcttggtctggccgagggctgcttggccaagtctgggtgggctcgaggccactaggcccaaagcctgcctggctctgagggtgctaggtctagaaccgtgcacgaggggaatgcctgctcgggcccgaacctcgctgggcgccgggtgtgcactggcccggggcctgcttggacctgaaacttgctaggcccaggatatgcactggccgagagcctgctgggcccaaaccttactaggcccaggatgttcactgactgaaccggctcaggcctaaccttgctaggcccaggatatgcactgggccagagtgtgctcaggcggaaccttgccaggcgcaggatgtgtgctggccctaagcctgctgaggcccaaacctgttcgttctagggttttgtacaaaatcctgctttagcctaaatcctgcttagccttgaccccctcctagacccaagccagatcagcattgttctgaccctactaagtccaaaaccttttgaggccagaccttgtttcaactccaaagcctgctaggttccagcaccccccgcatccctcctcataccacccccttctcccccctatggaaaccgcttgcttatttttcaaacaggccaagtcattatggcagccactgagatctctgtcctttctgagcaattcaccaagatcaaagaactcgagttgatgccggaaaaaggcctgaaggaggaggaaaaagacggagtgtgcagagagaaagaccatcggagccctagtgagttggaggccgagcgtacctctggggccttccaggacagcgtcctggaggaagaagtggagctggtgctggccccctcggaggagagcgagaagtacatcctgaccctgcagacggtgcacttcacttctgaagctgtggagttgcaggatatgagcttgctgagcatacagcagcaagaaggggtgcaggtggtggtgcaacagcctggccctgggttgctgtggcttgaggaagggccccggcagagcctgcagcagtgtgtggccattagtatccagcaagagctgtactccccgcaagagatggaggtgttgcagttccacgctctagaggagaatgtgatggtggccagtgaagacagtaagttagcggtgagcctggctgaaactactggactgatcaagctcgaggaagagcaggagaagaaccagttattggctgaaagaacaaaggagcagctcttttttgtggaaacaatgtcaggagatgaaagaagtgacgaaattgttctcacagtttcaaattcaaatgtggaagaacaagaggatcaacctacagctggtcaagcagatgctgaaaaggccaaatctacaaaaaatcaaagaaagacaaagggagcaaaaggaaccttccactgtgatgtctgcatgttcacctcttctagaatgtcaagttttaatcgtcatatgaaaactcacaccagtgagaagcctcacctgtgtcacctctgcctgaaaaccttccgtacggtcactctgctgcggaaccatgttaacacccacacaggaaccaggccctacaagtgtaacgactgcaacatggcatttgtcaccagtggagaactcgtccgacacaggcgctataaacatactcatgagaaaccctttaaatgttccatgtgcaagtatgccagtgtggaggaacgtcatatgaccgctcacattcgtacccacactggagagaaaccattcacctgcctttcttgcaataaatgtttccgacagaagcaacttctaaacgctcacttcaggaaataccacgatgcaaatttcatcccgactgtttacaaatgctccaagtgtggcaaaggcttttcccgctggattctctgggttgggaactcggaagtggctgaactgggtggtcctggctcagggccactcctgaggctgcagtcaggatgtccgccagggctgcatcatccgaaggctggactggggccagaggatccacttccaggacagctccgccacacaactgctggcaccggcctcagttccttgctacagggacctctctgcagggctgcttgagtgtcctcctgactcagagcaagtgagagagtgcaagtaggaagccatggtgccttttgcagtctagtcctaaaagcggcacaacagccagctgtgggggctcacacctgtaatcccagtacttcgggaggccaaggcaggtggataacttgaggccaggagctcaagaccagcctggccaacatggtgaaaccctgtctctactttaaaaaaaaaaaaagaaaatagctaggcgtggtagtgcacgcttgtaatcccagctacttgggtggttgggacgggaggatcacttgaacccaggagacagaggttgcagtgagctgagattgtgccactggcctccagcctgggcgacagagcaagactctgtctcaaaaaaaaaaaaaaagtggcacattctagtcacaagaaatgaaccatgaagtcccacccacactcgagtggggaatgaagtttcttttgaaaggaacagcatcaaagaatttcaggacatttaaaaaccactgcacatggctagctagatccttggaccatgtaggcttcagcctaactttataaaagttttataaaagttgaatttcctgaagttgactatttttttaaaaatatttcttcttaaaacagtagtgtagttgtgtttttctgagtagcacagtgggatagttctggaatgtcaaccctattagtttaaaatttcaaataaaagctgtggcagtgctcccaaaacaccattgctcatgcaaaaattgtgaagagttaaaattaacgagtagaattctaaagagaaaaaaactgctctttggtgcaagaaataaaaatgtagagaaaagaacaagtctgc

SEQ ID NO: 95059 - DNA, 1452 bp, Artificial Sequence
  derived and/or modified sequence
atggccgccaccgagatcagcgtgctgagcgagcagttcaccaagatcaaggagctggagctgatgcccgagaagggcctgaaggaggaggagaaggacggcgtgtgcagagagaaggaccacagaagccccagcgagctggaggccgagagaaccagcggcgccttccaggacagcgtgctggaggaggaggtggagctggtgctggcccccagcgaggagagcgagaagtacatcctgaccctgcagaccgtgcacttcaccagcgaggccgtggagctgcaggacatgagcctgctgagcatccagcagcaggagggcgtgcaggtggtggtgcagcagcccggccccggcctgctgtggctggaggagggccccagacagagcctgcagcagtgcgtggccatcagcatccagcaggagctgtacagcccccaggagatggaggtgctgcagttccacgccctggaggagaacgtgatggtggccagcgaggacagcaagctggccgtgagcctggccgagaccaccggcctgatcaagctggaggaggagcaggagaagaaccagctgctggccgagagaaccaaggagcagctgttcttcgtggagaccatgagcggcgacgagagaagcgacgagatcgtgctgaccgtgagcaacagcaacgtggaggagcaggaggaccagcccaccgccggccaggccgacgccgagaaggccaagagcaccaagaaccagagaaagaccaagggcgccaagggcaccttccactgcgacgtgtgcatgttcaccagcagcagaatgagcagcttcaacagacacatgaagacccacaccagcgagaagccccacctgtgccacctgtgcctgaagaccttcagaaccgtgaccctgctgagaaaccacgtgaacacccacaccggcaccagaccctacaagtgcaacgactgcaacatggccttcgtgaccagcggcgagctggtgagacacagaagatacaagcacacccacgagaagcccttcaagtgcagcatgtgcaagtacgccagcgtggaggagagacacatgaccgcccacatcagaacccacaccggcgagaagcccttcacctgcctgagctgcaacaagtgcttcagacagaagcagctgctgaacgcccacttcagaaagtaccacgacgccaacttcatccccaccgtgtacaagtgcagcaagtgcggcaagggcttcagcagatggatcctgtgggtgggcaacagcgaggtggccgagctgggcggccccggcagcggccccctgctgagactgcagagcggctgcccccccggcctgcaccaccccaaggccggcctgggccccgaggaccccctgcccggccagctgagacacaccaccgccggcaccggcctgagcagcctgctgcagggccccctgtgcagagccgcctag

SEQ ID NO: 95060 - DNA, 2023 bp, Artificial Sequence
  derived and/or modified sequence
ggctgcagcacgcggtgcacgaggcagagcccacaagccaaagacggagtgggccgagcattccggccacgccttccgcggagcaaaaggaaccttccactgtgatgtctgcatgttcacctcttctagaatgtcaagttttaatcgtcatatgaaaactcacaccagtgagaagcctcacctgtgtcacctctgcctgaaaaccttccgtacggtcactctgctgcggaaccatgttaacacccacacaggaaccaggccctacaagtgtaacgactgcaacatggcatttgtcaccagtggagaactcgtccgacacaggcgctataaacatactcatgagaaaccctttaaatgttccatgtgcaagtatgccagtgtggaggcaagtaaattgaagcgccatgtccgatcccacactggggagcgcccctttcagtgttgccagtgcagctatgccagcagagatacctacaagctgaaacgccacatgagaacgcactcaggtgagaagccttacgaatgccacatctgccacacccgcttcacccagagcgggaccatgaaaatacatattctgcagaaacacggcgaaaatgtccccaaataccagtgtccccattgtgccaccatcattgcacggaaaagcgacctacgtgtgcatatgcgcaacttgcatgcttacagcgctgcagagctgaaatgccgctactgttctgctgtcttccatgaacgctatgccctcattcagcaccagaaaactcataagaatgagaagaggttcaagtgcaaacactgcagttatgcctgcaagcaggaacgtcatatgaccgctcacattcgtacccacactggagagaaaccattcacctgcctttcttgcaataaatgtttccgacagaagcaacttctaaacgctcacttcaggaaataccacgatgcaaatttcatcccgactgtttacaaatgctccaagtgtggcaaaggcttttcccgctggattaacctgcacagacattcggagaagtgtggatcaggggaagcaaagtcggctgcttcaggaaagggaagaagaacaagaaagaggaagcagaccatcctgaaggaagccacaaagggtcagaaggaagctgcgaagggatggaaggaagccgcgaacggagacggtgtgatctcagctcaccgcaacctctgcctcctgggttcaagtgattctcatgcctcagtctccggagctgggattacagatgcccgccaccacgcctggctaattgttctattatttttagtagagatggggttttaccatgtctctcactcctgacctcaagtgatctgcccgcctcggcctcccaaagtggtgggattacaggcatgagcccctgtgcctggcctgatggcaccagttttgtggatctcagtgtttcttttcatatccaagaactgggtcttcttgtctccctccatccaccaaaaaaaaaaaaaaaaaaatacttcaaggaagcatggacaaaaatatcctcagacaagttagaacatgagacagtcacgttcttcagtgtggcgctctgtggatgtttgggaaagtaatttggaaaatgagtagagcagggctccccaaccccccagccgtggacctgtgggctgttaggaactgggcctcccagcaggaggtgagcagtgggtgagggagtgaagctttgtattgacagccgctccccatcgggcgcatcaccgcctgagctccgcctcctgtcagatcagcggcagcgttagattctcatgagtgtgaaccctgttgtgaactctgcacgtgcaagggatctaggctgcacactccttacgagaatctaatgcccgacgatctgtcactgtctcccatcacccccagatgggactgtctagatgcaggaaaacaagcccagggctcccactgattctacattatggtgagctgtataattatttcattatatatcacaatgtaataataaaaataaagtacataagaaatgtaatgtgc

SEQ ID NO: 95061 - DNA, 300 bp, Artificial Sequence
  derived and/or modified sequence
atgtgggagcactggctgggcgacagcggcgtgggcctgctgatgagactgagaagcgacgtgagccaggtgtgcctgcagctgaacgcctgcgtggaggtggaggaccccctgcccggctggctgacccactgcctgcccggcagagccggctgctggtgggaggccagcgtgcccttccacggctgcttccagtacagctgcggcatcccccccgagcaggtgatgaaggagaacaaggccgaggccgccgtgctgttcaccgccagcttcagaagccacgtgcccagcgacctgtag

SEQ ID NO: 95062 - DNA, 300 bp, Artificial Sequence
  derived and/or modified sequence
atgtgggagcactggcttggggattctggagtgggactgcttatgcgattgaggagcgatgtaagccaggtgtgtttgcagctgaacgcctgcgtcgaggtggaggacccacttccgggatggttaacccactgcttgcctggacgcgctggctgctggtgggaggctagtgtccccttccacgggtgtttccagtactcgtgtggcatcccccccgagcaagttatgaaggagaataaagccgaggccgcagtattgtttacagcttccttccggtcccatgttccctccgacctttag

SEQ ID NO: 95063 - DNA, 300 bp, Artificial Sequence
  derived and/or modified sequence
atgtgggaacactggcttggcgacagtggagttgggttgctgatgcggctgcgatccgacgtctcccaggtgtgccttcagcttaacgcctgcgtggaggtcgaggatcctttgcctgggtggcttacacactgcctaccaggacgggcaggctgctggtgggaggcctcggtgcctttccatggatgtttccagtactcctgtgggattccacctgagcaggttatgaaggaaaataaggcggaggcagctgtgctttttactgcgagcttccggtcacacgttccctctgacctgtag

SEQ ID NO: 95064 - DNA, 1269 bp, Artificial Sequence
  derived and/or modified sequence
atgtccggggacgagcgatcagacgagatagtcctcaccgtctctaattccaatgttgaggaacaggaagatcagccgaccgccggccaggcggacgctgagaaggcgaagagcacaaaaaaccaacgcaagacaaaaggtgccaagggcacgtttcactgcgatgtgtgcatgttcacctcttcacggatgtcatcttttaatcgccatatgaaaacccacacctcagagaaaccacatctgtgtcacttatgcctgaaaacatttcgaacggtcaccttactacggaaccatgtgaatactcataccgggacccgaccttacaagtgcaacgattgtaatatggccttcgtcactagtggagagctggtgaggcacagacgatacaagcacacgcatgagaaaccttttaagtgtagcatgtgtaaatacgctagtgttgaagccagtaagctgaagaggcacgtgaggtcccacaccggcgagcgaccatttcagtgttgccaatgctcttacgcatctcgggatacgtacaaattaaagcgacacatgcggacacattctggggaaaagccttatgaatgccacatctgtcacacccgtttcactcagtctggcactatgaaaattcacatcctgcaaaagcacggcgagaacgtgccaaagtaccaatgtccccactgcgcgaccattatcgcccgcaaatcagaccttcgcgtgcacatgagaaacctccacgcttactcagctgcagagctcaagtgtagatattgcagcgccgtcttccacgagcgctacgcgctcatccaacatcagaaaacccataaaaatgagaaaaggttcaagtgcaagcactgcagttatgcttgtaagcaggaaagacatatgactgcacatattcgcacacatacgggtgagaaaccttttacctgcctcagctgtaacaaatgtttccgtcagaagcaactcctgaatgcacattttcggaaatatcatgatgcaaactttatccccacagtgtataaatgtagcaagtgtggaaagggatttagtcgttggattctctgggtgggcaatagtgaggtcgccgagcttggagggcccgggtcaggccccttgcttcggcttcagtcaggctgtccgcctgggttacatcatcccaaagccggactaggtccagaggacccattgcccggacagttacgccacaccacagccggtacaggattgtctagcttgctacagggaccgctgtgccgggcagcttag

SEQ ID NO: 95065 - DNA, 1269 bp, Artificial Sequence
  derived and/or modified sequence
atgtctggagatgagaggagtgatgagatcgtgctgactgtgagcaacagcaatgtggaggagcaggaggaccagcccacagctggccaggctgatgctgagaaggccaagagcaccaagaaccagaggaagaccaagggggccaagggcaccttccactgtgatgtgtgcatgttcaccagcagcaggatgagcagcttcaacagacacatgaagacccacaccagcgagaagccccacctgtgccacctgtgcctgaagaccttcagaacagtgaccctgctgaggaaccacgtgaacacccacacaggcacccggccctacaagtgcaatgactgcaacatggcctttgtgaccagcggggagctggtgcgccaccggcgctacaagcacacccatgagaagcccttcaagtgcagcatgtgcaagtatgcctctgtggaggccagcaagctgaagagacatgtgcgcagccacactggagagcggcccttccagtgctgccagtgcagctatgccagccgggacacctacaagctgaagaggcacatgaggacccacagcggggagaagccctatgagtgccacatctgccacacccgcttcacccagagcggcaccatgaagatccacatcctgcagaagcacggggagaatgtgcccaagtaccagtgcccccactgtgccaccatcatcgccaggaagagtgacctgcgggtgcacatgaggaacctgcacgcctacagcgctgctgagctgaagtgccgctactgcagcgctgtgttccacgagagatatgccctgatccagcaccagaagacccacaagaatgagaagcgcttcaagtgcaagcactgcagctatgcctgcaagcaggagcggcacatgacagcccacatccgcacccacactggagagaagcccttcacctgcctgagctgcaacaagtgcttccggcagaagcagctgctgaatgcccacttcaggaagtaccatgatgccaacttcatccccaccgtgtacaagtgcagcaaatgtgggaagggcttcagccgctggatcctgtgggtgggcaacagcgaggtggccgagctgggcggccctggcagcggccccctgctgcggctgcagagcggctgccccccaggcctgcaccaccccaaggccggcctgggccctgaggaccccctgcccggccagctgcggcacaccacagctggcaccggcctgagcagcctgctgcagggccccctgtgcagagctgcctag

SEQ ID NO: 95066 - DNA, 1269 bp, Artificial Sequence
  derived and/or modified sequence
atgagcggcgacgagcggagcgacgagatcgtgctgaccgtgagcaactcgaatgttgaagagcaggaggatcagccgacggctggacaagcagatgccgaaaaggccaaaagcacaaagaatcaacggaagaccaagggtgcaaaagggacctttcactgcgacgtgtgtatgttcacttccagtaggatgtctagctttaatagacacatgaagacgcatacgtcagaaaagccccacctctgtcacctgtgcctcaagacgtttcggacggtaacactgttgagaaaccacgtgaatacccacactggcacacggccttacaaatgtaacgactgcaacatggcctttgtgacaagtggcgagctagtacgccacagaaggtataaacacactcacgagaagccctttaaatgcagcatgtgtaagtatgcaagcgttgaggcttctaagctaaaacgccacgtccggtcccataccggggaacggccttttcaatgctgtcagtgctcgtatgcttcaagggacacttacaagctgaagagacacatgagaacgcacagcggcgagaagccctacgagtgccatatctgtcatacccggtttacacaaagtggaacgatgaagatccatattcttcagaagcacggggaaaatgtccccaagtaccagtgccctcattgcgctacaataattgccagaaagagtgatttgagagtgcatatgcggaatctgcatgcctatagcgctgcagagctgaagtgcagatactgtagcgccgtgtttcatgagcggtatgcgctcatccagcaccaaaagacccataaaaacgaaaagcgatttaagtgtaaacactgctcttacgcttgcaaacaggagagacatatgacagcacatatacggacccacacaggcgagaaaccttttacttgtctgtcatgcaataagtgcttccgccaaaagcaactgcttaacgctcactttcggaaatatcacgatgccaacttcattccaactgtgtataagtgttccaaatgcggcaagggcttctctagatggatcctgtgggtaggcaactccgaagttgcagagctggggggtcccgggtcgggacccctgttgcggctgcagtccggctgccctccaggtctccatcacccaaaagcagggctcgggccggaggacccccttcccggtcagctcagacatactacagcaggaaccggcctgtctagtctgctgcagggccccctgtgtcgcgccgcatag

SEQ ID NO: 95067 - DNA, 1269 bp, Artificial Sequence
  derived and/or modified sequence
atgtcgggagacgagcgatcagatgagatagtactgactgtctccaatagcaatgtggaagagcaggaagatcagccaaccgctggtcaggctgacgcagaaaaggccaagagcacaaaaaatcaaaggaaaacgaaaggcgctaaggggacttttcactgtgacgtatgtatgttcacgtcctcgcggatgagctcctttaaccgccacatgaaaactcatacctctgaaaaaccccatctgtgtcatctgtgcttaaagacatttaggaccgtgacattgttacggaaccatgtcaacacacatacaggtacacgcccatataagtgtaacgactgcaacatggcttttgtgacaagtggagaactcgtcagacaccggcgttacaagcatacccatgagaagcccttcaaatgtagcatgtgcaaatatgcctcagtcgaggctagtaagctgaaacgacacgtcagaagccatactggcgagcgcccatttcagtgctgccagtgttcttatgcgagcagagacacttacaagcttaaaagacatatgagaactcacagcggggaaaagccgtacgaatgccatatctgtcacacgcggtttacccagtcaggcactatgaagatccacattctccagaaacacggggagaatgtcccaaagtatcagtgcccccactgcgccacgataatcgctcgcaagagcgaccttagagtgcatatgcgaaaccttcatgcctattctgccgctgaattaaagtgtcgctattgtagtgctgtatttcacgaacgttacgctctgatccagcaccaaaaaactcacaagaatgagaaacgctttaaatgtaagcattgttcctacgcctgtaaacaggagcggcatatgacagcacatatccggacccacactggtgaaaagccttttacctgcctcagctgcaacaaatgttttaggcagaagcagctgctgaacgcacacttccgtaagtaccacgacgcgaactttataccaactgtctataagtgtagtaaatgtggcaaaggcttctctcgatggatattatgggtggggaattctgaggtcgccgagctaggagggcctgggagtggaccccttctccgcctacagtctggttgccccccagggctccatcatcccaaggccggtctggggcctgaagatccacttcccggacaattgagacatacaaccgctggtaccggcctttcaagcctcctccagggacctctctgcagggcggcttag

SEQ ID NO: 95068 - DNA, 1269 bp, Artificial Sequence
  derived and/or modified sequence
atgagcggcgacgagagaagcgacgagatcgtgctgaccgtgagcaacagcaacgtggaggagcaggaggaccagcccaccgccggccaggccgacgccgagaaggccaagagcaccaagaaccagagaaagaccaagggcgccaagggcaccttccactgcgacgtgtgcatgttcaccagcagcagaatgagcagcttcaacagacacatgaagacccacaccagcgagaagccccacctgtgccacctgtgcctgaagaccttcagaaccgtgaccctgctgagaaaccacgtgaacacccacaccggcaccagaccctacaagtgcaacgactgcaacatggccttcgtgaccagcggcgagctggtgagacacagaagatacaagcacacccacgagaagcccttcaagtgcagcatgtgcaagtacgccagcgtggaggccagcaagctgaagagacacgtgagaagccacaccggcgagagacccttccagtgctgccagtgcagctacgccagcagagacacctacaagctgaagagacacatgagaacccacagcggcgagaagccctacgagtgccacatctgccacaccagattcacccagagcggcaccatgaagatccacatcctgcagaagcacggcgagaacgtgcccaagtaccagtgcccccactgcgccaccatcatcgccagaaagagcgacctgagagtgcacatgagaaacctgcacgcctacagcgccgccgagctgaagtgcagatactgcagcgccgtgttccacgagagatacgccctgatccagcaccagaagacccacaagaacgagaagagattcaagtgcaagcactgcagctacgcctgcaagcaggagagacacatgaccgcccacatcagaacccacaccggcgagaagcccttcacctgcctgagctgcaacaagtgcttcagacagaagcagctgctgaacgcccacttcagaaagtaccacgacgccaacttcatccccaccgtgtacaagtgcagcaagtgcggcaagggcttcagcagatggatcctgtgggtgggcaacagcgaggtggccgagctgggcggccccggcagcggccccctgctgagactgcagagcggctgcccccccggcctgcaccaccccaaggccggcctgggccccgaggaccccctgcccggccagctgagacacaccaccgccggcaccggcctgagcagcctgctgcagggccccctgtgcagagccgcctag

SEQ ID NO: 95069 - DNA, 1212 bp, Artificial Sequence
  derived and/or modified sequence
atgtttaccagcagtcggatgtcttccttcaatcggcatatgaagactcacactagtgaaaagccccatctgtgccatctctgccttaagacgttccgtaccgttacactcttgagaaatcacgtgaacacccatactggcaccagaccatataagtgtaacgactgtaacatggcttttgtcacatccggcgagctagtccggcacaggcggtataagcacacccacgagaaaccttttaagtgctctatgtgcaaatatgcctcagtggaagcctcaaaactcaagcggcatgtgaggtcccatacaggggaaaggcctttccagtgctgccagtgtagttacgctagccgggatacatacaagctcaaaagacatatgcgcacccattctggtgaaaagccttatgagtgtcacatttgccatactagatttacgcagagcggcactatgaaaatccacatcctgcagaagcacggcgaaaacgtgcctaagtatcagtgtcctcattgcgccaccatcatcgctagaaaatccgacctccgcgtgcacatgcgtaacctgcatgcttatagcgctgcggaactgaagtgccgatattgcagtgccgttttccacgagaggtacgcgctgattcagcatcaaaaaacccataagaacgaaaaacgcttcaaatgcaagcattgtagctacgcgtgtaaacaggaacggcacatgaccgctcacatacggacgcacaccggagaaaagccttttacttgcctgtcctgcaataagtgtttccgtcaaaagcagttactgaatgcccattttaggaagtatcacgatgccaacttcataccaaccgtgtacaagtgttcaaagtgcgggaaggggttctcacgttggattaacctgcaccgtcacagcgagaaatgcggtagtggggaggcaaagtccgcagcctcaggcaagggcagacggactagaaagcgcaagcagactatcttgaaagaggctaccaaggggcagaaggaagccgccaaggggtggaaagaggctgccaatggggacggcgtaatttccgcccataggaatctgtgtttgcttggtagttccgatagtcacgcgtccgtgagcggcgccggcattacagacgctagacatcacgcctggctaatagtcttactcttcctggtcgaaatgggattttatcatgtgagccatagctag

SEQ ID NO: 95070 - DNA, 1212 bp, Artificial Sequence
  derived and/or modified sequence
atgttcaccagcagcaggatgagcagcttcaacagacacatgaagacccacaccagcgagaagccccacctgtgccacctgtgcctgaagaccttcagaacagtgaccctgctgagaaatcatgtgaacacccacacaggcacccggccctacaagtgcaatgactgcaacatggcctttgtgaccagcggggagctggtgcgccaccggcgctacaagcacacccatgagaagcccttcaagtgcagcatgtgcaagtatgcctctgtggaggccagcaagctgaagagacatgtgcgcagccacactggagagcggcccttccagtgctgccagtgcagctatgccagccgggacacctacaagctgaagaggcacatgaggacccacagcggggagaagccctatgagtgccacatctgccacacccgcttcacccagagcggcaccatgaagatccacatcctgcagaagcatggagaaaatgtgcccaagtaccagtgcccccactgtgccaccatcatcgccaggaagagtgacctgcgggtgcacatgaggaacctgcacgcctacagcgctgctgagctgaagtgccgctactgcagcgctgtgttccacgagagatatgccctgatccagcaccagaagacccacaagaatgagaagcgcttcaagtgcaagcactgcagctatgcctgcaagcaggagcggcacatgacagcccacatccgcacccacactggagagaagcccttcacctgcctgagctgcaacaagtgcttccggcagaagcagctgctgaatgcccacttcaggaagtaccatgatgccaacttcatccccaccgtgtacaagtgcagcaaatgtgggaagggcttcagccgctggatcaacctgcaccgccacagcgagaagtgtggcagcggggaggccaagtctgctgccagcggcaagggccgccgcaccaggaagaggaagcagaccatcctgaaggaggccaccaagggccagaaggaggccgccaagggctggaaggaggccgccaatggagatggagtcatcagcgcccacaggaacctgtgcctgctgggcagcagtgacagccacgcctctgtgtctggagctggcatcacagatgcccggcaccacgcctggctgattgtgctgctcttcctggtggagatgggcttctaccacgtgagccacagctag

SEQ ID NO: 95071 - DNA, 1212 bp, Artificial Sequence
  derived and/or modified sequence
atgttcaccagcagccggatgagcagcttcaaccggcacatgaagacccatacttcagagaaaccacacctgtgtcacctttgtttgaagactttccggaccgttactctgttgcggaatcacgtgaacactcacacaggcacacggccatataagtgcaatgactgtaatatggcttttgtgaccagcggagagcttgtccgacatcgtaggtataagcatacgcacgagaagccatttaagtgtagtatgtgcaagtatgcttctgtggaagcctcgaagctcaaacggcacgtacggtctcatactggggagagaccatttcagtgttgccagtgctcctatgcctcaagagatacttataagctgaagcggcatatgaggacgcattctggagaaaaaccatatgagtgtcacatttgtcatacccgtttcactcagtccgggaccatgaagatccacatcctgcagaaacacggtgagaatgtacctaaataccaatgccctcactgtgccacgataatcgctcgcaaatcagacctgagagttcacatgagaaatctgcatgcctatagtgcggccgaattgaagtgccggtactgttccgccgtgttccacgaacggtatgcattaatccaacatcagaagacccataaaaacgagaaacgattcaaatgcaaacattgctcttatgcctgcaaacaggagagacatatgactgcacacattcgtactcacacaggagagaagccctttacctgcctctcttgcaataaatgctttcggcaaaagcaactcctgaatgctcattttagaaaatatcacgatgccaacttcatcccaacagtctacaaatgctccaaatgcgggaaagggttctctaggtggattaatctccatagacactctgaaaaatgcgggtctggagaagccaaatcagccgccagcgggaaggggcggcggaccaggaagagaaaacagacaatcctcaaagaagcaaccaaaggacaaaaggaggccgccaagggctggaaggaagccgccaacggtgatggcgtgatcagtgctcatcggaacctgtgtctgctgggctcatcagacagccatgctagcgtctccggagcgggcataacggacgcccgccaccatgcgtggctgatcgtgctgctgttccttgtggagatggggttctaccacgtcagccattcatag

SEQ ID NO: 95072 - DNA, 1212 bp, Artificial Sequence
  derived and/or modified sequence
atgttcaccagcagccgaatgagcagcttcaaccgacatatgaagacacatacgtccgagaaacctcacttgtgccacctctgtctgaaaacttttagaacagtcacgcttctcagaaatcatgtcaacactcatacaggcactcgaccatataaatgtaatgactgcaatatggcctttgtgacaagcggggaactagtccggcaccgacgctacaaacatacccacgaaaagcctttcaaatgctctatgtgtaaatacgcttcagtggaagcctctaaacttaagaggcacgtgcgtagccacacaggggaacgtccattccagtgctgtcaatgttcatacgccagtagagacacatacaagctgaaaagacacatgcggactcattctggagagaagccatacgaatgccacatctgtcatacacgattcacacagtccggtaccatgaagatacatattctgcaaaagcacggagagaatgtgcccaaatatcagtgtccccattgtgctacaatcattgccagaaagtcagacttacgcgtccacatgcggaatctgcatgcttatagtgctgcagaactgaagtgtagatactgctctgccgtgtttcatgagagatatgctctgattcagcaccagaaaactcataagaatgagaagagatttaagtgcaagcattgctcttacgcttgcaagcaggagcggcatatgacagcccacatccgcactcacaccggtgagaagccttttacctgcctgagctgtaacaagtgttttcggcagaaacagctcttaaatgctcattttcgaaagtaccacgacgcgaactttattcctactgtatataaatgcagtaagtgtggaaaaggcttttctaggtggatcaacctgcatcgacattcagagaagtgcggctcaggcgaggccaagtctgctgcttcaggtaaaggcaggcggacccggaagcgtaaacagaccatccttaaggaggcgactaaagggcagaaagaggctgcgaagggctggaaagaggcagcgaatggagacggcgttatttctgctcatcgcaacctctgccttttgggaagcagcgattcccacgcctcagtgagcggagcagggatcaccgacgcacggcatcatgcctggctcatcgtactgttatttctggtggagatgggtttttatcacgtgagccattcttag

SEQ ID NO: 95073 - DNA, 1212 bp, Artificial Sequence
  derived and/or modified sequence
atgttcaccagcagcagaatgagcagcttcaacagacacatgaagacccacaccagcgagaagccccacctgtgccacctgtgcctgaagaccttcagaaccgtgaccctgctgagaaaccacgtgaacacccacaccggcaccagaccctacaagtgcaacgactgcaacatggccttcgtgaccagcggcgagctggtgagacacagaagatacaagcacacccacgagaagcccttcaagtgcagcatgtgcaagtacgccagcgtggaggccagcaagctgaagagacacgtgagaagccacaccggcgagagacccttccagtgctgccagtgcagctacgccagcagagacacctacaagctgaagagacacatgagaacccacagcggcgagaagccctacgagtgccacatctgccacaccagattcacccagagcggcaccatgaagatccacatcctgcagaagcacggcgagaacgtgcccaagtaccagtgcccccactgcgccaccatcatcgccagaaagagcgacctgagagtgcacatgagaaacctgcacgcctacagcgccgccgagctgaagtgcagatactgcagcgccgtgttccacgagagatacgccctgatccagcaccagaagacccacaagaacgagaagagattcaagtgcaagcactgcagctacgcctgcaagcaggagagacacatgaccgcccacatcagaacccacaccggcgagaagcccttcacctgcctgagctgcaacaagtgcttcagacagaagcagctgctgaacgcccacttcagaaagtaccacgacgccaacttcatccccaccgtgtacaagtgcagcaagtgcggcaagggcttcagcagatggatcaacctgcacagacacagcgagaagtgcggcagcggcgaggccaagagcgccgccagcggcaagggcagaagaaccagaaagagaaagcagaccatcctgaaggaggccaccaagggccagaaggaggccgccaagggctggaaggaggccgccaacggcgacggcgtgatcagcgcccacagaaacctgtgcctgctgggcagcagcgacagccacgccagcgtgagcggcgccggcatcaccgacgccagacaccacgcctggctgatcgtgctgctgttcctggtggagatgggcttctaccacgtgagccacagctag

SEQ ID NO: 95074 - protein, 308 aa, Artificial Sequence
  derived and/or modified sequence
MAVTITLKTLQQQTFKIRMEPDETVKVLKEKIEAEKGRDAFPVAGQKLIYAGKILSDDVPIRDYRIDEKNFVVVMVTKTKAGQGTSAPPEASPTAAPESSTSFPPAPTSGMSHPPPAAREDKSPSEESAPTTSPESVSGSVPSSGSSGREEDAASTLVTGSEYETMLTEIMSMGYERERVVAALRASYNNPHRAVEYLLTGIPGSPEPEHGSVQESQVSEQPATEAAGENPLEFLRDQPQFQNMRQVIQQNPALLPALLQQLGQENPQLLQLKALGFPESLVIQAYFACEKNENLAANFLLSQNFDDE

SEQ ID NO: 95075 - DNA, 927 bp, Artificial Sequence
  derived and/or modified sequence
atggccgtgaccatcaccctgaagaccctgcagcagcagaccttcaagatcagaatggagcccgacgagaccgtgaaggtgctgaaggagaagatcgaggccgagaagggcagagacgccttccccgtggccggccagaagctgatctacgccggcaagatcctgagcgacgacgtgcccatcagagactacagaatcgacgagaagaacttcgtggtggtgatggtgaccaagaccaaggccggccagggcaccagcgccccccccgaggccagccccaccgccgcccccgagagcagcaccagcttcccccccgcccccaccagcggcatgagccaccccccccccgccgccagagaggacaagagccccagcgaggagagcgcccccaccaccagccccgagagcgtgagcggcagcgtgcccagcagcggcagcagcggcagagaggaggacgccgccagcaccctggtgaccggcagcgagtacgagaccatgctgaccgagatcatgagcatgggctacgagagagagagagtggtggccgccctgagagccagctacaacaacccccacagagccgtggagtacctgctgaccggcatccccggcagccccgagcccgagcacggcagcgtgcaggagagccaggtgagcgagcagcccgccaccgaggccgccggcgagaaccccctggagttcctgagagaccagccccagttccagaacatgagacaggtgatccagcagaaccccgccctgctgcccgccctgctgcagcagctgggccaggagaacccccagctgctgcagctgaaggccctgggcttccccgagagcctggtgatccaggcctacttcgcctgcgagaagaacgagaacctggccgccaacttcctgctgagccagaacttcgacgacgagtag

SEQ ID NO: 95076 - DNA, 927 bp, Artificial Sequence
  derived and/or modified sequence
atggccgttactattacattgaagacgctgcagcagcaaacatttaagattcggatggagcctgacgagaccgtcaaggtactgaaggagaaaatcgaggccgagaagggtcgcgatgcattcccggtggctgggcagaaactcatctatgctggaaagattctgagcgatgatgtgcccatacgcgattatcgcatcgatgagaagaactttgtcgttgtaatggtgacaaagactaaggctgggcaaggaacctccgcaccccctgaggcgtcaccaactgcggcccctgaatcatcaacctcatttcctcccgcacccacttcagggatgtcacacccaccgcccgcagcaagagaggacaaatcaccaagtgaagagtcagccccaacaaccagcccggaatctgttagcggctctgtgccttcgagtgggtcttccgggagagaagaggatgccgcctctaccctcgtgacaggctccgagtatgaaaccatgctcaccgaaattatgtccatgggctatgaaagggagcgggtcgtggcggctctgcgcgcaagctacaacaacccacacagggcggttgaatatctattgaccggaatcccaggatcgcccgaacccgaacacggatccgtgcaggagagccaggtctctgaacaacccgctactgaagccgcaggagaaaatcccctggagttcctccgcgatcagccccagtttcagaatatgagacaggtcattcagcaaaaccccgctctcttgccggccctcctgcagcagctcggtcaagagaatccacaactgctgcagctgaaggctttagggttcccagaaagtcttgtcatccaggcttacttcgcctgcgagaagaacgaaaaccttgcagccaactttcttttgtcccaaaacttcgacgatgagtag

SEQ ID NO: 95077 - DNA, 927 bp, Artificial Sequence
  derived and/or modified sequence
atggctgtgaccatcaccctgaagaccctgcagcagcagaccttcaagatccgcatggagccagatgagaccgtgaaggtgctgaaggagaagattgaggccgagaagggcagagatgccttccctgtggccggccagaagctgatctatgccggcaagatcctgagtgatgatgtgcccatccgggactacagaattgatgagaagaactttgtggtggtgatggtgaccaagaccaaggccggccagggcaccagcgcccctcctgaggccagccccacagctgcccctgagagcagcaccagcttccccccagcccccaccagcggcatgagccaccccccacctgctgcccgggaggacaagagccccagcgaggagagcgcccccaccaccagccctgagagcgtgtctggctctgtgcccagcagcggcagcagcggccgggaggaggatgctgccagcaccctggtgactggaagtgaatatgagaccatgctgacagagatcatgtccatgggctatgagcgggagcgggtggtggccgccctgcgggccagctacaacaacccccacagagctgtggagtacctgctgaccggcatccctggcagccctgagcctgagcacggctctgtgcaggagagccaggtgtctgagcagcctgccacagaggccgccggggagaaccccctggagttcctgcgggaccagccccagttccagaacatgaggcaggtgatccagcagaacccagccctgctgcctgccctgctgcagcagctgggccaggagaacccccagctgctgcagctgaaggccctgggcttccctgagagcctggtgatccaggcctactttgcctgtgagaagaatgaaaacctggccgccaacttcctgctgagccagaactttgatgatgaatag

SEQ ID NO: 95078 - DNA, 927 bp, Artificial Sequence
  derived and/or modified sequence
atggccgtgaccatcaccctgaagaccctgcagcagcagaccttcaagatcagaatggagcccgacgagactgtcaaggtgctgaaggagaagattgaggcagagaagggtagagacgcgttccctgtggccgggcaaaaacttatctacgcagggaaaatcctgtctgatgatgtgccaattcgggattaccggattgatgagaaaaactttgttgtggtgatggtgactaagaccaaggccggccaaggtacttccgcccctccagaggcttccccgaccgctgccccagagagttccactagcttccctccagccccaacatcaggcatgagccacccacctcctgctgcaagagaagacaaaagcccaagtgaggaatcagccccaaccactagcccagagtctgttagcggctccgtgccctcctctggcagttcgggaagagaagaggacgcggcttctacacttgtcactggaagtgaatacgaaactatgctcacagagatcatgagcatgggctatgaaagggagagggttgtcgccgccttgagggcaagttacaataaccctcaccgggcagtggagtacctcctgaccgggatacccgggagccccgagcctgagcacgggtccgtccaagagtcacaagtgtcggaacagcctgcaacagaagctgcaggtgaaaatccattggagttcttgcgcgaccagcctcagttccaaaatatgagacaggttatccagcagaatcctgccctattgccagctctgttgcaacagctggggcaagaaaatcctcaactgctccagctcaaggcgctcggcttcccagaatctctggtgatccaagcctactttgcttgcgaaaagaatgagaacctggccgcaaattttctgttgtcccagaacttcgatgatgaatag

SEQ ID NO: 95079 - DNA, 927 bp, Artificial Sequence
  derived and/or modified sequence
atggctgtgacaattaccctgaaaactctccagcagcaaacatttaaaataaggatggaaccagatgagacggtgaaggtgctcaaagagaagattgaggcagagaaaggaagagatgcctttcctgtagctggacagaagcttatatatgcaggaaagattctcagtgatgatgtcccaattcgcgattaccggatagatgaaaaaaactttgtggtcgtgatggtgactaagacgaaggcgggacagggaacgtccgctccaccagaggcatcccctacagctgcacctgagtcctctaccagctttccccctgccccaacgtcaggaatgagccaccctccgccagccgcacgggaggataaatctccaagcgaggaaagcgctcccacgacatcgcccgaaagtgtgtcaggatctgttccatcatccggctcatcaggccgagaagaagacgcagcttctacactggttacaggatcagaatacgagactatgctgacagagatcatgtccatgggctatgagcgtgaaagagtcgtggctgcactgagggcttcttataataaccctcaccgcgctgtggagtacctgctcacggggatccctggttccccggagcctgagcatgggtccgtccaggaaagtcaggtgtcagagcaacccgctacagaggcggctggtgagaacccgcttgagtttttgcgagatcagccccagttccagaacatgcgacaggtaatacagcagaatcccgcacttcttccggcattactacaacagttaggccaggaaaaccctcagttactgcagctaaaggccctcggattccccgaaagcctcgttatccaagcttacttcgcctgtgaaaagaacgaaaatttagctgccaattttctgcttagtcagaactttgacgatgagtag

SEQ ID NO: 95080 - DNA, 1526 bp, Artificial Sequence
  derived and/or modified sequence
gcgtgagttgcatgttgtgtgaggatcccggggccgccgcgtcgctcgggccccgccatggccgtcaccatcacgctcaaaacgctgcagcagcagaccttcaagatccgcatggagcctgacgagacggtgaaggtgctaaaggagaagatagaagctgagaagggtcgtgatgccttccccgtggctggacagaaactcatctatgccggcaagatcttgagtgacgatgtccctatcagggactatcgcatcgatgagaagaactttgtggtcgtcatggtgaccaagaccaaagccggccagggtacctcagcacccccagaggcctcacccacagctgccccagagtcctctacatccttcccgcctgcccccacctcaggcatgtcccatcccccacctgccgccagagaggacaagagcccatcagaggaatccgcccccacgacgtccccagagtctgtgtcaggctctgttccctcttcaggtagcagcgggcgagaggaagacgcggcctccacgctagtgacgggctctgagtatgagacgatgctgacggagatcatgtccatgggctatgagcgagagcgggtcgtggccgccctgagagccagctacaacaacccccaccgagccgtggagtatctgctcacgggaattcctgggagccccgagccggaacacggttctgtccaggagagccaggtatcggagcagccggccacggaagcagcaggagagaaccccctggagttcctgcgggaccagccccagttccagaacatgcggcaggtgattcagcagaaccctgcgctgctgcccgccctgctccagcagctgggccaggagaaccctcagcttttacagttgaaggccctgggcttcccagagagcctggtcatccaggcctatttcgcgtgtgaaaaaaatgagaacttggctgccaacttcctcctgagtcagaactttgatgacgagtgatgccaggaagccaggccaccgaagcccccaccctacccttattccatgaaagttttataaaagaaaaaatatatatatattcatgtttatttaagaaatggaaaaaaaaatcaaaaatcttaaaaaaacaagcaaacagtccagcttcctgtcctcctaaagtggcccctgttcccatctcccgggccagacagctgtccccccgtcctcctccccagcccagcctgctcagagaagctggcaggactgggaggcgacagatgggcccctcttggcctctgtcccagctctctgcagccagacggaaaggcggctgcttgcctctccatcctccgaaaaacccctgaggacccccccccatcctcttctaggatgaggggaagctggagccccaactttgatcctccattggagtggcccaaatctttccatctagggcaagtcctgaaaggcccaaggccccctccccagtctggccttggcctccagcctggagaagggctaacatcagctcattgtcaaggccacccccaccccagaac

SEQ ID NO: 95081 - protein, 912 aa, Artificial Sequence
  derived and/or modified sequence
MAGPSNPPATMKIAVIGQSLFGQEVYCHLRKEGHEVVGVFTVPDKDGKADPLGLEAEKDGVPVFKYSRWRAKGQALPDVVAKYQALGAELNVLPFCSQFIPMEIISAPRHGSIIYHPSLLPRHRGASAINWTLIHGDKKGGFSIFWADDGLDTGDLLLQKECEVLPDDTVSTLYNRFLFPEGIKGMVQAVRLIAEGKAPRLPQPEEGATYEGIQKKETAKINWDQPAEAIHNWIRGNDKVPGAWTEACEQKLTFFNSTLNTSGLVPEGDALPIPGAHRPGVVTKAGLILFGNDDKMLLVKNIQLEDGKMILASNFFKGAASSVLELTEAELVTAEAVRSVWQRILPKVLEVEDSTDFFKSGAASVDVVRLVEEVKELCDGLELENEDVYMASTFGDFIQLLVRKLRGDDEEGECSIDYVEMAVNKRTVRMPHQLFIGGEFVDAEGAKTSETINPTDGSVICQVSLAQVTDVDKAVAAAKDAFENGRWGKISARDRGRLMYRLADLMEQHQEELATIEALDAGAVYTLALKTHVGMSIQTFRYFAGWCDKIQGSTIPINQARPNRNLTLTRKEPVGVCGIIIPWNYPLMMLSWKTAACLAAGNTVVIKPAQVTPLTALKFAELTLKAGIPKGVVNVLPGSGSLVGQRLSDHPDVRKIGFTGSTEVGKHIMKSCAISNVKKVSLELGGKSPLIIFADCDLNKAVQMGMSSVFFNKGENCIAAGRLFVEDSIHDEFVRRVVEEVRKMKVGNPLDRDTDHGPQNHHAHLVKLMEYCQHGVKEGATLVCGGNQVPRPGFFFEPTVFTDVEDHMFIAKEESFGPVMIISRFADGDLDAVLSRANATEFGLASGVFTRDINKALYVSDKLQAGTVFVNTYNKTDVAAPFGGFKQSGFGKDLGEAALNEYLRVKTVTFEY

SEQ ID NO: 95082 - protein, 505 aa, Artificial Sequence
  derived and/or modified sequence
MKIAVIGQSLFGQEVYCHLRKEGHEVVGVFTVPDKDGKADPLGLEAEKDGVPVFKYSRWRAKGQALPDVVAKYQALGAELNVLPFCSQFIPMEIISAPRHGSIIYHPSLLPRHRGASAINWTLIHGDKKGGFSIFWADDGLDTGDLLLQKECEVLPDDTVSTLYNRFLFPEGIKGMVQAVRLIAEGKAPRLPQPEEGATYEGIQKKETAKINWDQPAEAIHNWIRGNDKVPGAWTEACEQKLTFFNSTLNTSGLVPEGDALPIPGAHRPGVVTKAGLILFGNDDKMLLVKNIQLEDGKMILASNFFKGAASSVLELTEAELVTAEAVRSVWQRILPKVLEVEDSTDFFKSGAASVDVVRLVEEVKELCDGLELENEDVYMASTFGDFIQLLVRKLRGDDEEGECSIDYVEMAVNKRTVRMPHQLFIGGEFVDAEGAKTSETINPTDGSVICQVSLAQVTDVDKAVAAAKDAFENGRWGKISARDRGRLMYRAPPSPSTRPDPTAT

SEQ ID NO: 95083 - protein, 902 aa, Artificial Sequence
  derived and/or modified sequence
MKIAVIGQSLFGQEVYCHLRKEGHEVVGVFTVPDKDGKADPLGLEAEKDGVPVFKYSRWRAKGQALPDVVAKYQALGAELNVLPFCSQFIPMEIISAPRHGSIIYHPSLLPRHRGASAINWTLIHGDKKGGFSIFWADDGLDTGDLLLQKECEVLPDDTVSTLYNRFLFPEGIKGMVQAVRLIAEGKAPRLPQPEEGATYEGIQKKETAKINWDQPAEAIHNWIRGNDKVPGAWTEACEQKLTFFNSTLNTSGLVPEGDALPIPGAHRPGVVTKAGLILFGNDDKMLLVKNIQLEDGKMILASNFFKGAASSVLELTEAELVTAEAVRSVWQRILPKVLEVEDSTDFFKSGAASVDVVRLVEEVKELCDGLELENEDVYMASTFGDFIQLLVRKLRGDDEEGECSIDYVEMAVNKRTVRMPHQLFIGGEFVDAEGAKTSETINPTDGSVICQVSLAQVTDVDKAVAAAKDAFENGRWGKISARDRGRLMYRLADLMEQHQEELATIEALDAGAVYTLALKTHVGMSIQTFRYFAGWCDKIQGSTIPINQARPNRNLTLTRKEPVGVCGIIIPWNYPLMMLSWKTAACLAAGNTVVIKPAQVTPLTALKFAELTLKAGIPKGVVNVLPGSGSLVGQRLSDHPDVRKIGFTGSTEVGKHIMKSCAISNVKKVSLELGGKSPLIIFADCDLNKAVQMGMSSVFFNKGENCIAAGRLFVEDSIHDEFVRRVVEEVRKMKVGNPLDRDTDHGPQNHHAHLVKLMEYCQHGVKEGATLVCGGNQVPRPGFFFEPTVFTDVEDHMFIAKEESFGPVMIISRFADGDLDAVLSRANATEFGLASGVFTRDINKALYVSDKLQAGTVFVNTYNKTDVAAPFGGFKQSGFGKDLGEAALNEYLRVKTVTFEY

SEQ ID NO: 95084 - protein, 157 aa, Artificial Sequence
  derived and/or modified sequence
MKIAVIGQSLFGQEVYCHLRKEGHEVVGVFTVPDKDGKADPLGLEAEKDGVPVFKYSRWRAKGQALPDVVAKYQALGAELNVLPFCSQFIPMEIISAPRHGSIIYHPSLLPRHRGASAINWTLIHGDKKGGFSIFWADDGLDTGDLLLQKECEVLPD

SEQ ID NO: 95085 - protein, 177 aa, Artificial Sequence
  derived and/or modified sequence
MKIAVIGQSLFGQEVYCHLRKEGHEVVGVFTVPDKDGKADPLGLEAEKDGVPVFKYSRWRAKGQALPDVVAKYQALGAELNVLPFCSQFIPMEIISAPRHGSIIYHPSLLPRHRGASAINWTLIHGDKKGGFSIFWADDGLDTGDLLLQKECEVLPDDTVSTLYNRFLFPEGIKGMV

SEQ ID NO: 95086 - DNA, 2739 bp, Artificial Sequence
  derived and/or modified sequence
atggcaggccctagcaacccccccgccactatgaaaatagcagtgattggccaaagcctttttggacaggaggtgtattgccacctacgtaaggaggggcacgaggttgtcggtgtattcacggttccggacaaagatgggaaggcagatcctttgggcctggaggcagagaaggacggcgtgcctgtattcaaatattcccgctggcgcgctaaaggacaggctctaccagacgttgtggctaagtaccaagccttgggtgctgaattgaatgtgcttcccttctgctctcagtttatacccatggaaattatctctgcccctagacatggcagcataatctaccacccctctctcctgccgcggcacaggggcgcttcagctattaattggaccttgatccacggcgataagaagggtggcttctctatcttctgggccgacgatgggttggacactggagacttgctgttgcagaaagagtgcgaggttctccctgacgacacagtcagcacactatacaatcggtttctgtttcctgaaggaattaagggtatggtccaggctgtccgcctcattgcagaagggaaggccccgcggctacctcagccagaagagggggccacatacgaggggattcaaaagaaggaaacagccaagattaattgggatcagccagctgaagctatacacaattggatccgaggcaacgacaaggtccccggcgcatggacagaggcatgcgagcagaaactgacatttttcaactctacactgaacacatcggggttggtgcccgagggggacgcactccctatcccaggagcacaccgccctggcgtggtgactaaggcaggtctaatattattcggtaatgatgataaaatgttactggtgaagaatatccagctggaagatgggaaaatgatccttgcctctaacttcttcaagggtgccgccagtagcgtgctggaattaacagaggcggagctcgtcactgcagaggccgttagaagcgtgtggcagcgtattctgcccaaagtgctggaggttgaagattcgacagatttcttcaagtccggggctgcgtccgtagatgtagtgagattggtggaagaggttaaggaattgtgtgatgggctcgaattggagaatgaggacgtgtacatggcttcaactttcggggacttcattcagctgctagtcagaaagctaaggggcgacgatgaggaaggggagtgcagcatcgactacgtcgagatggcagtaaataaacggacagtccgaatgccacatcagttgtttataggtggggagttcgttgatgcggaaggcgccaaaacctccgagactattaaccctacagatgggtcggttatttgccaagtctctctggcacaggtaacggacgtagacaaggcggtggccgcggctaaggatgcattcgagaatggacgatggggtaagatctctgctagggaccgtggccgcttgatgtacagattggccgatctaatggaacagcatcaggaagaactggctaccattgaagcattagacgctggggccgtgtacacactcgccttgaagactcacgttggaatgtccatccagacattccggtattttgcaggatggtgtgataaaatacagggtagcacaatcccaataaatcaagcccggcccaatcgcaatctcacccttacaagaaaagagcccgtcggggtttgcggcatcattataccttggaactatccacttatgatgctatcctggaagacagcagcctgtctcgccgctgggaacacagtagtcataaaacccgcacaggtcacccctctaaccgcattaaagttcgctgaactcacacttaaggccggaatcccaaagggagtcgtgaatgttctgcctggtagcggaagcctggtagggcagcggctgtctgatcatcccgacgtacgaaaaatcggatttaccggctctactgaagtcgggaagcatatcatgaagtcctgtgctatttctaacgtgaaaaaagttagcctggagctgggggggaagtcaccactgattatctttgccgattgcgatctcaacaaggcggtgcaaatgggaatgtcgagcgttttttttaacaaaggtgagaattgcatcgccgcgggacgcctcttcgtagaggactctatacacgacgagttcgtaagaagagttgttgaagaagttcggaaaatgaaggttggtaatcccctagaccgggacaccgaccacggaccccagaaccatcacgcacacttggtcaagctgatggagtattgccagcacggcgtgaaggagggggccaccctggtgtgcggggggaaccaggtgccaagacctggattcttctttgaacctactgtttttacggacgttgaagatcacatgttcatagcgaaggaggagagcttcggaccagtgatgatcatttcaagattcgcagacggcgacctggacgctgtgttgagtagggctaatgctaccgaatttgggttggcatctggcgtttttacacgcgacatcaataaagcactgtacgtatctgacaagctgcaggccggcaccgttttcgtgaatacgtacaataagactgacgtggctgctcccttcggcggtttcaaacaatctgggtttgggaaggatttaggcgaggccgcgttaaatgagtacctcagagtcaagacagtgaccttcgaatattag

SEQ ID NO: 95087 - DNA, 2739 bp, Artificial Sequence
  derived and/or modified sequence
atggccggccccagcaaccccccagccaccatgaagattgctgtgattggccagagcctgtttggccaggaggtgtactgccacctgaggaaggagggccacgaggtggtgggcgtcttcaccgtgcctgacaaggatggcaaggctgaccccctgggcctggaggccgagaaggatggagtgcctgtgttcaagtacagccgctggagggccaagggccaggccctgcctgatgtggtggccaagtaccaggccctgggcgctgagctgaatgtgctgcccttctgcagccagttcatccccatggagatcatcagcgcccccaggcatggcagcatcatctaccaccccagcctgctgcccaggcacagaggagccagcgccatcaactggaccctcatccatggagacaagaagggcggcttcagcatcttctgggcagatgatggcctggacacaggagacctgctgctgcagaaggaatgtgaggtgctgcctgatgacacagtgtccaccctgtacaaccgcttcctgtttcctgagggcatcaagggcatggtgcaggccgtgcggctgattgctgagggcaaggccccccggctgccccagcctgaggagggcgccacctatgagggcatccagaagaaggagacagccaagatcaactgggaccagcctgctgaggccatccacaactggatcagaggaaatgacaaggtgcctggggcctggacagaggcctgtgagcagaagctgaccttcttcaacagcaccctgaacaccagcggcctggtgcctgaaggagatgccctgcccatccctggggcccacaggcctggggtggtgaccaaggccggcctcatcctgtttggaaatgatgacaagatgctgctggtgaagaacatccagctggaggatggcaagatgatcctggccagcaacttcttcaagggagctgccagctctgtgctggagctgacagaagctgagctggtgacagctgaggccgtgcgctctgtgtggcagaggatcctgcccaaggtgctggaggtggaggacagcacagacttcttcaagagcggggccgcctctgtggatgtggtgcggctggtggaggaggtgaaggagctgtgtgatggcctggagctggagaatgaagatgtgtacatggccagcaccttcggggacttcatccagctgctggtgaggaagctgcggggagatgatgaggagggagaatgttccattgattatgtggagatggctgtgaacaagaggacagtgaggatgccccaccagctgttcatcggcggggagtttgtggatgctgagggcgccaagaccagcgagaccatcaaccccacagatggcagcgtcatctgccaggtgtccctggcccaggtgacagatgtggacaaggctgtggccgccgccaaggatgcctttgaaaatggccgctggggcaagatcagcgcccgggaccggggccgcctgatgtaccgcctggccgacctgatggagcagcaccaggaggagctggccaccatcgaggccctggatgctggagctgtgtacaccctggccctgaagacccacgtgggcatgagcatccagaccttccgctactttgctggctggtgtgacaagatccagggcagcaccatccccatcaaccaggcccggcccaacagaaacctgaccctgaccaggaaggagcctgtgggcgtgtgtggcatcatcatcccctggaactaccccctgatgatgctgtcctggaagacagctgcctgcctggccgccggcaacacagtggtgatcaagccagcccaggtgacccccctgacagccctgaagtttgctgagctgaccctgaaggccggcatccccaagggcgtggtgaatgtgctgcccggcagcggcagcctggtgggccagaggctgagtgaccacccagatgtgaggaagattggcttcaccggcagcacagaggtgggcaagcacatcatgaagagctgtgccatcagcaatgtgaagaaggtgtccctggagctgggcggcaagagccccctcatcatctttgctgactgtgacctgaacaaggctgtgcagatgggcatgagcagcgtcttcttcaacaagggggagaactgcatcgccgccggccgcctgtttgtggaggacagcatccatgatgaatttgtgagaagagtggtggaggaggtgaggaagatgaaggtgggcaaccccctggaccgggacacagaccacggcccccagaaccaccacgcccacctggtgaagctgatggagtactgccagcacggcgtgaaggagggcgccaccctggtgtgtggcggcaaccaggtgccccggcccggcttcttctttgagcccaccgtcttcacagatgtggaggaccacatgttcatcgccaaggaggagagctttggacctgtgatgatcatcagcagatttgctgatggagacctggatgctgtgctgagccgggccaatgccacagaatttggcctggccagcggggtcttcacccgggacatcaacaaggccctgtatgtgtctgacaagctgcaggccggcaccgtgtttgtgaacacctacaacaagacagatgtggccgccccctttggaggcttcaagcagagcggctttgggaaggacctgggggaggccgccctgaatgagtacctgcgggtgaagacagtgacctttgagtactag

SEQ ID NO: 95088 - DNA, 3179 bp, Artificial Sequence
  derived and/or modified sequence
tctgcggcaccaggactgagtagaagggagagagtggagaaggggaattgcagagagaaaaccaggggctgtttttctctcggagaggcgggtaggcactgggcgggcagaagcgccgctatccacccggatgcgcagctgctaaggggccgcctctgcaagcggctgcaaattcccggagggcagcgtctcctttcgctctgctgtgtccgtagcacatggcaggtccttccaaccctcctgctaccatgaagattgcagtgattggacagagcctgtttggccaggaagtttactgccacctgaggaaggagggccacgaagtggtgggtgtgttcactgttccagacaaggatggaaaggccgaccccctgggtctggaagctgagaaggatggagtgccggtattcaagtactcccggtggcgtgcaaaaggacaggctttgcctgatgtggtggcaaaataccaggctttgggggccgagctcaacgtcctgcccttctgcagccaattcatccccatggagataatcagtgccccccggcatggctccatcatctatcacccgtcactgctccctaggcaccgaggggcctcggccatcaactggaccctcattcacggagataagaaaggggggttttccatcttctgggcggatgatggtctggacaccggagacctgctgctgcagaaggagtgtgaggtgctcccggacgacaccgtgagcacgctgtacaaccgcttcctcttccctgaaggcatcaaagggatggtgcaggccgtgaggctgatcgctgagggcaaagcccccagactccctcagcctgaggaaggagccacctatgaggggattcagaagaaggagacagccaagatcaactgggaccagccggcagaggccattcacaactggatccgcgggaacgacaaggtgccgggagcctggacagaggcctgtgaacagaaactgacatttttcaactcaacgctgaacacttcaggcctggtgcccgagggagacgctttgcccatcccaggagcccatcggccaggggtggtcaccaaagcaggactcatcctctttgggaatgatgacaaaatgctgctggtgaagaatattcagctggaggatggcaaaatgatcctggcctcgaacttctttaagggggcagccagcagtgtccttgagctgacagaggcagagctggttactgcggaggctgtgcggagtgtttggcagcggatcctccccaaagtcctggaggttgaagactccactgatttcttcaagtcaggggccgcgtctgtggacgttgtgaggctggtggaggaagtgaaggagctgtgtgatggcctggagttagaaaatgaagatgtgtacatggcatccacctttggggacttcatccagctgttagtgaggaagctgcgaggggacgatgaggagggcgagtgcagcattgactacgtggaaatggcagtgaacaagcgcactgtccgcatgccccaccagctcttcattgggggggagttcgtggatgccgagggcgccaagacctctgagaccatcaatcccaccgatggaagtgtcatctgccaggtatccctggcccaagtcaccgacgtcgacaaggcagtggccgcagccaaggatgcctttgagaatggacggtgggggaagatcagtgcgcgggaccggggccggctgatgtacaggttggcagatctcatggagcagcaccaggaggagctggccaccattgaggccctggatgcgggtgccgtctacacgctggccctgaagacccacgtgggcatgtccatccagaccttccgctactttgctggctggtgtgacaagatccagggctccaccatccccatcaaccaggccagacccaaccgcaacctgaccttgaccaggaaggagcctgttggggtttgtggcatcatcatcccctggaactatcccctgatgatgctgtcctggaagacagctgcctgcctggctgccgggaacacagtggtgatcaagcctgctcaggtgaccccactcacagccttgaagtttgcagagctgacattaaaggccggcattcccaaaggtgtggttaacgtcctcccaggatctggctccctggtcggccagagactctcagaccatcctgatgtgaggaaaatcgggttcacaggctccacagaggtgggcaagcacatcatgaaaagctgtgccataagtaacgtgaagaaggtgtccctggaactgggcgggaagtcacccctcatcatctttgctgactgtgacctcaacaaggctgtgcagatggggatgagttctgttttcttcaacaaaggagagaattgcattgcagcaggccgactctttgtggaggactccattcatgatgagttcgtgcggagagtggtagaagaggtgcggaagatgaaggtgggcaacccgctggacagggacaccgaccacgggccgcagaatcaccatgcccaccttgtgaagctgatggagtactgccagcatggcgtgaaggaaggggccacactggtctgcggcgggaatcaggtccctcggccagggttcttctttgagccaactgttttcacagacgtggaagaccacatgttcatagccaaggaggagtccttcgggcctgtcatgatcatctctcggtttgctgatggggacttggatgccgtgctgtctcgggccaatgccacggaatttggcctggcttctggtgtcttcaccagggacatcaacaaggccctgtatgtcagtgacaagctccaggcaggcactgtgtttgtcaacacgtacaacaagaccgacgtggccgctcccttcggaggattcaaacagtctggatttggcaaagatctaggagaggcggctctgaacgagtacctgcgggtcaagacagtgaccttcgaatactgaagaaaggtctttgtgagaagaaagtccctgcccctccctcgtggctggggccccctccctcttgagcctgggtgcacagcacctcccacctggggggctagtggaagccctcctgcctgcacaccatgtctgcatcttggacgccctctgtccagtcagaagcagcccttggctgggtgaggtgtgcccctcccagggagaataaagcttctgaagagagac

SEQ ID NO: 95089 - DNA, 2797 bp, Artificial Sequence
  derived and/or modified sequence
ctcctggctcccaggacgggtctgcaccaacctcagtttcggggctgcggctcacagaagtctaacctgcccgggacgcccgcaccaactcctgcgcgcggtccttccaaccctcctgctaccatgaagattgcagtgattggacagagcctgtttggccaggaagtttactgccacctgaggaaggagggccacgaagtggtgggtgtgttcactgttccagacaaggatggaaaggccgaccccctgggtctggaagctgagaaggatggagtgccggtattcaagtactcccggtggcgtgcaaaaggacaggctttgcctgatgtggtggcaaaataccaggctttgggggccgagctcaacgtcctgcccttctgcagccaattcatccccatggagataatcagtgccccccggcatggctccatcatctatcacccgtcactgctccctaggcaccgaggggcctcggccatcaactggaccctcattcacggagataagaaaggggggttttccatcttctgggcggatgatggtctggacaccggagacctgctgctgcagaaggagtgtgaggtgctcccggacgacaccgtgagcacgctgtacaaccgcttcctcttccctgaaggcatcaaagggatggtgcaggccgtgaggctgatcgctgagggcaaagcccccagactccctcagcctgaggaaggagccacctatgaggggattcagaagaaggagacagccaagatcaactgggaccagccggcagaggccattcacaactggatccgcgggaacgacaaggtgccgggagcctggacagaggcctgtgaacagaaactgacatttttcaactcaacgctgaacacttcaggcctggtgcccgagggagacgctttgcccatcccaggagcccatcggccaggggtggtcaccaaagcaggactcatcctctttgggaatgatgacaaaatgctgctggtgaagaatattcagctggaggatggcaaaatgatcctggcctcgaacttctttaagggggcagccagcagtgtccttgagctgacagaggcagagctggttactgcggaggctgtgcggagtgtttggcagcggatcctccccaaagtcctggaggttgaagactccactgatttcttcaagtcaggggccgcgtctgtggacgttgtgaggctggtggaggaagtgaaggagctgtgtgatggcctggagttagaaaatgaagatgtgtacatggcatccacctttggggacttcatccagctgttagtgaggaagctgcgaggggacgatgaggagggcgagtgcagcattgactacgtggaaatggcagtgaacaagcgcactgtccgcatgccccaccagctcttcattgggggggagttcgtggatgccgagggcgccaagacctctgagaccatcaatcccaccgatggaagtgtcatctgccaggtatccctggcccaagtcaccgacgtcgacaaggcagtggccgcagccaaggatgcctttgagaatggacggtgggggaagatcagtgcgcgggaccggggccggctgatgtacagggctccaccatccccatcaaccaggccagacccaaccgcaacctgaccttgaccaggaaggagcctgttggggtttgtggcatcatcatcccctggaactatcccctgatgatgctgtcctggaagacagctgcctgcctggctgccgggaacacagtggtgatcaagcctgctcaggtgaccccactcacagccttgaagtttgcagagctgacattaaaggccggcattcccaaaggtgtggttaacgtcctcccaggatctggctccctggtcggccagagactctcagaccatcctgatgtgaggaaaatcgggttcacaggctccacagaggtgggcaagcacatcatgaaaaggggatgagttctgttttcttcaacaaaggagagaattgcattgcagcaggccgactctttgtggaggactccattcatgatgagttcgtgcggagagtggtagaagaggtgcggaagatgaaggtgggcaacccgctggacagggacaccgaccacgggccgcagaatcaccatgcccaccttgtgaagctgatggagtactgccagcatggcgtgaaggaaggggccacactggtctgcggcgggaatcaggtccctcggccagggttcttctttgagccaactgttttcacagacgtggaagaccacatgttcatagccaaggaggagtccttcgggcctgtcatgatcatctctcggtttgctgatggggacttggatgccgtgctgtctcgggccaatgccacggaatttggcctggcttctggtgtcttcaccagggacatcaacaaggccctgtatgtcagtgacaagctccaggcaggcactgtgtttgtcaacacgtacaacaagaccgacgtggccgctcccttcggaggattcaaacagtctggatttggcaaagatctaggagaggcggctctgaacgagtacctgcgggtcaagacagtgaccttcgaatactgaagaaaggtctttgtgagaagaaagtccctgcccctccctcgtggctggggccccctccctcttgagcctgggtgcacagcacctcccacctggggggctagtggaagccctcctgcctgcacaccatgtctgcatcttggacgccctctgtccagtcagaagcagcccttggctgggtgaggtgtgcccctcccagggagaataaagcttctgaag

SEQ ID NO: 95090 - DNA, 3277 bp, Artificial Sequence
  derived and/or modified sequence
acagtaagtcttcttgacctaagcgggaaagagcgcaggcccctgcggggttggcttttacatggcatttatagacccgcccggagagggtgcgctgcgctcccgccatagtcccaccaccggtgagcgccgcccccactcggctgactctccgcccgccccgcgcccctcccctcacgggctctggccttaaccagagctcgcggactggcggggacaggtcccacctcctggctcccaggacgggtctgcaccaacctcagtttcggggctgcggctcacagaagtctaacctgcccgggacgcccgcaccaactcctgcgcgcggtccttccaaccctcctgctaccatgaagattgcagtgattggacagagcctgtttggccaggaagtttactgccacctgaggaaggagggccacgaagtggtgggtgtgttcactgttccagacaaggatggaaaggccgaccccctgggtctggaagctgagaaggatggagtgccggtattcaagtactcccggtggcgtgcaaaaggacaggctttgcctgatgtggtggcaaaataccaggctttgggggccgagctcaacgtcctgcccttctgcagccaattcatccccatggagataatcagtgccccccggcatggctccatcatctatcacccgtcactgctccctaggcaccgaggggcctcggccatcaactggaccctcattcacggagataagaaaggggggttttccatcttctgggcggatgatggtctggacaccggagacctgctgctgcagaaggagtgtgaggtgctcccggacgacaccgtgagcacgctgtacaaccgcttcctcttccctgaaggcatcaaagggatggtgcaggccgtgaggctgatcgctgagggcaaagcccccagactccctcagcctgaggaaggagccacctatgaggggattcagaagaaggagacagccaagatcaactgggaccagccggcagaggccattcacaactggatccgcgggaacgacaaggtgccgggagcctggacagaggcctgtgaacagaaactgacatttttcaactcaacgctgaacacttcaggcctggtgcccgagggagacgctttgcccatcccaggagcccatcggccaggggtggtcaccaaagcaggactcatcctctttgggaatgatgacaaaatgctgctggtgaagaatattcagctggaggatggcaaaatgatcctggcctcgaacttctttaagggggcagccagcagtgtccttgagctgacagaggcagagctggttactgcggaggctgtgcggagtgtttggcagcggatcctccccaaagtcctggaggttgaagactccactgatttcttcaagtcaggggccgcgtctgtggacgttgtgaggctggtggaggaagtgaaggagctgtgtgatggcctggagttagaaaatgaagatgtgtacatggcatccacctttggggacttcatccagctgttagtgaggaagctgcgaggggacgatgaggagggcgagtgcagcattgactacgtggaaatggcagtgaacaagcgcactgtccgcatgccccaccagctcttcattgggggggagttcgtggatgccgagggcgccaagacctctgagaccatcaatcccaccgatggaagtgtcatctgccaggtatccctggcccaagtcaccgacgtcgacaaggcagtggccgcagccaaggatgcctttgagaatggacggtgggggaagatcagtgcgcgggaccggggccggctgatgtacaggttggcagatctcatggagcagcaccaggaggagctggccaccattgaggccctggatgcgggtgccgtctacacgctggccctgaagacccacgtgggcatgtccatccagaccttccgctactttgctggctggtgtgacaagatccagggctccaccatccccatcaaccaggccagacccaaccgcaacctgaccttgaccaggaaggagcctgttggggtttgtggcatcatcatcccctggaactatcccctgatgatgctgtcctggaagacagctgcctgcctggctgccgggaacacagtggtgatcaagcctgctcaggtgaccccactcacagccttgaagtttgcagagctgacattaaaggccggcattcccaaaggtgtggttaacgtcctcccaggatctggctccctggtcggccagagactctcagaccatcctgatgtgaggaaaatcgggttcacaggctccacagaggtgggcaagcacatcatgaaaagctgtgccataagtaacgtgaagaaggtgtccctggaactgggcgggaagtcacccctcatcatctttgctgactgtgacctcaacaaggctgtgcagatggggatgagttctgttttcttcaacaaaggagagaattgcattgcagcaggccgactctttgtggaggactccattcatgatgagttcgtgcggagagtggtagaagaggtgcggaagatgaaggtgggcaacccgctggacagggacaccgaccacgggccgcagaatcaccatgcccaccttgtgaagctgatggagtactgccagcatggcgtgaaggaaggggccacactggtctgcggcgggaatcaggtccctcggccagggttcttctttgagccaactgttttcacagacgtggaagaccacatgttcatagccaaggaggagtccttcgggcctgtcatgatcatctctcggtttgctgatggggacttggatgccgtgctgtctcgggccaatgccacggaatttggcctggcttctggtgtcttcaccagggacatcaacaaggccctgtatgtcagtgacaagctccaggcaggcactgtgtttgtcaacacgtacaacaagaccgacgtggccgctcccttcggaggattcaaacagtctggatttggcaaagatctaggagaggcggctctgaacgagtacctgcgggtcaagacagtgaccttcgaatactgaagaaaggtctttgtgagaagaaagtccctgcccctccctcgtggctggggccccctccctcttgagcctgggtgcacagcacctcccacctggggggctagtggaagccctcctgcctgcacaccatgtctgcatcttggacgccctctgtccagtcagaagcagcccttggctgggtgaggtgtgcccctcccagggagaataaagcttctgaagag

SEQ ID NO: 95091 - DNA, 3157 bp, Artificial Sequence
  derived and/or modified sequence
actgcgctcaagtggacggtcgcgcgtgcagagggaggccggatagcagaccccacaacgtggctcctggggccccgctatcgagagctcaggccccgcgggcacttgcctaggagaggaaagaatcttcccaaagtgcagacagagacggaatttaatcaggagtcccagacttggagtttggaggcatgggctctggtgtcaggtccttccaaccctcctgctaccatgaagattgcagtgattggacagagcctgtttggccaggaagtttactgccacctgaggaaggagggccacgaagtggtgggtgtgttcactgttccagacaaggatggaaaggccgaccccctgggtctggaagctgagaaggatggagtgccggtattcaagtactcccggtggcgtgcaaaaggacaggctttgcctgatgtggtggcaaaataccaggctttgggggccgagctcaacgtcctgcccttctgcagccaattcatccccatggagataatcagtgccccccggcatggctccatcatctatcacccgtcactgctccctaggcaccgaggggcctcggccatcaactggaccctcattcacggagataagaaaggggggttttccatcttctgggcggatgatggtctggacaccggagacctgctgctgcagaaggagtgtgaggtgctcccggacgacaccgtgagcacgctgtacaaccgcttcctcttccctgaaggcatcaaagggatggtgcaggccgtgaggctgatcgctgagggcaaagcccccagactccctcagcctgaggaaggagccacctatgaggggattcagaagaaggagacagccaagatcaactgggaccagccggcagaggccattcacaactggatccgcgggaacgacaaggtgccgggagcctggacagaggcctgtgaacagaaactgacatttttcaactcaacgctgaacacttcaggcctggtgcccgagggagacgctttgcccatcccaggagcccatcggccaggggtggtcaccaaagcaggactcatcctctttgggaatgatgacaaaatgctgctggtgaagaatattcagctggaggatggcaaaatgatcctggcctcgaacttctttaagggggcagccagcagtgtccttgagctgacagaggcagagctggttactgcggaggctgtgcggagtgtttggcagcggatcctccccaaagtcctggaggttgaagactccactgatttcttcaagtcaggggccgcgtctgtggacgttgtgaggctggtggaggaagtgaaggagctgtgtgatggcctggagttagaaaatgaagatgtgtacatggcatccacctttggggacttcatccagctgttagtgaggaagctgcgaggggacgatgaggagggcgagtgcagcattgactacgtggaaatggcagtgaacaagcgcactgtccgcatgccccaccagctcttcattgggggggagttcgtggatgccgagggcgccaagacctctgagaccatcaatcccaccgatggaagtgtcatctgccaggtatccctggcccaagtcaccgacgtcgacaaggcagtggccgcagccaaggatgcctttgagaatggacggtgggggaagatcagtgcgcgggaccggggccggctgatgtacaggttggcagatctcatggagcagcaccaggaggagctggccaccattgaggccctggatgcgggtgccgtctacacgctggccctgaagacccacgtgggcatgtccatccagaccttccgctactttgctggctggtgtgacaagatccagggctccaccatccccatcaaccaggccagacccaaccgcaacctgaccttgaccaggaaggagcctgttggggtttgtggcatcatcatcccctggaactatcccctgatgatgctgtcctggaagacagctgcctgcctggctgccgggaacacagtggtgatcaagcctgctcaggtgaccccactcacagccttgaagtttgcagagctgacattaaaggccggcattcccaaaggtgtggttaacgtcctcccaggatctggctccctggtcggccagagactctcagaccatcctgatgtgaggaaaatcgggttcacaggctccacagaggtgggcaagcacatcatgaaaagctgtgccataagtaacgtgaagaaggtgtccctggaactgggcgggaagtcacccctcatcatctttgctgactgtgacctcaacaaggctgtgcagatggggatgagttctgttttcttcaacaaaggagagaattgcattgcagcaggccgactctttgtggaggactccattcatgatgagttcgtgcggagagtggtagaagaggtgcggaagatgaaggtgggcaacccgctggacagggacaccgaccacgggccgcagaatcaccatgcccaccttgtgaagctgatggagtactgccagcatggcgtgaaggaaggggccacactggtctgcggcgggaatcaggtccctcggccagggttcttctttgagccaactgttttcacagacgtggaagaccacatgttcatagccaaggaggagtccttcgggcctgtcatgatcatctctcggtttgctgatggggacttggatgccgtgctgtctcgggccaatgccacggaatttggcctggcttctggtgtcttcaccagggacatcaacaaggccctgtatgtcagtgacaagctccaggcaggcactgtgtttgtcaacacgtacaacaagaccgacgtggccgctcccttcggaggattcaaacagtctggatttggcaaagatctaggagaggcggctctgaacgagtacctgcgggtcaagacagtgaccttcgaatactgaagaaaggtctttgtgagaagaaagtccctgcccctccctcgtggctggggccccctccctcttgagcctgggtgcacagcacctcccacctggggggctagtggaagccctcctgcctgcacaccatgtctgcatcttggacgccctctgtccagtcagaagcagcccttggctgggtgaggtgtgcccctcccagggagaataaagcttctgaagagag

SEQ ID NO: 95092 - DNA, 2739 bp, Artificial Sequence
  derived and/or modified sequence
atggccggccccagcaacccccccgccaccatgaagatcgccgtgatcgggcagtccctctttgggcaagaagtctattgtcatctcagaaaggaaggccacgaagtggtgggcgtgttcaccgtgcccgataaagatggaaaggcggacccactcgggctggaggctgagaaggatggggtgccagtgttcaagtattcgcgatggcgcgctaagggacaggcattgcctgacgtggttgccaagtaccaggcactaggagctgaactcaatgtccttccattctgttcacagttcattcccatggagatcattagtgcgcctaggcatggtagcatcatctatcacccatcactgctccctcgacatcgcggcgccagcgcgatcaattggacattgattcatggagataagaaagggggcttcagtatcttttgggctgacgacggcttagacactggggatctgttacttcagaaggaatgcgaggtactgcccgacgatacggtctccaccctctataacaggtttctgttccccgaagggattaaggggatggtgcaggcggtgagactgatcgccgaggggaaggccccacgtcttcctcagcctgaagagggtgcaacatatgagggtatccagaagaaggaaaccgcaaaaattaattgggatcaaccagccgaagctattcataattggattcgagggaacgataaggtaccgggagcttggaccgaagcctgcgagcagaagctgaccttcttcaactcaacattgaataccagtgggctggttcctgagggcgatgcgctaccgatccctggggcgcacagaccgggtgttgtgaccaaggcaggcctgatactcttcggtaacgatgacaagatgctactggttaaaaacatccaacttgaggacggaaagatgattttagcgagcaacttcttcaagggagctgcctcaagtgtgctggagctgacggaggccgagctggtgacagccgaggcagtgagaagtgtgtggcaacgcatactgcccaaggtgcttgaggttgaagactccaccgatttcttcaagagtggggccgccagtgtagacgtggtgcgattggtggaagaggtgaaggagctttgcgacggactggagctggagaacgaggatgtgtacatggcaagtacgtttggggatttcattcagttactggtgaggaaacttcggggagacgacgaagaaggcgagtgtagcattgactatgtggaaatggctgtgaataagaggactgtgcgaatgccgcatcagctgttcataggtggcgaattcgtcgatgctgagggcgccaagaccagtgagaccattaaccccaccgacggctccgtcatctgccaggtgtcgctggcgcaggtcacagatgtcgataaggccgtggcggccgcaaaggatgcattcgaaaacgggcggtgggggaaaatctctgcgcgcgaccgcggtcggctaatgtatcgcctcgccgatctgatggagcaacatcaggaggaattagcgacgatcgaggccctcgacgccggcgcggtctacactctggccctgaaaacccacgttggaatgtctatacagacattccggtattttgctggatggtgcgacaagatccagggcagcacaatcccaatcaaccaggcgcggcccaacaggaacctgactctgacgcgaaaggaacctgtcggcgtgtgtggcatcattatcccatggaactacccactgatgatgttgagttggaaaaccgctgcctgcctcgcggcgggcaacacagtcgtgatcaagccagcccaagtgacccctctcactgccctgaaatttgccgaactcacccttaaggctggtatccctaagggggtcgtgaacgtgctgcctggttctggaagcctggtgggccagcggctgtcagatcaccctgacgttcgcaaaatcgggttcactggaagtaccgaagtcgggaaacatatcatgaagtcatgcgccatctccaatgtgaaaaaggtttcgttagagcttggggggaaaagtcccctcattatctttgctgactgtgacctcaataaggccgttcagatgggcatgtcatccgtatttttcaataagggagagaattgcatcgccgctggtcggctgttcgtggaagatagtatacacgacgagtttgtccgcagggttgtcgaggaggtgcgcaaaatgaaagtagggaatccactggaccgagacacagatcatgggcctcagaaccatcatgcccatttagtcaaactgatggagtattgtcagcatggagtaaaagaaggagccactttggtgtgcggagggaaccaggtcccacggcctggatttttcttcgaaccaactgtatttacagacgtcgaggatcatatgtttatcgctaaggaagaaagtttcggccccgtgatgatcatatctcggtttgcagacggcgatcttgacgccgtattgagtcgcgctaacgcaactgaattcggcctggcctcgggggtatttacccgcgacatcaataaggccttgtatgtcagtgataagcttcaggcaggtaccgtgttcgtgaatacgtataacaagacagacgtcgccgccccgttcggcggttttaaacagagcggcttcggaaaggatttaggtgaagcggcgctgaatgaataccttagagtgaagacagtaacttttgaatactag

SEQ ID NO: 95093 - DNA, 2739 bp, Artificial Sequence
  derived and/or modified sequence
atggcaggaccaagcaatcccccagccacgatgaagattgcagtgatcgggcagtcactgtttggacaagaagtgtactgccatcttcggaaagagggacatgaagtggttggggtgttcacagtgcctgacaaggacggcaaggcagacccattggggttggaagccgaaaaagatggggttccagtctttaagtattcacgttggcgggctaaaggtcaggcactgccggatgttgtggccaaatatcaagccctaggcgctgagctgaacgtcctacctttctgtagtcagtttatacccatggagattatatcagcccctaggcacggatccattatctatcatccttctctgttgccacggcacagaggcgcttccgcaatcaactggaccctgattcacggcgataagaagggcggatttagcatcttttgggctgatgacgggctggacaccggagatctcctgctccagaaagagtgcgaggtcctccctgatgataccgtgagcaccctgtataatagatttcttttcccggaaggcataaaagggatggtgcaggcagtacgactgatagccgaaggcaaagccccaaggcttcctcagccagaggaaggtgccacgtacgagggcattcaaaaaaaggagactgccaagataaactgggaccaaccagcagaggcaatccacaattggatccgaggtaacgataaggtcccaggcgcttggactgaggcctgcgagcaaaaactgacgttctttaactctacgctcaacacaagtggcctggtgccagagggggatgcgctgcccatcccaggagcgcacagaccaggggttgtgactaaagccggtctcattctatttgggaatgacgataagatgctgctcgtgaaaaacattcagctggaggacggaaagatgattctggccagtaacttcttcaaaggtgctgctagtagcgttctggaattgacagaagccgaacttgtaactgctgaggcagtccggtccgtgtggcagagaattctgcccaaggtccttgaagtagaggacagtacggatttcttcaaaagcggggctgccagcgttgacgtggtccgcttggtagaagaggtgaaggaactgtgtgacggtctagaactcgaaaacgaagatgtctatatggcctctactttcggagactttatacagctactggttcgcaagctcagaggggatgatgaggagggcgagtgctcgattgattatgttgaaatggccgtgaacaagagaaccgttcgtatgccacaccaactctttattggcggagagttcgttgatgctgagggcgctaagactagcgaaacgattaacccaacagacggctccgtcatctgccaggtttcacttgcacaggtcaccgacgttgacaaagcagtggctgctgctaaagacgccttcgaaaatggaaggtggggaaagatctcagcccgtgacagaggtagattaatgtacagactcgcggatctcatggagcaacatcaggaggagctggccactatcgaggccctggacgcaggagccgtgtacacactggcgttaaaaacgcatgttggcatgtctatacagaccttccgttactttgccggatggtgtgacaaaatccagggttccaccatcccaattaaccaggctaggccgaacaggaacttgactcttacacgtaaagagcccgtgggggtctgtggcatcatcataccttggaactacccattgatgatgttgagctggaagacagccgcttgcctggccgcagggaacacagtggtcattaaacccgcacaggtgacacctctgactgctcttaagttcgcagagctcacgctgaaggcaggaatcccgaaaggcgtggtaaatgtcttgccgggaagtggttctctcgtcggtcagcggcttagcgatcatcccgacgtacggaaaatcggcttcacaggttccactgaagtgggcaagcacatcatgaaatcttgcgccatcagcaatgtgaagaaggtgtcgctggagctcgggggaaagtcccctctgatcatctttgctgattgcgatctcaacaaggccgtgcaaatggggatgagcagtgtcttttttaacaagggagagaattgcatcgctgctggcaggttgtttgtcgaggacagcatccacgatgaatttgtgcgcagggtggtggaagaagtgcgcaaaatgaaagtgggcaaccctcttgatagagacaccgaccacggtccccagaaccatcacgctcacctcgtgaaactgatggagtactgtcagcacggcgtcaaagaaggtgcaaccctggtctgtggagggaatcaggtgcctcggccaggcttcttcttcgagccgacagtgtttacagacgtggaagatcatatgtttatcgccaaagaggagagctttggacctgttatgattatatctagatttgccgacggggaccttgacgcagttttgtcccgcgcaaacgctaccgaatttggactggcctccggggtattcacaagagacattaataaagccctctacgtgtccgataaactgcaggccggtacggtgtttgtgaatacttataataagactgatgtcgctgccccatttggaggatttaaacagtccggttttggtaaagacctaggagaggccgcactgaacgaatatctgagagtaaaaacagtcacattcgaatattag

SEQ ID NO: 95094 - DNA, 2739 bp, Artificial Sequence
  derived and/or modified sequence
atggccggccccagcaacccccccgccaccatgaagatcgccgtgatcggccagagcctgttcggccaggaggtgtactgccacctgagaaaggagggccacgaggtggtgggcgtgttcaccgtgcccgacaaggacggcaaggccgaccccctgggcctggaggccgagaaggacggcgtgcccgtgttcaagtacagcagatggagagccaagggccaggccctgcccgacgtggtggccaagtaccaggccctgggcgccgagctgaacgtgctgcccttctgcagccagttcatccccatggagatcatcagcgcccccagacacggcagcatcatctaccaccccagcctgctgcccagacacagaggcgccagcgccatcaactggaccctgatccacggcgacaagaagggcggcttcagcatcttctgggccgacgacggcctggacaccggcgacctgctgctgcagaaggagtgcgaggtgctgcccgacgacaccgtgagcaccctgtacaacagattcctgttccccgagggcatcaagggcatggtgcaggccgtgagactgatcgccgagggcaaggcccccagactgccccagcccgaggagggcgccacctacgagggcatccagaagaaggagaccgccaagatcaactgggaccagcccgccgaggccatccacaactggatcagaggcaacgacaaggtgcccggcgcctggaccgaggcctgcgagcagaagctgaccttcttcaacagcaccctgaacaccagcggcctggtgcccgagggcgacgccctgcccatccccggcgcccacagacccggcgtggtgaccaaggccggcctgatcctgttcggcaacgacgacaagatgctgctggtgaagaacatccagctggaggacggcaagatgatcctggccagcaacttcttcaagggcgccgccagcagcgtgctggagctgaccgaggccgagctggtgaccgccgaggccgtgagaagcgtgtggcagagaatcctgcccaaggtgctggaggtggaggacagcaccgacttcttcaagagcggcgccgccagcgtggacgtggtgagactggtggaggaggtgaaggagctgtgcgacggcctggagctggagaacgaggacgtgtacatggccagcaccttcggcgacttcatccagctgctggtgagaaagctgagaggcgacgacgaggagggcgagtgcagcatcgactacgtggagatggccgtgaacaagagaaccgtgagaatgccccaccagctgttcatcggcggcgagttcgtggacgccgagggcgccaagaccagcgagaccatcaaccccaccgacggcagcgtgatctgccaggtgagcctggcccaggtgaccgacgtggacaaggccgtggccgccgccaaggacgccttcgagaacggcagatggggcaagatcagcgccagagacagaggcagactgatgtacagactggccgacctgatggagcagcaccaggaggagctggccaccatcgaggccctggacgccggcgccgtgtacaccctggccctgaagacccacgtgggcatgagcatccagaccttcagatacttcgccggctggtgcgacaagatccagggcagcaccatccccatcaaccaggccagacccaacagaaacctgaccctgaccagaaaggagcccgtgggcgtgtgcggcatcatcatcccctggaactaccccctgatgatgctgagctggaagaccgccgcctgcctggccgccggcaacaccgtggtgatcaagcccgcccaggtgacccccctgaccgccctgaagttcgccgagctgaccctgaaggccggcatccccaagggcgtggtgaacgtgctgcccggcagcggcagcctggtgggccagagactgagcgaccaccccgacgtgagaaagatcggcttcaccggcagcaccgaggtgggcaagcacatcatgaagagctgcgccatcagcaacgtgaagaaggtgagcctggagctgggcggcaagagccccctgatcatcttcgccgactgcgacctgaacaaggccgtgcagatgggcatgagcagcgtgttcttcaacaagggcgagaactgcatcgccgccggcagactgttcgtggaggacagcatccacgacgagttcgtgagaagagtggtggaggaggtgagaaagatgaaggtgggcaaccccctggacagagacaccgaccacggcccccagaaccaccacgcccacctggtgaagctgatggagtactgccagcacggcgtgaaggagggcgccaccctggtgtgcggcggcaaccaggtgcccagacccggcttcttcttcgagcccaccgtgttcaccgacgtggaggaccacatgttcatcgccaaggaggagagcttcggccccgtgatgatcatcagcagattcgccgacggcgacctggacgccgtgctgagcagagccaacgccaccgagttcggcctggccagcggcgtgttcaccagagacatcaacaaggccctgtacgtgagcgacaagctgcaggccggcaccgtgttcgtgaacacctacaacaagaccgacgtggccgcccccttcggcggcttcaagcagagcggcttcggcaaggacctgggcgaggccgccctgaacgagtacctgagagtgaagaccgtgaccttcgagtactag

SEQ ID NO: 95095 - protein, 801 aa, Artificial Sequence
  derived and/or modified sequence
MKIAVIGQSLFGQEVYCHLRKEGHEVVGVFTVPDKDGKADPLGLEAEKDGVPVFKYSRWRAKGQALPDVVAKYQALGAELNVLPFCSQFIPMEIISAPRHGSIIYHPSLLPRHRGASAIHNWIRGNDKVPGAWTEACEQKLTFFNSTLNTSGLVPEGDALPIPGAHRPGVVTKAGLILFGNDDKMLLVKNIQLEDGKMILASNFFKGAASSVLELTEAELVTAEAVRSVWQRILPKVLEVEDSTDFFKSGAASVDVVRLVEEVKELCDGLELENEDVYMASTFGDFIQLLVRKLRGDDEEGECSIDYVEMAVNKRTVRMPHQLFIGGEFVDAEGAKTSETINPTDGSVICQVSLAQVTDVDKAVAAAKDAFENGRWGKISARDRGRLMYRLADLMEQHQEELATIEALDAGAVYTLALKTHVGMSIQTFRYFAGWCDKIQGSTIPINQARPNRNLTLTRKEPVGVCGIIIPWNYPLMMLSWKTAACLAAGNTVVIKPAQVTPLTALKFAELTLKAGIPKGVVNVLPGSGSLVGQRLSDHPDVRKIGFTGSTEVGKHIMKSCAISNVKKVSLELGGKSPLIIFADCDLNKAVQMGMSSVFFNKGENCIAAGRLFVEDSIHDEFVRRVVEEVRKMKVGNPLDRDTDHGPQNHHAHLVKLMEYCQHGVKEGATLVCGGNQVPRPGFFFEPTVFTDVEDHMFIAKEESFGPVMIISRFADGDLDAVLSRANATEFGLASGVFTRDINKALYVSDKLQAGTVFVNTYNKTDVAAPFGGFKQSGFGKDLGEAALNEYLRVKTVTFEY

SEQ ID NO: 95096 - protein, 100 aa, Artificial Sequence
  derived and/or modified sequence
MKIAVIGQSLFGQEVYCHLRKEGHEVVGVFTVPDKDGKADPLGLEAEKDGVPVFKYSRWRAKGQALPDVVAKYQALGAELNVLPFCSQFIPMEIISAPRH

SEQ ID NO: 95097 - DNA, 2406 bp, Artificial Sequence
  derived and/or modified sequence
atgaagatagccgtgattggccagtctctgttcgggcaagaggtctactgccatctgagaaaggaggggcacgaagtggtcggcgtgttcaccgtacctgacaaggacggtaaagccgatcctctagggttggaggccgaaaaggatggggtgcccgtattcaaatatagccgctggcgggccaaaggtcaagctcttcctgatgtggtcgcaaaataccaggccctgggggccgagctgaacgtattgccattctgcagccagttcatccccatggagatcatctccgccccccgccacggcagcattatataccacccatcattactgccacgccatcggggagcaagtgcgattcataattggattaggggaaatgacaaggtccctggggcgtggaccgaggcttgcgagcagaagcttaccttctttaactctaccctgaacactagtgggctagtgcccgagggagacgccctccccatccctggtgctcacaggcccggagtagttaccaaggcggggctgattctctttggcaacgacgataaaatgctccttgtgaagaacatacaactggaagatggtaagatgattctcgcaagcaatttcttcaaaggagccgcctcaagcgtccttgaactgacagaggcagaactggtgaccgccgaggctgtcaggtcggtttggcaacggattctgcctaaagttttagaggtggaggactccaccgacttcttcaagtccggcgctgcttctgtagatgtggtccgcttagtggaggaggtgaaggagctgtgcgacggactagagctggagaacgaggacgtctatatggcatccacgttcggggatttcatacaactattagttagaaagttgcggggcgacgacgaagaaggagagtgctctattgattatgtggaaatggctgtgaacaagcgcacagtgaggatgccacaccaactcttcattggcggcgagttcgtcgacgcagaaggggctaaaacatcagaaactatcaaccccacggacggcagcgtgatatgtcaggtgtctctggctcaggtcacggacgtggacaaggcagtggccgccgccaaagatgccttcgagaatgggcgctggggcaagatcagtgccagggacagaggccggctgatgtatcgcctcgctgatcttatggaacagcatcaggaagagttggccacaattgaggcgttagacgcaggggccgtgtataccctggctctgaaaacccacgttggaatgagcatccagacattccgctactttgcagggtggtgcgataaaatacaggggagtactattccgataaatcaagcaagacccaatcgtaacctcaccctcacccgcaaggagcccgtcggggtgtgtgggataatcatcccctggaattatccactgatgatgctgtcctggaagaccgcagcctgtctggctgctggtaataccgtggtcatcaaacccgcacaggtgacacctttgacagccctgaaatttgccgagctgaccctgaaagctggtatccccaagggtgtggttaacgttttaccaggctccggctctcttgtgggccagcgcctgtcagaccaccccgacgttagaaaaattggctttacaggctccacagaggttgggaagcatatcatgaagagctgtgcaatatctaacgtcaagaaagtatctctggagctcggcggtaagagccccctgataattttcgcagattgtgatctgaacaaagccgtgcagatggggatgtcatctgtgttcttcaacaaaggggaaaactgtattgcggccggccgcctgttcgtggaagacagcatccacgacgaatttgtgcgtagggtcgtggaggaagtaaggaagatgaaggttgggaaccctcttgacagggacaccgaccacggaccacaaaatcaccacgctcaccttgtcaaactcatggagtattgccagcacggtgttaaagagggcgcaactctcgtttgcggtggaaaccaggtgcctcgaccaggcttcttcttcgaaccgacggtgttcactgacgtggaggaccatatgttcattgcaaaagaagagagtttcggaccggtcatgataatctcccggttcgcggatggagacctggacgcggtcctctcacgtgccaatgccacagaattcggactggcctcaggagtgttcactcgagatatcaacaaagccctgtacgtgtcagataaactccaagccggaactgttttcgtgaacacgtacaacaagactgacgtagcagccccttttggcggctttaaacaaagcggtttcgggaaggacttgggtgaggcagcgctcaacgaatatctgagggtaaaaaccgttacgtttgagtattag

SEQ ID NO: 95098 - DNA, 303 bp, Artificial Sequence
  derived and/or modified sequence
atgaaaatcgccgtgattggtcagtccctctttggacaggaagtctattgccacctgaggaaagagggccacgaggtggtgggggtttttacggtcccagacaaggatggaaaagctgatccactagggctagaagccgagaaggatggagtgccggttttcaaatactcccggtggcgggctaagggccaggcattgccagacgtcgtggcaaagtaccaggccttaggtgccgaactgaacgtgctgccattctgcagccaatttattcctatggaaataattagcgcaccccggcactag

SEQ ID NO: 95099 - DNA, 2406 bp, Artificial Sequence
  derived and/or modified sequence
atgaagattgctgtgattggccagagcctgtttggccaggaggtgtactgccacctgaggaaggagggccacgaggtggtgggcgtcttcaccgtgcctgacaaggatggcaaggctgaccccctgggcctggaggccgagaaggatggagtgcctgtgttcaagtacagccgctggagggccaagggccaggccctgcctgatgtggtggccaagtaccaggccctgggcgctgagctgaatgtgctgcccttctgcagccagttcatccccatggagatcatcagcgcccccaggcatggcagcatcatctaccaccccagcctgctgcccaggcacagaggagccagcgccatccacaactggatcagaggaaatgacaaggtgcctggggcctggacagaggcctgtgagcagaagctgaccttcttcaacagcaccctgaacaccagcggcctggtgcctgaaggagatgccctgcccatccctggggcccacaggcctggggtggtgaccaaggccggcctcatcctgtttggaaatgatgacaagatgctgctggtgaagaacatccagctggaggatggcaagatgatcctggccagcaacttcttcaagggggccgccagctctgtgctggagctgacagaggccgagctggtgacagctgaggccgtgcgctctgtgtggcagaggatcctgcccaaggtgctggaggtggaggacagcacagacttcttcaagtctggagctgcctctgtggatgtggtgcggctggtggaggaggtgaaggagctgtgtgatggcctggagctggagaatgaagatgtgtacatggccagcacctttggagacttcatccagctgctggtgaggaagctgcggggagatgatgaggagggggagtgcagcattgattatgtggagatggctgtgaacaagaggacagtgaggatgccccaccagctgttcatcggcggggagtttgtggatgctgagggcgccaagaccagcgagaccatcaaccccacagatggcagcgtcatctgccaggtgtccctggcccaggtgacagatgtggacaaggctgtggccgccgccaaggatgcctttgaaaatggccgctggggcaagatcagcgcccgggaccggggccgcctgatgtaccgcctggccgacctgatggagcagcaccaggaggagctggccaccatcgaggccctggatgctggagctgtgtacaccctggccctgaagacccacgtgggcatgagcatccagaccttccgctactttgctggctggtgtgacaagatccagggcagcaccatccccatcaaccaggcccggcccaacagaaacctgaccctgaccaggaaggagcctgtgggcgtgtgtggcatcatcatcccctggaactaccccctgatgatgctgtcctggaagacagctgcctgcctggccgccggcaacacagtggtgatcaagccagcccaggtgacccccctgacagccctgaagtttgctgagctgaccctgaaggccggcatccccaagggcgtggtgaatgtgctgcccggcagcggcagcctggtgggccagaggctgagtgaccacccagatgtgaggaagattggcttcaccggcagcacagaggtgggcaagcacatcatgaagagctgtgccatcagcaatgtgaagaaggtgtccctggagctgggcggcaagagccccctcatcatctttgctgactgtgacctgaacaaggctgtgcagatgggcatgagctctgtgttcttcaacaagggggagaactgcatcgctgctggccgcctgtttgtggaggacagcatccatgatgaatttgtgcggcgggtggtggaggaggtgaggaagatgaaggtgggcaaccccctggaccgggacacagaccacggcccccagaaccaccacgcccacctggtgaagctgatggagtactgccagcacggcgtgaaggagggcgccaccctggtgtgtggcggcaaccaggtgcccaggcctggcttcttctttgagcccaccgtcttcacagatgtggaggaccacatgtttattgccaaggaggagagctttggacctgtgatgatcatcagcagatttgctgatggagacctggatgctgtgctgagccgggccaatgccacagaatttggcctggccagcggggtcttcacccgggacatcaacaaggccctgtatgtgtctgacaagctgcaggccggcaccgtgtttgtgaacacctacaacaagacagatgtggccgccccctttggaggcttcaagcagagcggctttgggaaggacctgggggaggccgccctgaatgagtacctgcgggtgaagacagtgacctttgagtactag

SEQ ID NO: 95100 - DNA, 303 bp, Artificial Sequence
  derived and/or modified sequence
atgaagattgctgtgattggccagagcctgtttggccaggaggtgtactgccacctgaggaaggagggccacgaggtggtgggcgtcttcaccgtgcctgacaaggatggcaaggctgaccccctgggcctggaggccgagaaggatggagtgcctgtgttcaagtacagccgctggagggccaagggccaggccctgcctgatgtggtggccaagtaccaggccctgggcgctgagctgaatgtgctgcccttctgcagccagttcatccccatggagatcatcagcgcccccaggcactag

SEQ ID NO: 95101 - DNA, 2758 bp, Artificial Sequence
  derived and/or modified sequence
acaggtcccacctcctggctcccaggacgggtctgcaccaacctcagtttcggggctgcggctcacagaagtctaacctgcccgggacgcccgcaccaactcctgcgcgcggtccttccaaccctcctgctaccatgaagattgcagtgattggacagagcctgtttggccaggaagtttactgccacctgaggaaggagggccacgaagtggtgggtgtgttcactgttccagacaaggatggaaaggccgaccccctgggtctggaagctgagaaggatggagtgccggtattcaagtactcccggtggcgtgcaaaaggacaggctttgcctgatgtggtggcaaaataccaggctttgggggccgagctcaacgtcctgcccttctgcagccaattcatccccatggagataatcagtgccccccggcatggctccatcatctatcacccgtcactgctccctaggcaccgaggggcctcggccattcacaactggatccgcgggaacgacaaggtgccgggagcctggacagaggcctgtgaacagaaactgacatttttcaactcaacgctgaacacttcaggcctggtgcccgagggagacgctttgcccatcccaggagcccatcggccaggggtggtcaccaaagcaggactcatcctctttgggaatgatgacaaaatgctgctggtgaagaatattcagctggaggatggcaaaatgatcctggcctcgaacttctttaagggggcagccagcagtgtccttgagctgacagaggcagagctggttactgcggaggctgtgcggagtgtttggcagcggatcctccccaaagtcctggaggttgaagactccactgatttcttcaagtcaggggccgcgtctgtggacgttgtgaggctggtggaggaagtgaaggagctgtgtgatggcctggagttagaaaatgaagatgtgtacatggcatccacctttggggacttcatccagctgttagtgaggaagctgcgaggggacgatgaggagggcgagtgcagcattgactacgtggaaatggcagtgaacaagcgcactgtccgcatgccccaccagctcttcattgggggggagttcgtggatgccgagggcgccaagacctctgagaccatcaatcccaccgatggaagtgtcatctgccaggtatccctggcccaagtcaccgacgtcgacaaggcagtggccgcagccaaggatgcctttgagaatggacggtgggggaagatcagtgcgcgggaccggggccggctgatgtacaggttggcagatctcatggagcagcaccaggaggagctggccaccattgaggccctggatgcgggtgccgtctacacgctggccctgaagacccacgtgggcatgtccatccagaccttccgctactttgctggctggtgtgacaagatccagggctccaccatccccatcaaccaggccagacccaaccgcaacctgaccttgaccaggaaggagcctgttggggtttgtggcatcatcatcccctggaactatcccctgatgatgctgtcctggaagacagctgcctgcctggctgccgggaacacagtggtgatcaagcctgctcaggtgaccccactcacagccttgaagtttgcagagctgacattaaaggccggcattcccaaaggtgtggttaacgtcctcccaggatctggctccctggtcggccagagactctcagaccatcctgatgtgaggaaaatcgggttcacaggctccacagaggtgggcaagcacatcatgaaaagctgtgccataagtaacgtgaagaaggtgtccctggaactgggcgggaagtcacccctcatcatctttgctgactgtgacctcaacaaggctgtgcagatggggatgagttctgttttcttcaacaaaggagagaattgcattgcagcaggccgactctttgtggaggactccattcatgatgagttcgtgcggagagtggtagaagaggtgcggaagatgaaggtgggcaacccgctggacagggacaccgaccacgggccgcagaatcaccatgcccaccttgtgaagctgatggagtactgccagcatggcgtgaaggaaggggccacactggtctgcggcgggaatcaggtccctcggccagggttcttctttgagccaactgttttcacagacgtggaagaccacatgttcatagccaaggaggagtccttcgggcctgtcatgatcatctctcggtttgctgatggggacttggatgccgtgctgtctcgggccaatgccacggaatttggcctggcttctggtgtcttcaccagggacatcaacaaggccctgtatgtcagtgacaagctccaggcaggcactgtgtttgtcaacacgtacaacaagaccgacgtggccgctcccttcggaggattcaaacagtctggatttggcaaagatctaggagaggcggctctgaacgagtacctgcgggtcaagacagtgaccttcgaatactgaagaaaggtctttgtgagaagaaagtccctgcccctccctcgtggctggggccccctccctcttgagcctgggtgcacagcacctcccacctggggggctagtggaagccctcctgcctgcacaccatgtctgcatcttggacgccctctgtccagtcagaagcagcccttggctgggtgaggtgtgcccctcccagggagaataaagcttctgaagag

SEQ ID NO: 95102 - DNA, 2406 bp, Artificial Sequence
  derived and/or modified sequence
atgaagatcgccgtgatcggccagagcctgttcggccaggaggtgtattgccacctcaggaaggaggggcacgaagtagtcggtgtatttacagtgccggacaaggacggaaaggccgatccattgggtctcgaggcagagaaagatggtgtgcctgtttttaaatactctcgatggagggcaaaagggcaagccctgcctgacgtggtagccaagtatcaggccctgggggccgagctgaatgtcctgcccttttgctcccaattcatccccatggagattatatctgcaccacgccacgggtctatcatctaccacccatcactgttgccgaggcaccgcggagcgtcagcgatccacaactggatcagaggtaatgacaaggtccctggcgcctggacagaagcttgcgagcagaaattgactttttttaattccacccttaacactagcggcttagttccggaaggcgatgccttacccatacccggagctcatcgccccggggtcgtgaccaaggccgggctcatcctcttcggaaatgatgacaagatgttgctggtaaaaaatattcagctggaagatggcaagatgatcttagccagtaactttttcaagggagccgcatcttccgttctagagttaaccgaagccgaacttgttaccgccgaggcagtgcgctccgtctggcagagaattctaccaaaagttctggaggtggaagacagtaccgatttcttcaagtcaggggccgccagcgttgacgtcgtgcgcttggtggaggaggttaaggaactgtgcgacgggttggaacttgagaacgaagatgtttatatggcctcaaccttcggagactttatacagctgctagtaaggaagcttcggggggatgacgaggagggtgagtgcagcattgactatgtcgaaatggcagtcaataagcgaaccgtgcggatgccacatcagcttttcattggaggggaatttgtcgacgccgaaggtgccaagacgagcgagaccattaaccctacagatggcagcgttatctgtcaagtgtccctggcccaggtaacagacgtggataaggcggtcgcagcggcgaaggacgcctttgagaacggccgctggggtaaaattagcgcccgcgacagggggcggctcatgtaccgcctggctgacctcatggagcagcatcaagaggagctcgctacgatcgaggcccttgatgcaggtgctgtttatacactcgcactgaaaacccatgtgggcatgagcattcagacctttaggtactttgccggatggtgcgacaaaatacagggaagcaccattccaatcaatcaggcaagacctaatagaaatctgactctgacaagaaaagaacccgttggcgtgtgtggtattatcattccctggaattatccgctgatgatgctctcatggaagaccgccgcctgccttgccgcagggaacaccgttgtcatcaaacctgctcaggtaacaccgctgactgctctcaagttcgctgagctgaccctaaaggccggtattccgaagggagtggtcaacgttctgcccggtagcgggagtctcgttggacagcgcctgtcagatcaccctgacgtcagaaaaattggctttactggtagcaccgaggtgggcaagcacattatgaaaagttgcgctattagtaacgtcaagaaagtgtctctggagctcggcggcaagtccccactcatcattttcgccgactgcgacctgaacaaagctgtacaaatgggaatgtccagcgtgtttttcaacaaaggtgagaattgcatcgcggccggccggctcttcgttgaggactccattcatgatgagttcgtccggagagtcgtggaagaagtgaggaagatgaaggtgggtaacccgctcgacagggatactgaccatgggccacagaatcaccacgcacatctggtgaagctgatggaatactgccaacatggggttaaggagggcgcgacactcgtatgtggcggcaaccaggtacccagacctggattcttcttcgagcccacagtatttacggacgttgaagatcatatgttcattgccaaggaagaaagcttcggcccagtcatgatcatcagccgttttgccgacggggaccttgacgccgtgctgtctcgggctaacgccaccgagtttggactcgcgtctggcgtgtttactcgggatattaataaagctctgtatgtctccgataaactgcaggccggcacggtcttcgtaaacacttataataagactgacgttgcagccccatttggagggtttaaacagtccgggttcggcaaggatctgggagaggctgcccttaacgagtacctgagggtcaagacagtgactttcgagtactag

SEQ ID NO: 95103 - DNA, 303 bp, Artificial Sequence
  derived and/or modified sequence
atgaagatcgccgtgatcggccagagcctgttcggccaggaggtgtactgccatttaaggaaagaaggccatgaggtggtaggcgtgttcactgtgcctgacaaggatggtaaagcagaccctctgggtctggaggccgagaaggatggggtccccgtgtttaagtatagcagatggcgcgcgaaaggtcaagctctgccagatgtcgttgcaaagtatcaggccctgggggccgagctaaatgtgcttcccttctgtagtcagtttatacccatggaaattatcagcgcccccagacattag

SEQ ID NO: 95104 - DNA, 2406 bp, Artificial Sequence
  derived and/or modified sequence
atgaaaatcgctgttatcggccagtccctgtttggacaagaggtctactgtcacctgcgtaaggaaggacatgaggtggtgggcgtttttactgtgcccgacaaggacggcaaggccgatccactgggcttggaagccgagaaagacggagtgccagtatttaagtactctcgctggagagctaaaggccaagctctaccggacgttgtagccaagtatcaagctctcggggcagagctgaacgttctcccgttctgttctcagtttatccctatggagattatctccgcccctcgccacgggtctattatctatcatccaagcctgttacctagacacaggggagcctctgcaatccataactggatccgcggaaatgacaaggttcctggggcatggaccgaggcatgtgagcagaagttgacattctttaactcaactttgaatacctctggtttggtcccggaaggggacgccctcccaatccccggagctcaccgacctggggtagtcacaaaagctggcttaatcctatttgggaacgatgacaagatgctgctggtaaagaacatacagttagaggacggcaaaatgatcctggcctcgaattttttcaaaggagcagcctcatctgtgttggaattgactgaggccgagctcgtgaccgccgaggcagtgaggagcgtttggcaacgcatcctgcctaaggtgctcgaggtggaggatagcaccgacttcttcaaaagcggggctgcatcagtcgacgttgtccgacttgtggaagaggtgaaagagttgtgcgacgggcttgaactggagaacgaggacgtctacatggcctccacatttggagactttattcaattactcgttcggaagctccgcggtgacgatgaggaaggggagtgtagcatagactacgtggagatggctgtcaataagagaaccgttagaatgccccatcagctgtttattgggggagagttcgtagatgctgaaggcgcaaaaaccagcgagaccatcaatccgaccgacggttccgtgatatgtcaggtcagcttggctcaggtaacagacgtcgacaaggccgtagctgctgctaaggatgccttcgagaacgggagatggggaaagatcagcgccagagatcgcggtcgccttatgtacagactcgccgacctgatggagcagcaccaggaagagttggctaccattgaagctcttgatgccggtgccgtgtacacattagcgctgaagacacatgtcggcatgagcatccagacattccgctacttcgccggttggtgtgacaagatccagggttctaccatacccattaatcaggcccgtcccaatcgtaacctgacattaaccaggaaagagccagtcggcgtgtgtggaatcattataccatggaactatccattaatgatgttgtcctggaagactgctgcttgtctggcggcaggcaacaccgtggtgatcaaaccagctcaggtgactcccctgaccgcactgaaattcgctgaactaactttaaaggcaggcattcccaagggtgtggtcaatgtcctgccagggagtgggtcgctcgttggacaaaggctgtcagaccatcctgatgtgaggaagattggtttcacaggctccactgaggtcggtaagcacattatgaaatcttgtgccataagcaacgtcaagaaggtgagtcttgagttgggcggaaagtccccccttattatctttgcggactgtgacctcaacaaggcggtacagatgggcatgagctcagtgttttttaataaaggggagaattgtattgccgcaggacggctgttcgtggaagacagcattcatgatgagttcgtccggagagtggtcgaggaagtgaggaaaatgaaggtgggcaatccattggacagagacactgatcacggacctcagaatcatcacgcacatttagtaaagctgatggagtactgtcagcacggggtcaaagagggcgctaccttggtttgcggtggaaaccaggtgcccaggccaggatttttcttcgagcccacggtcttcacagacgttgaggaccatatgtttatcgcgaaagaggagtcattcggtcctgtgatgatcataagcagatttgccgacggagacctggacgcagttctttcccgggctaacgccaccgaattcgggctcgcctcaggagtctttactcgcgacatcaataaagccctgtatgtgtcagacaaactgcaggccggaacagtctttgtgaacacgtacaacaagacagacgttgcagcaccgttcggtgggttcaaacaatccggttttgggaaggacctcggagaagctgcactgaacgagtatctccgggttaagactgtgacctttgagtattag

SEQ ID NO: 95105 - DNA, 303 bp, Artificial Sequence
  derived and/or modified sequence
atgaaaattgccgttatcggacaatctttatttggacaggaagtgtactgtcacctgcgaaaggaggggcatgaagtggtgggcgtgttcaccgtccccgataaggatggcaaagctgatccattggggctggaagcagaaaaggatggtgtccccgtcttcaaatacagccgctggcgcgctaagggccaagcacttcccgatgtggtagccaaataccaggcattgggtgccgagttaaacgtccttcccttttgttcacagtttattcctatggagattatttccgctcctcgacactag

SEQ ID NO: 95106 - DNA, 2406 bp, Artificial Sequence
  derived and/or modified sequence
atgaagatcgccgtgatcggccagagcctgttcggccaggaggtgtactgccacctgagaaaggagggccacgaggtggtgggcgtgttcaccgtgcccgacaaggacggcaaggccgaccccctgggcctggaggccgagaaggacggcgtgcccgtgttcaagtacagcagatggagagccaagggccaggccctgcccgacgtggtggccaagtaccaggccctgggcgccgagctgaacgtgctgcccttctgcagccagttcatccccatggagatcatcagcgcccccagacacggcagcatcatctaccaccccagcctgctgcccagacacagaggcgccagcgccatccacaactggatcagaggcaacgacaaggtgcccggcgcctggaccgaggcctgcgagcagaagctgaccttcttcaacagcaccctgaacaccagcggcctggtgcccgagggcgacgccctgcccatccccggcgcccacagacccggcgtggtgaccaaggccggcctgatcctgttcggcaacgacgacaagatgctgctggtgaagaacatccagctggaggacggcaagatgatcctggccagcaacttcttcaagggcgccgccagcagcgtgctggagctgaccgaggccgagctggtgaccgccgaggccgtgagaagcgtgtggcagagaatcctgcccaaggtgctggaggtggaggacagcaccgacttcttcaagagcggcgccgccagcgtggacgtggtgagactggtggaggaggtgaaggagctgtgcgacggcctggagctggagaacgaggacgtgtacatggccagcaccttcggcgacttcatccagctgctggtgagaaagctgagaggcgacgacgaggagggcgagtgcagcatcgactacgtggagatggccgtgaacaagagaaccgtgagaatgccccaccagctgttcatcggcggcgagttcgtggacgccgagggcgccaagaccagcgagaccatcaaccccaccgacggcagcgtgatctgccaggtgagcctggcccaggtgaccgacgtggacaaggccgtggccgccgccaaggacgccttcgagaacggcagatggggcaagatcagcgccagagacagaggcagactgatgtacagactggccgacctgatggagcagcaccaggaggagctggccaccatcgaggccctggacgccggcgccgtgtacaccctggccctgaagacccacgtgggcatgagcatccagaccttcagatacttcgccggctggtgcgacaagatccagggcagcaccatccccatcaaccaggccagacccaacagaaacctgaccctgaccagaaaggagcccgtgggcgtgtgcggcatcatcatcccctggaactaccccctgatgatgctgagctggaagaccgccgcctgcctggccgccggcaacaccgtggtgatcaagcccgcccaggtgacccccctgaccgccctgaagttcgccgagctgaccctgaaggccggcatccccaagggcgtggtgaacgtgctgcccggcagcggcagcctggtgggccagagactgagcgaccaccccgacgtgagaaagatcggcttcaccggcagcaccgaggtgggcaagcacatcatgaagagctgcgccatcagcaacgtgaagaaggtgagcctggagctgggcggcaagagccccctgatcatcttcgccgactgcgacctgaacaaggccgtgcagatgggcatgagcagcgtgttcttcaacaagggcgagaactgcatcgccgccggcagactgttcgtggaggacagcatccacgacgagttcgtgagaagagtggtggaggaggtgagaaagatgaaggtgggcaaccccctggacagagacaccgaccacggcccccagaaccaccacgcccacctggtgaagctgatggagtactgccagcacggcgtgaaggagggcgccaccctggtgtgcggcggcaaccaggtgcccagacccggcttcttcttcgagcccaccgtgttcaccgacgtggaggaccacatgttcatcgccaaggaggagagcttcggccccgtgatgatcatcagcagattcgccgacggcgacctggacgccgtgctgagcagagccaacgccaccgagttcggcctggccagcggcgtgttcaccagagacatcaacaaggccctgtacgtgagcgacaagctgcaggccggcaccgtgttcgtgaacacctacaacaagaccgacgtggccgcccccttcggcggcttcaagcagagcggcttcggcaaggacctgggcgaggccgccctgaacgagtacctgagagtgaagaccgtgaccttcgagtactag

SEQ ID NO: 95107 - DNA, 303 bp, Artificial Sequence
  derived and/or modified sequence
atgaagatcgccgtgatcggccagagcctgttcggccaggaggtgtactgccacctgagaaaggagggccacgaggtggtgggcgtgttcaccgtgcccgacaaggacggcaaggccgaccccctgggcctggaggccgagaaggacggcgtgcccgtgttcaagtacagcagatggagagccaagggccaggccctgcccgacgtggtggccaagtaccaggccctgggcgccgagctgaacgtgctgcccttctgcagccagttcatccccatggagatcatcagcgcccccagacactag

SEQ ID NO: 95108 - protein, 193 aa, Artificial Sequence
  derived and/or modified sequence
MFAPRLLDFQKTKYARFMNHRVPAHKRYQPTEYEHAANCATHAFWIIPSILGSSNLYFLSDDDWETISAWIYGLGLCGLFVVSTVFHTISWKKSHLRMVEHCLHMFDRMVIYFFIAASYAPWLNLRELGPWASHMRWLVWIMASVGTIYVFFFHERYKLVELLCYVVMGFFPALVILSMAGKLRPGMTCLKRQ

SEQ ID NO: 95109 - DNA, 582 bp, Artificial Sequence
  derived and/or modified sequence
atgttcgctccccgcttactggacttccagaagactaagtatgccagattcatgaaccaccgggtgcccgcacacaagagatatcagccaactgaatacgagcacgccgcaaactgcgcaacccatgcattctggatcataccctctatcttgggctccagtaatttatatttcttatctgacgatgactgggaaacaattagcgcttggatctatggcttgggattgtgtggactgttcgtcgtgagcacagtgttccacacgataagctggaagaagtcccatctgcgaatggtggaacactgcctgcacatgttcgaccgcatggtgatctacttcttcatcgcggccagctacgccccttggctgaatctcagagagctcggtccatgggccagtcatatgcgctggctagtctggattatggcatcagtgggcactatatacgtcttcttctttcacgaacggtacaagctcgtggaactcctgtgctatgtggtgatggggttctttccagctctggtgatactgagcatggcaggtaagctacgcccaggaatgacatgcctgaagcgacagtag

SEQ ID NO: 95110 - DNA, 582 bp, Artificial Sequence
  derived and/or modified sequence
atgtttgccccccggctgctggacttccagaagaccaagtatgcccgcttcatgaaccaccgggtgcctgcccacaagcgctaccagcccacagaatatgaacatgctgccaactgtgccacccacgccttctggatcatccccagcatcctgggcagcagcaacctgtacttcctgagtgatgatgactgggagaccatcagcgcctggatctacggcctgggcctgtgtggcctgtttgtggtgtccaccgtcttccacaccatctcctggaagaagagccacctgaggatggtggagcactgcctgcacatgtttgacaggatggtgatctacttcttcatcgccgccagctatgccccctggctgaacctgcgggagctgggcccctgggccagccacatgcgctggctggtgtggatcatggcctctgtgggcaccatctacgtgttcttcttccacgagcgctacaagctggtggagctgctgtgctacgtggtgatgggcttcttccctgccctggtgatcctgtccatggccggcaagctgcggcccggcatgacctgcctgaagaggcagtag

SEQ ID NO: 95111 - DNA, 582 bp, Artificial Sequence
  derived and/or modified sequence
atgttcgccccccggctgctggacttccagaagaccaagtacgccagatttatgaaccaccgcgtgcctgctcacaaaaggtatcagcctacggaatatgaacacgcagctaactgcgctacccatgctttttggattatcccatctattctggggagcagtaatctgtacttcttgtccgatgacgattgggaaactatttccgcctggatctatggcttaggactgtgcggactcttcgtagtgagcacggtattccacaccatttcctggaaaaaaagccacctgaggatggttgagcactgtctccacatgtttgacagaatggtgatttacttctttattgctgcctcttatgctccatggctgaacttacgggagctcggcccttgggccagtcatatgcgctggctcgtctggatcatggcgtcagttggaaccatctatgtctttttctttcacgagcgctacaaattggtggaactgctatgctatgtcgtgatgggtttctttccggcgcttgtcatcttgagtatggccggcaagctgcgacccggtatgacgtgtctgaagagacagtag

SEQ ID NO: 95112 - DNA, 582 bp, Artificial Sequence
  derived and/or modified sequence
atgttcgctcccaggctccttgattttcagaaaactaaatatgcaagatttatgaaccaccgagtgcccgcacacaaacgctaccagcccaccgaatacgagcatgctgctaattgcgccactcacgccttttggattataccaagtatcctgggttcatctaacctctacttcttaagtgacgatgactgggagactatcagcgcttggatttacggcctgggactctgcggtctgtttgtggttagtacagtgttccacacaatatcatggaaaaagtcccatctgcggatggttgaacactgtttgcacatgttcgatcgaatggttatttacttttttatagcagcatcatacgccccttggctgaaccttcgcgagctggggccttgggcatcgcacatgagatggcttgtgtggataatggcctccgtgggcacaatctacgtcttctttttccatgagcgatataagctcgtggaactgctgtgttatgtcgttatggggttcttccctgcgctggtgatactgtccatggccggaaagctgaggcctggaatgacatgcctgaagcggcagtag

SEQ ID NO: 95113 - DNA, 582 bp, Artificial Sequence
  derived and/or modified sequence
atgttcgcccccagactgctggacttccagaagaccaagtacgccagattcatgaaccacagagtgcccgcccacaagagataccagcccaccgagtacgagcacgccgccaactgcgccacccacgccttctggatcatccccagcatcctgggcagcagcaacctgtacttcctgagcgacgacgactgggagaccatcagcgcctggatctacggcctgggcctgtgcggcctgttcgtggtgagcaccgtgttccacaccatcagctggaagaagagccacctgagaatggtggagcactgcctgcacatgttcgacagaatggtgatctacttcttcatcgccgccagctacgccccctggctgaacctgagagagctgggcccctgggccagccacatgagatggctggtgtggatcatggccagcgtgggcaccatctacgtgttcttcttccacgagagatacaagctggtggagctgctgtgctacgtggtgatgggcttcttccccgccctggtgatcctgagcatggccggcaagctgagacccggcatgacctgcctgaagagacagtag

SEQ ID NO: 95114 - protein, 195 aa, Artificial Sequence
  derived and/or modified sequence
MSYVFVNDSSQTNVPLLQACIDGDFNYSKRLLESGFDPNIRDSRGRTGLHLAAARGNVDICQLLHKFGADLLATDYQGNTALHLCGHVDTIQFLVSNGLKIDICNHQGATPLVLAKRRGVNKDVIRLLESLEEQEVKGFNRGTHSKLETMQTAESESAMESHSLLNPNLQQGEGVLSSFRTTWQEFVEDLGFWRV

SEQ ID NO: 95115 - protein, 232 aa, Artificial Sequence
  derived and/or modified sequence
MSYVFVNDSSQTNVPLLQACIDGDFNYSKRLLESGFDPNIRDSRGRTGLHLAAARGNVDICQLLHKFGADLLATDYQGNTALHLCGHVDTIQFLVSNGLKIDICNHQGATPLVLAKRRGVNKDVIRLLESLEEQEVKGFNRGTHSKLETMQTAESESAMESHSLLNPNLQQGEGVLSSFRTTWQEFVEDLGFWRVLLLIFVIALLSLGIAYYRRTLRLGSFARQDRSRIQAI

SEQ ID NO: 95116 - protein, 82 aa, Artificial Sequence
  derived and/or modified sequence
MSYVFVNDSSQTNVPLLQACIDGDFNYSKRLLESGFDPNIRDSRGRTGLHLAAARGNVDICQLLHKFGADLLATDYQGNTAL

SEQ ID NO: 95117 - protein, 86 aa, Artificial Sequence
  derived and/or modified sequence
MSYVFVNDSSQTNVPLLQACIDGDFNYSKRLLESGFDPNIRDSRGRTGLHLAAARGNVDICQLLHKFGADLLATDYQGNTALHLCG

SEQ ID NO: 95118 - protein, 103 aa, Artificial Sequence
  derived and/or modified sequence
MSYVFVNDSSQTNVPLLQACIDGDFNYSKRLLESGFDPNIRDSRGRTGLHLAAARGNVDICQLLHKFGADLLATDYQGNTALHLCGHVDTIQFLVSNGLKIDI

SEQ ID NO: 95119 - DNA, 699 bp, Artificial Sequence
  derived and/or modified sequence
atgagctacgtgttcgtgaacgacagcagccagaccaacgtgcccctgctgcaggcctgcatcgacggcgacttcaactacagcaagagactgctggagagcggcttcgaccccaacatcagagacagcagaggcagaaccggcctgcacctggccgccgccagaggcaacgtggacatctgccagctgctgcacaagttcggcgccgacctgctggccaccgactaccagggcaacaccgccctgcacctgtgcggccacgtggacaccatccagttcctggtgagcaacggcctgaagatcgacatctgcaaccaccagggcgccacccccctggtgctggccaagagaagaggcgtgaacaaggacgtgatcagactgctggagagcctggaggagcaggaggtgaagggcttcaacagaggcacccacagcaagctggagaccatgcagaccgccgagagcgagagcgccatggagagccacagcctgctgaaccccaacctgcagcagggcgagggcgtgctgagcagcttcagaaccacctggcaggagttcgtggaggacctgggcttctggagagtgctgctgctgatcttcgtgatcgccctgctgagcctgggcatcgcctactacagaagaaccctgagactgggcagcttcgccagacaggacagaagcagaatccaggccatctag

SEQ ID NO: 95120 - DNA, 699 bp, Artificial Sequence
  derived and/or modified sequence
atgtcctatgtttttgtcaacgattcctcccagactaacgtcccactgctgcaggcatgtattgacggcgactttaactacagtaagaggttactggagtccggatttgacccaaacattcgcgattcaaggggcagaaccggtctgcacttggccgctgctcgcggtaacgtagatatctgtcaactgctgcacaagttcggagcagatctgcttgctaccgactatcaggggaatacggcattgcatctgtgtggacacgttgacactatccagtttttagtgtccaacgggcttaaaattgatatctgcaatcaccagggtgctacgccactggtccttgctaaaagacgaggcgtgaataaggatgttattcgactactggaaagtctggaggagcaagaggtaaagggtttcaaccggggaacgcactccaagttggaaactatgcagacagctgaaagcgagagtgctatggagtcccattccttattaaatcctaaccttcagcagggtgaaggggtcctgagttcttttcgcacaacgtggcaggaattcgtggaagacctggggttctggagagttcttcttctgattttcgtaatcgccctgctgagcctggggatcgcttactaccgtcggactttgagattaggcagcttcgctcgccaagatcggtcgaggatccaagccatctag

SEQ ID NO: 95121 - DNA, 699 bp, Artificial Sequence
  derived and/or modified sequence
atgtcctatgtgtttgtgaatgacagcagccagaccaacgtgcccctgctgcaggcctgcattgatggagacttcaactacagcaagaggctgctggagagcggctttgaccccaacatccgggacagccggggccgcacaggcctgcacctggccgccgcccggggaaatgtggacatctgccagctgctgcacaagtttggagctgacctgctggccacagactaccagggcaacacagccctgcacctgtgtggccacgtggacaccatccagttcctggtgtccaatggcctgaagattgacatctgcaaccaccagggcgccacccccctggtgctggccaagagaagaggagtgaacaaggatgtgatccggctgctggagagcctggaggagcaggaggtgaagggcttcaacagaggcacccacagcaagctggagaccatgcagacagctgagagcgagagcgccatggagagccacagcctgctgaaccccaacctgcagcagggcgagggcgtgctgagcagcttccgcaccacctggcaggagtttgtggaggacctgggcttctggagggtgctgctgctgatcttcgtcatcgccctgctgagcctgggcatcgcctactacagaaggaccctgcggctgggcagctttgcccggcaggacaggagccgcatccaggccatctag

SEQ ID NO: 95122 - DNA, 699 bp, Artificial Sequence
  derived and/or modified sequence
atgagctacgtgttcgtgaacgacagcagccagaccaacgtgcccctgttacaggcatgtatcgatggagatttcaactactcaaaacggttgcttgagagtgggttcgatccaaacatccgcgactctaggggaaggacaggactccacctggctgcagcccgcggaaatgtggatatttgccaactgttgcataagtttggcgcagaccttcttgccactgattatcagggcaacacagccctacacttatgcggtcatgtggacaccattcagtttctcgtttccaatgggctgaagatcgatatctgcaaccaccagggcgcaactcccctggtgctggctaagagacgaggcgtaaacaaggatgtgatcaggctgctggaaagcctagaggaacaggaagtgaagggtttcaataggggcacacacagtaagctggaaactatgcagaccgctgaatccgaatctgcgatggaatcgcattccttgttgaaccctaacctgcagcagggggaaggtgtgctcagtagtttccgcacaacgtggcaagaattcgttgaagatctaggcttctggcgtgtgcttctcctaatctttgtgattgcactgctgtcgctggggatcgcgtattataggcgtaccctgcgcttggggtcattcgccaggcaggacaggtcacgaatccaggctatctag

SEQ ID NO: 95123 - DNA, 1686 bp, Artificial Sequence
  derived and/or modified sequence
gccgctgtcgctgctgctcgttcgagtcgcagatccttgccagcacattacagaatatttttgttgaaccttcttgagaattcagagaaactgctgagtgaccactgaacgaaaagatctaatcttaaggcttacgcgtgttccatccaccacatcagaacaatgtcgtatgtttttgtaaatgattcttctcagactaacgtgcccttgctgcaagcctgtattgatggggactttaattattccaagcggcttttggaaagtggctttgacccaaatattcgtgacagcaggggcagaacaggccttcaccttgcagcagctcgagggaatgtagacatctgccagttactgcataaattcggtgccgatcttctggccacagattatcaaggaaacacagctcttcacctctgtggccatgtggatactatccaatttttggtttccaatggactcaaaattgatatttgcaatcatcaaggtgctacccctttagttctggcaaagcgcagaggagtaaataaagatgtcatccgattgctggaatctttggaagaacaggaggtgaaaggatttaacagaggaacccactcgaaactggagaccatgcaaacagctgagagtgaaagtgccatggaaagccattcactcctcaatcccaacctgcagcaaggtgaaggagtcctctccagcttccgaaccacgtggcaggagtttgtggaggatctgggcttctggagagtattgctgttgatcttcgtcattgctttgctgtctcttggcattgcttattatagaaggacactgaggcttggaagctttgcaaggcaagacagaagccgaatccaggccatctaatctctaggtcagtgtcctgtgctcctgagcctcagaaggcaagaaagaagggatacagacgtcagcgtccctgttgggtggggctgtttccgtcacgacttgtgtcatggagcatcatctcaaagctctgcagttaggaggcagagggacctgctaccacctgtcccctcctctccagtcctgccctgcaggcagcccgggcacctgctgtcttcctggcctcccagatcctcaagatggagctccaggaaccatcccctcctccgcccgggcaggatgccacctccacaaggcaaatcacatccatttgatcttgaacaaaaggctgccgtggtgtctgaaatgacaactcccaggcgggtgatgtcatgctgttttgtttgtctccatggactgtggggatccaatttcagttgtgaagaaaacggtctggggaaaaaagttacttcattcggaaaattccgagaagccataaatacagtttgcagctgaggaaagcactttcacactcagacaatggatttgggtggaagaaaagacttcccgcccctaaggctgagccccttcactcccacccatggccaccggcagcccgcttctgccagcagatagatgtgtgcatggctctggcaagatctcaagcaaccccccttccccaaggagactctccgtgacccagtggcaagttggcaggggatgtgttttccctggttctcatcctaaattgtctcctgcccagagtccatccctgaagtatcaggcacttccctctcgtaaatggttgacctgcatctctgagctgctgttaaagcaaatttaaaataa

SEQ ID NO: 95124 - DNA, 699 bp, Artificial Sequence
  derived and/or modified sequence
atgagctacgtgttcgttaatgactcaagccagacaaacgtgcctctcctacaagcatgtatcgatggcgacttcaactactccaagcgactactggagagcgggtttgacccaaatatccgagatagtaggggccgtacgggcctccaccttgctgccgcacgtggcaacgtcgacatttgccagcttttacataagtttggtgccgacctgttagccacggattaccagggaaatactgcgttgcatctgtgcggccacgtggacactatccaatttctagtgagcaatggactcaagatagatatttgcaaccatcaaggcgcaactcctctagttctggccaaaagaagaggggtcaacaaagacgtcatccgcttactggaaagcttggaggaacaggaggtaaagggatttaatagggggacacattcaaaattggaaaccatgcagactgctgaatctgaatccgccatggaatctcacagcttgttgaaccccaacttgcagcagggcgagggtgtgttgagctcctttaggactacctggcaggaattcgtggaagatttgggattctggagggtcctgttgctcatctttgttattgccctcctttctctaggcatcgcatattatagacggactttaagactcggatccttcgccagacaagacagaagccgcatccaggccatctag

SEQ ID NO: 95125 - protein, 598 aa, Artificial Sequence
  derived and/or modified sequence
MAFSGIYKLDDGKPYLNNCFPARNLLRVPEEGQGHWLVVQKGNLKKKPKGLVGAQAERRESLKATSFEFKGKKESRRENQVDLPGHILDQAFLLKHHCVRKPSDLCTINAKENDFKHFHSVIYINASENLLPLEAFHTFPALKELDLAFNGIKTIYVKYGDFKLLEFLDLSFNSLTVEAICDLGILPHLRVLLLTGNGLTSLPPNLAVAEQEASVTSLTSKRYILRFPALETLMLDDNRLSNPSCFASLAGLRRLKKLSLDENRIIRIPYLQQVQLYDESVDWNGGRGSPHKEPQFMLQSKPRMLEDSDEQLDYTVLPMKKDVDRTGVPPLLKSFLQERLGIHLIRRKIVKPKHHVLMSRKESWKVKSEIPKVPKQPLVLHHPRMTTTKSPSKDMLEPEAELAEDLPTTKSTSVESEMPTENLEGHSPSCRTFVPLPPICSNSTVHSEETLSHLSDTTVRLSPERPSDEDSKSTESIFLTQVSELPSSVIHKDDLELKEKDQKKPPTAPREVKGTRRKLPTAFLPSKYHGYEELLTAKPDPAFIEPKGIQKNAQALQQMLKHPLLCHSSKPKLDTLQKPYVHKEKRVLSCTSGQNGGW

SEQ ID NO: 95126 - DNA, 1797 bp, Artificial Sequence
  derived and/or modified sequence
atggccttcagcggcatctacaagctggacgacggcaagccctacctgaacaactgcttccccgccagaaacctgctgagagtgcccgaggagggccagggccactggctggtggtgcagaagggcaacctgaagaagaagcccaagggcctggtgggcgcccaggccgagagaagagagagcctgaaggccaccagcttcgagttcaagggcaagaaggagagcagaagagagaaccaggtggacctgcccggccacatcctggaccaggccttcctgctgaagcaccactgcgtgagaaagcccagcgacctgtgcaccatcaacgccaaggagaacgacttcaagcacttccacagcgtgatctacatcaacgccagcgagaacctgctgcccctggaggccttccacaccttccccgccctgaaggagctggacctggccttcaacggcatcaagaccatctacgtgaagtacggcgacttcaagctgctggagttcctggacctgagcttcaacagcctgaccgtggaggccatctgcgacctgggcatcctgccccacctgagagtgctgctgctgaccggcaacggcctgaccagcctgccccccaacctggccgtggccgagcaggaggccagcgtgaccagcctgaccagcaagagatacatcctgagattccccgccctggagaccctgatgctggacgacaacagactgagcaaccccagctgcttcgccagcctggccggcctgagaagactgaagaagctgagcctggacgagaacagaatcatcagaatcccctacctgcagcaggtgcagctgtacgacgagagcgtggactggaacggcggcagaggcagcccccacaaggagccccagttcatgctgcagagcaagcccagaatgctggaggacagcgacgagcagctggactacaccgtgctgcccatgaagaaggacgtggacagaaccggcgtgccccccctgctgaagagcttcctgcaggagagactgggcatccacctgatcagaagaaagatcgtgaagcccaagcaccacgtgctgatgagcagaaaggagagctggaaggtgaagagcgagatccccaaggtgcccaagcagcccctggtgctgcaccaccccagaatgaccaccaccaagagccccagcaaggacatgctggagcccgaggccgagctggccgaggacctgcccaccaccaagagcaccagcgtggagagcgagatgcccaccgagaacctggagggccacagccccagctgcagaaccttcgtgcccctgccccccatctgcagcaacagcaccgtgcacagcgaggagaccctgagccacctgagcgacaccaccgtgagactgagccccgagagacccagcgacgaggacagcaagagcaccgagagcatcttcctgacccaggtgagcgagctgcccagcagcgtgatccacaaggacgacctggagctgaaggagaaggaccagaagaagccccccaccgcccccagagaggtgaagggcaccagaagaaagctgcccaccgccttcctgcccagcaagtaccacggctacgaggagctgctgaccgccaagcccgaccccgccttcatcgagcccaagggcatccagaagaacgcccaggccctgcagcagatgctgaagcaccccctgctgtgccacagcagcaagcccaagctggacaccctgcagaagccctacgtgcacaaggagaagagagtgctgagctgcaccagcggccagaacggcggctggtag

SEQ ID NO: 95127 - DNA, 1797 bp, Artificial Sequence
  derived and/or modified sequence
atggcgttcagtggcatctataaactagatgacggcaaaccctatctcaataattgttttcccgccagaaatcttctacgggttcccgaggaggggcagggacactggttggtggtgcagaagggaaatctcaagaagaaacccaagggtctggtcggcgcacaggccgagagacgagaatccctaaaagctacttcattcgaatttaagggaaagaaagagagtcggagggaaaatcaggtggacctccctggacacattttggaccaggccttcttgttaaaacaccactgtgtcagaaaaccaagtgacctttgcacgataaacgctaaggagaatgatttcaaacacttccacagcgtcatctatatcaatgcatccgaaaatctattgccacttgaggcctttcacacatttccagcacttaaagaactcgatcttgcattcaatggtatcaagactatatatgtgaagtacggggattttaaattgctggaattcctcgatctcagttttaatagtctaacggtggaggccatctgcgaccttggtatcctgccgcatctgagagtgttgctgctgaccggcaacggcctcacttcccttccaccaaatttagcagtcgccgaacaagaggcctccgttacttccctgacgtccaagaggtatatcctgaggttccctgcattagagactctgatgttggacgataaccgactgagcaatccaagttgcttcgcgtctctggcaggtctccgacgcttaaagaaacttagtcttgacgagaacaggatcatccgtatcccctacctccagcaggttcaactgtacgacgagagcgtggactggaacggcgggcgtgggtccccccacaaagagccccagttcatgctacagtccaaaccgagaatgttggaggactctgacgagcaactcgattacacagtactgcccatgaagaaagacgttgatagaactggagtgccgccgctacttaagtcattcctgcaggagcggctcggaattcatttgatcagacgaaagattgtgaaaccaaagcaccatgtgctgatgtcacgaaaggaaagttggaaggtcaagtccgagatcccgaaagtcccaaaacagcccctggttctgcaccatcctcgcatgacaaccacgaaatccccaagtaaagacatgttggaacctgaggcagaactggcagaggaccttcctacgaccaagtcaacgtccgtcgagtctgaaatgcccacagagaacctcgagggacactctccctcctgtcggacttttgttcctctcccacctatctgttctaactccaccgtccactctgaggagacgctatcgcacttgagcgatacaactgtacggctgagcccagaacggccatctgacgaagattctaaatctacggaatcaatcttcctgacccaggttagcgaattgccgagctctgtgatacacaaggatgacttggagctgaaggaaaaagaccagaagaagccaccaaccgcaccaagagaggtcaaggggacaagaaggaagctgcccactgctttcttaccttccaaataccacggctatgaagaattactgactgccaaacccgacccagccttcatcgagcccaagggaattcagaagaatgcacaggccctgcagcaaatgttgaagcacccgctcttgtgtcatagcagtaaacccaagttggataccctacaaaaaccttatgtccataaagaaaagagagttctgtcttgcactagtggccaaaatggaggatggtag

SEQ ID NO: 95128 - DNA, 1797 bp, Artificial Sequence
  derived and/or modified sequence
atggccttcagcggcatctacaagctggatgatggcaagccctacctgaacaactgcttccctgccaggaacctgctgcgggtgcctgaggagggccagggccactggctggtggtgcagaagggcaacctgaagaagaagcccaagggcctggtgggcgcccaggccgagcggcgggagagcctgaaggccaccagctttgagttcaagggcaagaaggagagccggcgggagaaccaggtggacctgcccggccacatcctggaccaggccttcctgctgaagcaccactgtgtgaggaagcccagcgacctgtgcaccatcaatgccaaggaaaatgacttcaagcacttccacagcgtcatctacatcaatgccagcgagaacctgctgcccctggaggccttccacaccttccctgccctgaaggagctggacctggccttcaacggcatcaagaccatctacgtgaagtatggagacttcaagctgctggagttcctggacctgtccttcaacagcctgactgtggaggccatctgtgacctgggcatcctgccccacctgcgggtgctgctgctgactggaaatggcctgaccagcctgccccccaacctggccgtggccgagcaggaggcctctgtgaccagcctgaccagcaagcgctacatcctgcgcttccctgccctggagaccctgatgctggatgacaaccggctgagcaaccccagctgctttgccagcctggccggcctgcggcggctgaagaagctgagcctggatgagaaccgcatcatccgcatcccctacctgcagcaggtgcagctgtatgatgagagcgtggactggaatggaggccggggcagcccccacaaggagccccagttcatgctgcagagcaagcccaggatgctggaggacagtgatgagcagctggactacacagtgctgcccatgaagaaggatgtggacagaactggagtgccccccctgctgaagagcttcctgcaggagcggctgggcatccacctgatccggaggaagatcgtgaagcccaagcaccacgtgctgatgagcaggaaggagagctggaaggtgaagtctgagatccccaaggtgcccaagcagcccctggtgctgcaccaccccaggatgaccaccaccaagagccccagcaaggacatgctggagcctgaggccgagctggccgaggacctgcccaccaccaagagcacctctgtggagagcgagatgcccacagagaacctggagggccacagccccagctgcaggacctttgtgcccctgccccccatctgcagcaacagcacagtgcacagcgaggagaccctgagccacctgagtgacaccaccgtgcggctgagccctgagcggcccagtgatgaggacagcaagagcacagagagcatcttcctgacccaggtgtctgagctgcccagcagcgtcatccacaaggatgacctggagctgaaggagaaggaccagaagaagcccccaacagccccccgggaggtgaagggcaccaggaggaagctgcccacagccttcctgcccagcaagtaccacggctatgaggagctgctgacagccaagccagaccctgccttcatcgagcccaagggcatccagaagaatgcccaggccctgcagcagatgctgaagcaccccctgctgtgccacagcagcaagcccaagctggacaccctgcagaagccctacgtgcacaaggagaagagggtgctgagctgcaccagcggccagaatggaggctggtag

SEQ ID NO: 95129 - DNA, 1797 bp, Artificial Sequence
  derived and/or modified sequence
atggccttcagcggcatctacaagctggacgacggcaagccctacttgaacaattgcttccccgccagaaacctgctgcgggtaccggaggaggggcagggccactggctcgtggttcagaaaggcaatttgaaaaagaaacctaaggggctggttggggcccaggcggaacgccgagaatcactgaaagcaacgagcttcgaatttaaagggaagaaggaatctcgcagggagaatcaggtggacctccccggtcatattctcgatcaggctttcctgttgaagcatcattgcgtccgcaaaccatccgacttatgcaccatcaacgccaaggagaacgacttcaagcactttcacagcgtgatctatatcaacgccagcgaaaacctcctgcctctcgaggcctttcacacctttcccgctctcaaggaactagacctcgccttcaacgggatcaaaactatatatgtcaaatatggagactttaaactgctggagtttctagacctcagttttaatagtctgacagtggaagccatctgcgatttgggaatcctgccgcacttaagggtgctgctgttgactggtaatggtctcacgtccctaccacctaacttggctgtcgccgagcaagaggcttccgtcacctctttgacaagcaagcgttatattctccgattcccggcactggaaacgttgatgctcgacgataaccgtttgagcaaccccagctgttttgcgagcctggctggcctccgacggctgaagaagttatcactcgatgagaacaggataatccgcattccttacctgcagcaggtgcaattgtatgacgaatccgtcgactggaacggcggacgcgggagcccccataaggagccccagttcatgctgcagtctaagccccgcatgctcgaagatagcgacgaacaattggactataccgtgctgcctatgaaaaaagacgttgatcgcaccggagtgccgccacttttgaagtcatttcttcaagaaagacttggaattcacctcattcggcgaaagatcgtcaaacctaagcaccatgtccttatgtcccgaaaggaatcgtggaaagtcaaaagcgaaattcctaaggtcccaaagcagccccttgtgctgcaccatccaaggatgaccacaactaagtccccaagtaaggatatgctcgaacccgaagcggagctcgcggaggatctgccaacgacgaagagcacttcggtggaatcagagatgcccactgaaaacctagaaggacacagcccctcatgcaggactttcgtccccctcccaccaatttgtagcaatagcacagtgcactccgaagaaaccctgagccacctgtccgataccaccgtgagactctcccccgagcggccatccgacgaggatagtaaaagcacagagtctatattcctgacgcaggtcagcgaactgccctcctccgtgattcacaaagatgatctggagctgaaagaaaaggaccagaagaagccaccaacagctcctcgggaggtcaaaggcacaaggcgcaagttgcccaccgcgtttctgccaagtaaataccacggctacgaagaacttctgactgccaaacctgatcctgcattcattgagcctaagggcatacagaagaatgctcaggcattgcagcaaatgctcaaacaccccttgttgtgtcactcttcgaaacccaagcttgacaccctgcaaaaaccatacgtccacaaagaaaagcgagtgttgagctgcacgtctggacagaatggaggatggtag

SEQ ID NO: 95130 - DNA, 1797 bp, Artificial Sequence
  derived and/or modified sequence
atggcattttcaggtatctacaaactcgacgacggcaagccttatctgaataactgctttcctgccagaaatctgctgcgtgtgcccgaggaaggacaaggccactggctggttgtgcagaaagggaacttgaaaaagaaacctaaaggcttggtcggagcccaggcagagcgccgagaatcactgaaagccacgtcttttgagttcaaaggcaagaaagagagcaggagggaaaatcaggtggatctgcctggtcatattcttgaccaagcgttcttgttaaagcatcattgcgtgagaaaaccttccgatctgtgtacaatcaacgccaaagagaatgatttcaagcacttccactcagtcatttatataaacgcctccgagaacctgcttcctcttgaagcatttcatacttttcctgccctgaaggaactggatctggcttttaacggcatcaagaccatatacgtgaaatacggggacttcaagctgctcgagttcctcgatctctcgttcaattcccttaccgtggaggccatctgcgatcttggcatactccctcatctacgggtactgctgttgaccggtaacgggctgacaagtctcccccctaatctggctgtcgccgagcaagaagcaagcgtgacctccttgactagcaagaggtacatccttagatttcctgctttagaaacgttgatgctcgatgacaatcgcctgagcaaccccagttgttttgcgtctcttgccggtttgcgaaggctgaagaagctttccctagatgaaaatagaattatccgtatcccttatctgcagcaagtccaactgtatgacgaaagcgtcgactggaacggcggaaggggttcccctcataaagagcctcagttcatgctacaaagcaagccgagaatgctggaggactcggatgagcagctggactacactgtgctgcctatgaagaaggacgttgaccggaccggagtcccaccactcctaaaaagctttctccaagaaaggctgggtatccacctgattagaagaaagatagtgaagcccaagcatcatgttcttatgtcgcgcaaagagtcatggaaagtgaaatctgagatccccaaagtgcctaagcagcccctagtattacatcacccgaggatgacaactaccaagtcaccaagcaaagatatgcttgagcccgaggcggaactggctgaggacctgcctacaacgaagtcaaccagtgttgagtccgaaatgcctacagagaatcttgaggggcattccccgtcctgtcgtacgtttgttccactgccgcctatttgttccaacagtaccgtccacagcgaagaaacgctcagtcatctttccgatactacggtgagactgtctcctgagcgcccaagtgacgaggacagcaaaagcactgagtctatatttctgacacaagtctccgagttaccaagttccgtaattcacaaggacgacctcgaactgaaggagaaagaccaaaaaaaacctccaaccgccccaagggaagtgaaagggaccaggagaaagctgcccactgcattcctgccgtccaaataccacgggtatgaggagcttcttacagcaaagccggatcccgcatttatcgagccaaaggggattcagaaaaatgcacaggctctgcagcagatgttgaagcatcccctcttatgtcactcttcaaagcctaagttggacactttgcaaaaaccttatgtgcataaagaaaagagggtcctgagctgcacttctggacagaacggtggatggtag

SEQ ID NO: 95131 - DNA, 2505 bp, Artificial Sequence
  derived and/or modified sequence
gtcccggccgtcggttgccgcctacactgtctgccgtcgcgtcgcagttactaaggcgtggggaagatagcggcaggcaccgcagtggagcggctccgagatccccggggggctcgcaggcgcgcatccctcctgactgggacgtcgcctccgcagacccctcggaggctgaagcgacgccggaggcaggcaaagaaacaagtgaagaaacaaaaaaaaaaggaagttaaggggccattcccaaagtcaaagatcaaggagatggccttctcaggaatctacaagctggatgatgggaagccttacctgaacaactgcttcccagccagaaatctgcttcgcgtgccggaggaaggccaaggacactggttagtggttcagaaaggtaacctcaagaagaagcccaagggtttggttggagcacaagctgaacgtcgggaaagcctgaaggcgacttcttttgagttcaaggggaagaaagagtctcggcgggaaaatcaggtggaccttcctggacatatcctggaccaggcttttctgctgaagcaccactgtgtgaggaagccatcagatctgtgcaccattaatgccaaggaaaatgacttcaagcattttcattctgtgatttatatcaatgcctcagaaaacctgctgcctctagaggcatttcacacgtttccagccctaaaggaactggatctcgcatttaatggcatcaaaactatctacgtgaaatatggagactttaagttattagaattcttggacctttccttcaacagcctgactgtggaggccatctgtgatttggggattctgccacacctccgtgtcctgctcctcacaggcaatggccttacctccctgccgcccaatttggccgtcgcagaacaggaggcatctgtaacatcgctgacaagcaagaggtacatcctgaggttcccagcgctggagacactgatgctggatgacaacagactctccaaccccagttgctttgccagcctggctgggctcaggagactgaagaagttaagcttggatgaaaacaggattatcaggatcccatacctacagcaagttcagctctatgacgagtcagtagactggaatggaggcaggggaagtccccataaagagccccaattcatgctgcagtccaagccaaggatgcttgaggactcagatgagcaactggattatactgtactgcccatgaaaaaggatgttgaccggacaggggtccctccactgctgaagagcttcctccaggagcgactgggaatccacttaattcgaaggaagatagtaaagcctaagcatcatgttttgatgtctcggaaggaatcatggaaggtgaaaagcgaaatcccaaaggtgccgaagcagcctctggtgctccatcacccgcgcatgacgacaaccaagtctccctcaaaggatatgctagagccagaggcagagctggctgaagatctgcccactaccaaaagcacttctgtggagtcagagatgcccactgagaacctggaaggccattccccgtcttgccggaccttcgtgccactgcctcccatctgctccaactccactgtgcatagtgaagagaccctgtcccacctgagtgacacaactgtccgcctcagcccagagcgcccatcagatgaggactccaagagcacagagtccatcttcctgacccaggtgagtgaactgccttcctccgtcatccataaggatgatttagagttaaaggagaaagaccaaaagaaaccaccaacggcacccagagaggtgaaagggactcggaggaaactcccaactgccttccttcccagcaagtaccacggctatgaagaactgctgacagccaagcctgatccagccttcattgagccaaagggaatccagaagaatgcacaagccctgcaacaaatgctgaagcacccactcctgtgccactcctccaagcccaagctggacactcttcagaaaccctatgttcacaaagagaaacgggtgctgtcctgcaccagtggacagaacggcggctggtgaaccacaagcagtacctggaggccaagaggctgttgaaggagttccaggcacgttaccggcagctggtgagtggctctctgcgcacagtgttcgggactaccccgctccccatggcctgcccagcgctgagtgagagccagcccaagttcggccacttcctcgagttcatggatgagttctgccaggagcccacagccagtgactcacaaggctagagctgtgcatgggggctgtgtgcaccacccggcctgtgccccagctctccccgagggctctgtgccctggaccgcacctcaaggttgaccagccggccacaggcctcagagctcagctgggccccacttgctggccacaaggtggcatccccttgtcaggatctcccctccttggcccaggcatgacctggtgcctggcccagcggcaataaagagtgggtgcacagggcaa

SEQ ID NO: 95132 - DNA, 912 bp, Artificial Sequence
  derived and/or modified sequence
atgacgatgatggctcatcagtaccctagctggattttcattaacgagaagaccttcatcacgcgcgagcagttgaatagcctcctcaaaacctataatatcttttacgagaatcagaagaatcttcacatattgtatggtgaaacagaggacggcaagttaatagtggagggaatgttggacattttttggggcgttaaacggcccatccagctcaagattcaagacgagaagcctttctccagcttcaccagtatgaaaagctccgacgtctttagtagtaagggaatgacaagatggggtgagttcgacgacttatacagaattagtgaactggaccgcacacaaattccaatgtccgagaaacgtaactcgcaggaggactacctttcctaccactcaaatacactgaagccccacgcaaaagacgaacccgactcacctgtgctttaccggaccatgagcgaggctgcactcgtgcgaaaaaggatgaagcccctgatgatggaccgcaaggaacggcagaagaacagggcttctattaatggtcatttttataaccacgagattgagaactccccgcaggacttcgccctgcatatcattttcgcaaccggcgaacagcgcaggttaaagaagaccgacatcccgctgttgcaacgtctcctgcagggcccctcagaaaagaatgccagaatttttctgatggacaaggacgccgaggaaattagctctgatgtcgcccaatatatcaattttcacttctctttgctggaaagcattcttcaaaggctcaacgaagaggaaaagcgtgaaattcaaaggatcgtgacgaagttcaacaaagaaaaggccatcatcctgaagtgcctgcagaataaattagtgattaagaccgagacaacggtttag

SEQ ID NO: 95133 - DNA, 912 bp, Artificial Sequence
  derived and/or modified sequence
atgaccatgatggcccaccagtaccccagctggatcttcatcaatgagaagaccttcatcacccgggagcagctgaacagcctgctgaagacctacaacatcttctatgagaaccagaagaacctgcacatcctgtatggagaaacagaagatggcaagctgattgtggagggcatgctggacatcttctggggcgtgaagaggcccatccagctgaagatccaggatgagaagcccttcagcagcttcacctccatgaagagcagtgatgtgttcagcagcaagggcatgacccgctggggcgagtttgatgacctgtaccgcatcagcgagctggacaggacccagatccccatgtctgagaagaggaacagccaggaggactacctgagctaccacagcaacaccctgaagccccacgccaaggatgagccagacagccctgtgctgtaccgcaccatgtctgaggccgccctggtgaggaagaggatgaagcccctgatgatggacaggaaggagcggcagaagaacagagccagcatcaatggccacttctacaaccacgagattgagaacagcccccaggactttgccctgcacatcatctttgccactggagagcagaggcggctgaagaagacagacatccccctgctgcagaggctgctgcagggccccagcgagaagaatgcccgcatcttcctgatggacaaggatgctgaggagatcagcagtgatgtggcccagtacatcaacttccacttcagcctgctggagagcatcctgcagaggctgaatgaggaggagaagcgggagatccagagaattgtgaccaagttcaacaaggagaaggccatcatcctgaagtgcctgcagaacaagctggtgatcaagacagagaccaccgtgtag

SEQ ID NO: 95134 - DNA, 912 bp, Artificial Sequence
  derived and/or modified sequence
atgaccatgatggcccaccagtaccccagctggatcttcatcaacgaaaagacctttattacccgtgaacagctcaacagcttgctgaagacatacaatatattttacgagaatcagaaaaacttacacatcctgtacggagagaccgaagatggcaaacttatagtggagggaatgctcgacatattctggggcgtgaagcgaccaattcagctgaagattcaggatgagaagccgtttagcagctttacttctatgaaatcttcagatgtgttctcatcgaaagggatgacgcgctggggggaatttgacgatctgtaccgcatatcagaattggatcgtacgcagatcccaatgagcgaaaaaagaaacagccaagaggattacctgtcttaccactccaacacattgaagccccacgcaaaagacgaaccggattcgccagtcctgtaccgaacaatgtcagaggcagcgttggtcaggaagcggatgaagcctctcatgatggacagaaaagagcgtcagaaaaatagggcaagcattaacggacatttttacaaccacgagatcgagaacagtccgcaagattttgcgttgcatattatcttcgccacaggtgaacagcgcaggctgaaaaagacagatattccactgctacagaggctgcttcagggcccgtcagagaagaatgcaagaatatttctgatggataaggacgcagaggagattagctcagacgtggcccagtacatcaacttccacttcagcctgctggaaagcatcctgcagcggctgaacgaggaggaaaaacgggagatacagcggattgtaacaaagttcaataaagaaaaagccataattttaaaatgcctgcagaataagctggtgatcaagaccgagactacagtgtag

SEQ ID NO: 95135 - DNA, 912 bp, Artificial Sequence
  derived and/or modified sequence
atgaccatgatggctcaccaatatcccagctggattttcatcaatgagaagacttttatcacccgggaacagctgaactcactgctgaagacctacaatatattctacgagaaccagaagaacctgcacatcttatacggtgagacagaagatgggaagctgatagtcgaaggaatgttagatatcttctggggagtcaaacgcccaatacagcttaaaatccaagacgaaaagcctttctcttcttttacgtcgatgaaatccagcgacgtgtttagttccaaaggtatgactaggtggggcgagtttgatgatttgtaccgaatctcggagctggatcgtactcaaatccccatgtcggagaaacgtaatagccaggaagactatctgagctatcactccaacacacttaagccgcacgctaaagatgagccagattcccccgtcctttatcgcaccatgagcgaggcagcattagtgaggaagcggatgaaacccctgatgatggataggaaggaaaggcagaagaatcgcgcttccataaacgggcacttttacaaccatgaaattgagaattctccccaggattttgccctacacatcatttttgccactggggagcagagacggctgaagaaaacagacatacctttgttacagcgcttgttgcagggaccctccgaaaagaacgcacgcatttttctcatggataaggacgctgaagagatttcttccgacgttgcacagtatatcaactttcacttctccctgctggaaagcatactgcaaagacttaatgaggaagagaaacgtgagattcagcgtatcgtcactaaatttaataaggagaaggctatcattctcaagtgccttcaaaacaaactggttatcaagacagaaacaacagtgtag

SEQ ID NO: 95136 - DNA, 912 bp, Artificial Sequence
  derived and/or modified sequence
atgaccatgatggcccaccagtaccccagctggatcttcatcaacgagaagaccttcatcaccagagagcagctgaacagcctgctgaagacctacaacatcttctacgagaaccagaagaacctgcacatcctgtacggcgagaccgaggacggcaagctgatcgtggagggcatgctggacatcttctggggcgtgaagagacccatccagctgaagatccaggacgagaagcccttcagcagcttcaccagcatgaagagcagcgacgtgttcagcagcaagggcatgaccagatggggcgagttcgacgacctgtacagaatcagcgagctggacagaacccagatccccatgagcgagaagagaaacagccaggaggactacctgagctaccacagcaacaccctgaagccccacgccaaggacgagcccgacagccccgtgctgtacagaaccatgagcgaggccgccctggtgagaaagagaatgaagcccctgatgatggacagaaaggagagacagaagaacagagccagcatcaacggccacttctacaaccacgagatcgagaacagcccccaggacttcgccctgcacatcatcttcgccaccggcgagcagagaagactgaagaagaccgacatccccctgctgcagagactgctgcagggccccagcgagaagaacgccagaatcttcctgatggacaaggacgccgaggagatcagcagcgacgtggcccagtacatcaacttccacttcagcctgctggagagcatcctgcagagactgaacgaggaggagaagagagagatccagagaatcgtgaccaagttcaacaaggagaaggccatcatcctgaagtgcctgcagaacaagctggtgatcaagaccgagaccaccgtgtag

SEQ ID NO: 95137 - protein, 325 aa, Artificial Sequence
  derived and/or modified sequence
MLWEETGAAPAPARASDLPYRIHFLSSGLILVTRQLTEDGKLIVEGMLDIFWGVKRPIQLKIQDEKPFSSFTSMKSSDVFSSKGMTRWGEFDDLYRISELDRTQIPMSEKRNSQEDYLSYHSNTLKPHAKDEPDSPVLYRTMSEAALVRKRMKPLMMDRKERQKNRASINGHFYNHETSIFIPAFESETKVRVNSNMRTEEVIKQLLQKFKIENSPQDFALHIIFATGEQRRLKKTDIPLLQRLLQGPSEKNARIFLMDKDAEEISSDVAQYINFHFSLLESILQRLNEEEKREIQRIVTKFNKEKAIILKCLQNKLVIKTETTV

SEQ ID NO: 95138 - DNA, 978 bp, Artificial Sequence
  derived and/or modified sequence
atgttgtgggaggagaccggtgctgcccccgcgcccgcgcgggcatctgacctcccctatcggattcattttctttcttcgggcttaatcctggtaacacgacagctgacagaagacgggaaactgattgtggaggggatgctggatattttttggggcgtgaaaaggcccattcagctgaaaatccaagacgagaaacccttttcaagctttaccagcatgaagtctagtgatgtattttccagtaagggcatgacgcggtggggagagtttgacgatctttatcggatctccgagttggatcgaactcagatccccatgtctgagaagaggaatagtcaagaggactatctatcttaccatagcaataccttgaaacctcatgccaaagacgagcccgattcacctgtgctctacagaaccatgtcagaggcagcgctcgtgcgaaaacgtatgaagccactaatgatggatcggaaggagagacagaaaaatagagcttcaatcaacggccacttctacaatcacgaaacatcaatcttcatcccagccttcgaaagtgagaccaaagtgagggtgaattcaaacatgcgtacagaggaggtgattaaacagctgcttcagaaatttaagatcgagaattccccccaggattttgccctgcatatcatttttgctacaggagagcaaaggcggctgaagaaaacggatattcccctgctgcagcgactacttcagggcccgagcgagaagaacgccaggatctttctgatggataaggacgccgaagaaatatcgtcagacgtggcacagtatatcaactttcatttctccctcctggaatctatccttcagcgactgaatgaggaagaaaaacgagaaattcagagaatcgtgacgaagttcaacaaagagaaggccatcattttgaagtgcctacaaaacaagttagttatcaaaacagagacaaccgtttag

SEQ ID NO: 95139 - DNA, 978 bp, Artificial Sequence
  derived and/or modified sequence
atgctgtgggaggagaccggggccgccccagccccagcccgggccagtgacctgccctaccgcatccacttcctgagcagcggcctcatcctggtgacccggcagctgacagaagatggcaagctgattgtggagggcatgctggacatcttctggggcgtgaagaggcccatccagctgaagatccaggatgagaagcccttcagcagcttcacctccatgaagagcagtgatgtgttcagcagcaagggcatgacccgctggggcgagtttgatgacctgtaccgcatcagcgagctggacaggacccagatccccatgtctgagaagaggaacagccaggaggactacctgagctaccacagcaacaccctgaagccccacgccaaggatgagccagacagccctgtgctgtaccgcaccatgtctgaggccgccctggtgaggaagaggatgaagcccctgatgatggacaggaaggagcggcagaagaacagagccagcatcaatggccacttctacaaccacgagaccagcatcttcatcccagcctttgaaagtgagaccaaggtgcgggtgaacagcaacatgaggacagaggaggtgatcaagcagctgctgcagaagttcaagattgagaacagcccccaggactttgccctgcacatcatctttgccactggagagcagaggcggctgaagaagacagacatccccctgctgcagaggctgctgcagggccccagcgagaagaatgcccgcatcttcctgatggacaaggatgctgaggagatcagcagtgatgtggcccagtacatcaacttccacttcagcctgctggagagcatcctgcagaggctgaatgaggaggagaagcgggagatccagagaattgtgaccaagttcaacaaggagaaggccatcatcctgaagtgcctgcagaacaagctggtgatcaagacagagaccaccgtgtag

SEQ ID NO: 95140 - DNA, 978 bp, Artificial Sequence
  derived and/or modified sequence
atgctgtgggaggagaccggcgccgcccccgcccccgcccgggccagtgatctcccctacaggatccatttcctgagctccggcctcattctggtgactcgccaattgaccgaggacggtaagcttattgtggaaggcatgcttgacattttttggggcgtgaaacgcccgatacagctgaaaatacaagatgagaagcctttttcttcttttacgtctatgaagtcttcggacgtgttttcttcaaaagggatgacccgctggggggaatttgatgacttgtacagaatcagcgagctagataggacgcagatccctatgagtgagaaacgcaacagccaggaggactacctatcctaccattccaacactctgaagcctcacgccaaagacgagccagacagccccgttctgtaccggacaatgtcagaggctgctctcgttcggaagagaatgaagccgctaatgatggatagaaaggagaggcagaaaaaccgggcctccatcaatgggcacttttacaatcacgaaacgtccatcttcatccccgcattcgagtcagaaactaaagtgagggtaaacagcaatatgcggaccgaagaagttataaagcagctgctacagaaattcaagatagagaattcaccccaggactttgccttgcatataatatttgctaccggggaacagaggagactcaaaaaaacagacatacctctgctccaacgactcctacagggaccgtcagagaagaatgcccgaatcttcctgatggacaaagacgccgaggagatttcttcagacgttgctcagtatatcaatttccacttcagcctcttagaatctatcctgcagaggttaaatgaagaggaaaagcgagagatccaacgaatagtgacaaaatttaacaaggagaaagctatcatcttgaagtgtctgcagaataagctcgttatcaaaaccgagacaacagtttag

SEQ ID NO: 95141 - DNA, 978 bp, Artificial Sequence
  derived and/or modified sequence
atgctgtgggaggaaaccggtgccgctcccgctcctgcacgagcttcagatcttccctaccgcattcactttttaagcagcggtctgatcctcgtgaccaggcagctcactgaggatgggaagctgatcgtggaaggcatgctcgacattttttggggggtaaagcgccctatccagctaaagattcaggatgagaagcctttcagctcctttacgtcaatgaagagctctgacgtcttcagctccaaaggaatgacccgctggggggagttcgacgatctctaccggattagcgagctagaccgcacgcaaatcccaatgtcggaaaagaggaactcacaggaggactaccttagttatcacagcaacacactgaagccccacgccaaagacgagccagatagcccggtactgtacaggaccatgtcagaagccgctttggttcgaaaacgaatgaagccattgatgatggatagaaaggaacgtcagaagaacagggcctccattaacggccacttctataaccacgaaacatcaatttttataccagcctttgagagcgagactaaggtacgggtgaattctaacatgcggacagaagaggtcattaagcagctgttgcagaagttcaagatcgaaaattctccacaagacttcgcgcttcatatcatttttgctaccggcgagcaacgccgtctcaaaaaaaccgacatcccattactgcagcggttactacagggcccatcggaaaaaaacgcgcgtatcttcctcatggataaagacgctgaggagattagttcagacgtggcacagtacatcaactttcattttagtctcctggagtctatcttgcagcggctcaacgaagaggagaagcgggagatccagcggattgtcacaaagtttaacaaggagaaagccattatccttaaatgtctacaaaataagttggttatcaagacagagaccacagtgtag

SEQ ID NO: 95142 - DNA, 1360 bp, Artificial Sequence
  derived and/or modified sequence
atgctctgggaggagacaggcgccgcccctgcgcccgcgcgggcctcggacctcccctacagaattcacttcctgtcctctggcctcattctggtcacaaggcaactgactgaagatggcaaactaattgttgaaggaatgctggacattttctggggagtaaaacgacctatacagctaaaaatacaagatgagaagccattctcttcttttactagtatgaagtcatcagacgtcttctccagcaaaggaatgacacgctggggggaatttgacgatctctatcgtattagtgagctggacaggacccagattcctatgtctgaaaaaaggaattcccaggaagactatttatcttatcacagcaacaccctgaagccacatgcaaaggatgaaccagactccccagtgctctatagaaccatgagtgaagcagctctggtgagaaaaaggatgaagcctctgatgatggacagaaaagaaagacagaaaaatagagcctctattaatggacacttctataaccatgaaacatcaattttcattccagcctttgaatcagaaactaaggtcagagtaaacagtaacatgagaactgaagaagtaataaagcaacttctccaaaaatttaagattgaaaatagtccccaggattttgctcttcacattatttttgcaacaggagaacaaagacgactaaagaagacagacattccgctactgcagaggctcctacagggaccttctgaaaagaatgctcgcattttcctcatggataaagatgcagaagaaattagcagtgatgtggctcagtacattaactttcacttttctctcttggaatccattcttcaaagattaaatgaagaagagaaaagagagattcaaagaatagtaacaaaattcaataaagaaaaggcgattatactgaaatgtcttcaaaataaactagtaataaaaacagagacaacagtttagcagtacaagcttctattgctaaaacatttcaaaaaactcagagatattactctttgatgaatgcataagttctgtacttgcatttatacgaacatatatgagacttgaatcgtagaaaattgaatgtcaaaaaaagctcatttctttttgaagtgatgaggttaattagggttcacagttggacaaaatgagtttgagtttagtttcagtaactgaaataagcttgaatactgcatatgccaaatagcttttatagtaaaccatgtaatgaactcaaatttaaatggtgtcttcagataagcagtttaaacttcatttagcttggactctcaagagaactgaaacataatcaatggattcagaaatgactcagaaaaaagaa

SEQ ID NO: 95143 - DNA, 978 bp, Artificial Sequence
  derived and/or modified sequence
atgctgtgggaggagaccggcgccgcccccgcccccgccagagccagcgacctgccctacagaatccacttcctgagcagcggcctgatcctggtgaccagacagctgaccgaggacggcaagctgatcgtggagggcatgctggacatcttctggggcgtgaagagacccatccagctgaagatccaggacgagaagcccttcagcagcttcaccagcatgaagagcagcgacgtgttcagcagcaagggcatgaccagatggggcgagttcgacgacctgtacagaatcagcgagctggacagaacccagatccccatgagcgagaagagaaacagccaggaggactacctgagctaccacagcaacaccctgaagccccacgccaaggacgagcccgacagccccgtgctgtacagaaccatgagcgaggccgccctggtgagaaagagaatgaagcccctgatgatggacagaaaggagagacagaagaacagagccagcatcaacggccacttctacaaccacgagaccagcatcttcatccccgccttcgagagcgagaccaaggtgagagtgaacagcaacatgagaaccgaggaggtgatcaagcagctgctgcagaagttcaagatcgagaacagcccccaggacttcgccctgcacatcatcttcgccaccggcgagcagagaagactgaagaagaccgacatccccctgctgcagagactgctgcagggccccagcgagaagaacgccagaatcttcctgatggacaaggacgccgaggagatcagcagcgacgtggcccagtacatcaacttccacttcagcctgctggagagcatcctgcagagactgaacgaggaggagaagagagagatccagagaatcgtgaccaagttcaacaaggagaaggccatcatcctgaagtgcctgcagaacaagctggtgatcaagaccgagaccaccgtgtag

SEQ ID NO: 95144 - protein, 85 aa, Artificial Sequence
  derived and/or modified sequence
MSHQDVAMRTDSSKMTDVESGVANFASSARAGRRNALPDIQSSAATDGTSDLPLKLEALSVKEDAKEKDEKTTQDQLEKPQNEEK

SEQ ID NO: 95145 - protein, 78 aa, Artificial Sequence
  derived and/or modified sequence
MRTDSSKMTDVESGVANFASSARAGRRNALPDIQSSAATDGTSDLPLKLEALSVKEDAKEKDEKTTQDQLEKPQNEEK

SEQ ID NO: 95146 - protein, 87 aa, Artificial Sequence
  derived and/or modified sequence
MHILFVDVAMRTDSSKMTDVESGVANFASSARAGRRNALPDIQSSAATDGTSDLPLKLEALSVKEDAKEKDEKTTQDQLEKPQNEEK

SEQ ID NO: 95147 - DNA, 258 bp, Artificial Sequence
  derived and/or modified sequence
atgagtcaccaagacgtggccatgcggacggattcatccaaaatgacagacgttgagagcggagttgctaattttgcctcatcagcaagggctgggaggaggaacgccctccctgacatccaatcatccgccgccactgacggtacgtcggatctccccctgaagcttgaggccttgagcgtcaaagaggacgccaaggagaaggatgagaaaacaactcaggatcagttggaaaagcctcaaaacgaagagaagtag

SEQ ID NO: 95148 - DNA, 264 bp, Artificial Sequence
  derived and/or modified sequence
atgcacatcctctttgtggacgtggccatgcgcaccgactcatccaagatgacggatgtcgagagcggcgtcgccaacttcgcctcttcagctagagccggccgacgcaatgccctcccggacatacagtcaagtgctgcgaccgatggcacgagcgatctgccactgaagctagaggcactttccgtaaaggaagatgctaaggagaaagacgaaaaaaccacgcaggaccagttggaaaaaccacaaaatgaggagaagtag

SEQ ID NO: 95149 - DNA, 258 bp, Artificial Sequence
  derived and/or modified sequence
atgagccaccaggatgtggccatgaggacagacagcagcaagatgacagatgtggagagcggcgtggccaactttgccagcagcgcccgggccggcagaagaaatgccctgcctgacatccagagcagcgctgccacagatggcaccagtgacctgcccctgaagctggaggccctgtctgtgaaggaggatgccaaggagaaggatgagaagaccacccaggaccagctggagaagccccagaatgaggagaagtag

SEQ ID NO: 95150 - DNA, 264 bp, Artificial Sequence
  derived and/or modified sequence
atgcacatcctgtttgtggatgtggccatgaggacagacagcagcaagatgacagatgtggagagcggcgtggccaactttgccagcagcgcccgggccggcagaagaaatgccctgcctgacatccagagcagcgctgccacagatggcaccagtgacctgcccctgaagctggaggccctgtctgtgaaggaggatgccaaggagaaggatgagaagaccacccaggaccagctggagaagccccagaatgaggagaagtag

SEQ ID NO: 95151 - DNA, 258 bp, Artificial Sequence
  derived and/or modified sequence
atgagccaccaggacgtggccatgcggaccgacagcagcaagatgaccgacgtggagtctggcgtcgccaacttcgcctcaagtgctagagcaggacgaagaaacgcacttcctgatatccagagttcagccgccactgatggcacttctgatctgcccctgaaattagaagccttgtccgtaaaggaggacgctaaggaaaaggatgaaaaaacaactcaggatcagttagaaaagccccagaacgaggaaaagtag

SEQ ID NO: 95152 - DNA, 264 bp, Artificial Sequence
  derived and/or modified sequence
atgcacatcctgttcgtggacgtggccatgcggaccgacagcagcaaaatgaccgatgtggagagcggagtcgccaacttcgcctctagtgccagggcagggagacggaatgctttgcccgacattcagtcttccgccgccactgatggcactagtgatttgccactcaagctggaggcactgagtgtgaaagaagacgcgaaggagaaggatgagaaaaccactcaagatcagctcgaaaagcctcaaaacgaggaaaaatag

SEQ ID NO: 95153 - DNA, 258 bp, Artificial Sequence
  derived and/or modified sequence
atgtcccaccaggatgtggccatgaggactgactcctcaaagatgacagacgtagagagcggcgttgctaatttcgcctcttctgcgagagccggaagacgcaacgcgttgcctgacatccaatcttcagccgctaccgatggaacctccgacctgcctctgaagctggaggccctcagcgttaaggaggacgctaaggagaaagacgagaaaactacccaggatcagctggaaaagcctcagaacgaggaaaaatag

SEQ ID NO: 95154 - DNA, 264 bp, Artificial Sequence
  derived and/or modified sequence
atgcacattctgttcgtcgacgtagcgatgcggacagactccagcaagatgactgacgtggagagcggagtggccaatttcgcaagcagcgcaagagctggccgaaggaatgctttgccagatattcagtccagcgcagccaccgacggcacaagcgatctacctctgaaacttgaggccttatcagttaaagaggacgccaaggaaaaggatgagaaaaccacacaagaccagttagaaaaacctcagaacgaggagaagtag

SEQ ID NO: 95155 - DNA, 1595 bp, Artificial Sequence
  derived and/or modified sequence
tatccgcacaggctctagaacttggtttcttgaagaagttgtaggaaagaaagtttatcagaattttttaaacctgtctcagaaataacaacatattttaatcagagatttgctgaagcttcagagatcacctgccaaacacaggctgaacctgacagcatgtcacaccaggatgttgctatgaggacagattcatcaaaaatgactgacgtggagtctggggtcgccaattttgcatcttcagcaagggcaggccgccggaatgccttaccagacatccagagttcagctgccacagacggaacctcagatttgcccctcaaactggaggctctctccgtgaaggaagatgcaaaagagaaagatgaaaaaacaacacaagaccaattggaaaagcctcaaaatgaagaaaaatgaaggctcataatctatcaagagtgctgaatttctgcatgttgaaagacttagtggttctgttttcttgagacatttaatctggtggtaactgtggtaacattgcagccctaagcagcatgtgtatattagataattgtgttgtgatgctactcactttgattgcaatgatgatgtccaaggtaagctattaaaaggcaggttacttccaaatcgcactgaaggaaaaggttaagaataatacatgatcacagaaatgcataccactgtctgtaaacccaacaaaattcactgttctcttttggatttatttagcctgatgtatttttaattcaatttttatggtgatgggcaaatcattcttggtaaatgtaaatcaaacatgattgatttaaaacttcatggaatttgtagaaaattatggacatttttggtgagaaagaacaatagtcaaaactcacatggatagagtgtgtttgttttttgccaaaaatgccccagactttttcccaaacctcaaaaacgtcttggaaaaattgtaaaagtttgataacagaaacatctttaggatatttttgtctgacatattttgcttctagtatgtgcctactgtgatttttttcatgtggaaaatgcaaaatttgtaacaaaatggttatatggaacatgcctattaaatgaattttactatcttccctaactttggtctgtgtatgtgtgtgtgttttactttaatatgaattatacaaaatactagttgttttacactctcttttcttattcttagggcttttgtgtatgtctgacttgtttttaaataacttcctcagcaatgcagaccttaatttttatatttttttaaagtagctaacatagcagtaggcacttaagcatttagtcaatgatattggtagaaatagtaaaatacatcctttaaatatatatctaagcatatattttaaaaggagcaaaaataaaaccaaagtgttagtaaattttgatttattagatattttagaaaaataatagaattctgaagttttaaaaatgtcagtaattaatttattttcattttcagaaatatatgcatgcagttatgttttatttgattgttgacttaggctatgtctgtatacagtaaccaaataaactctttcactattaaagagatttcttactga

SEQ ID NO: 95156 - DNA, 1043 bp, Artificial Sequence
  derived and/or modified sequence
gggttatttttagcaatctggctcacactgagggcttcctgctctattcagcaaatgtgcaaatggatgctgcaggaccgtaacagtagacattgatgaagatgttgctatgaggacagattcatcaaaaatgactgacgtggagtctggggtcgccaattttgcatcttcagcaagggcaggccgccggaatgccttaccagacatccagagttcagctgccacagacggaacctcagatttgcccctcaaactggaggctctctccgtgaaggaagatgcaaaagagaaagatgaaaaaacaacacaagaccaattggaaaagcctcaaaatgaagaaaaatgaaggctcataatctatcaagagtgctgaatttctgcatgttgaaagacttagtggttctgttttcttgagacatttaatctggtggtaactgtggtaacattgcagccctaagcagcatgtgtatattagataattgtgttgtgatgctactcactttgattgcaatgatgatgtccaaggtaagctattaaaaggcaggttacttccaaatcgcactgaaggaaaaggttaagaataatacatgatcacagaaatgcataccactgtctgtaaacccaacaaaattcactgttctcttttggatttatttagcctgatgtatttttaattcaatttttatggtgatgggcaaatcattcttggtaaatgtaaatcaaacatgattgatttaaaacttcatggaatttgtagaaaattatggacatttttggtgagaaagaacaatagtcaaaactcacatggatagagtgtgtttgttttttgccaaaaatgccccagactttttcccaaacctcaaaaacgtcttggaaaaattgtaaaagtttgataacagaaacatctttaggatatttttgtctgacatattttgcttctagtatgtgcctactgtgatttttttcatgtggaaaatgcaaaatttgtaacaaaatggttatatggaacatgcctattaaatgaattttactatcttccctaa

SEQ ID NO: 95157 - DNA, 556 bp, Artificial Sequence
  derived and/or modified sequence
ggttatttttagcaatctggctcacactgagggcttcctgctctattcagcaaatgtgcaaatggatgctgcaggaccgtaacagtagacattgatgaaggttgtgatcaatgattagactctcaagcctgttgtgtttttgatctagccatgcctttcaaccactgtggtgaacatttacttctgaataggctcatcttcttcatatgcacattctatttgtagatgttgctatgaggacagattcatcaaaaatgactgacgtggagtctggggtcgccaattttgcatcttcagcaagggcaggccgccggaatgccttaccagacatccagagttcagctgccacagacggaacctcagatttgcccctcaaactggaggctctctccgtgaaggaagatgcaaaagagaaagatgaaaaaacaacacaagaccaattggaaaagcctcaaaatgaagaaaaatgaaggctcataatctatcaagagtgctgaatttctgcatgttgaaagacttagtggttctgttttcttgagacatttaatctggtggt

SEQ ID NO: 95158 - DNA, 1561 bp, Artificial Sequence
  derived and/or modified sequence
gaaaaaagctaccgtggcacgtgccccggggagtgatgcggtggcccggtttgcacggagagcgggacaccgcctggggagccgcgctcgtagcctgggggcgggacgcggcggccgctccctccgcccccgagtagctgccaccgcctggctgcgccccagcccagtagctcagacgcggccgcatcccggtggactgtagaggcggcagcgagctagagcccgagtcgcagctccgggccgcagagcgctgggcgagcgcgagcgccagggcaccggcagggcaggcagctgcgcgcggctggagtcatgctatactgaaaagacacttcatcaagataactctgggagaagcagaaaaccctgtgccagggacaggaaagataggagaaagaaagtttatcagaattttttaaacctgtctcagaaataacaacatattttaatcagagatttcacctgtgccacaggccaccatggatctgcacctcgatgcccttcggagtcatgagagtgcaagcaatagcagctcaggaagcagcagcagaggagaccagaaaggtcactacctttgcatgaacaacaatggcaaccaggataccatgcttggttctccatgatgttgctatgaggacagattcatcaaaaatgactgacgtggagtctggggtcgccaattttgcatcttcagcaagggcaggccgccggaatgccttaccagacatccagagttcagctgccacagacggaacctcagatttgcccctcaaactggaggctctctccgtgaaggaagatgcaaaagagaaagatgaaaaaacaacacaagaccaattggaaaagcctcaaaatgaagaaaaatgaaggctcataatctatcaagagtgctgaatttctgcatgttgaaagacttagtggttctgttttcttgagacatttaatctggtggtaactgtggtaacattgcagccctaagcagcatgtgtatattagataattgtgttgtgatgctactcactttgattgcaatgatgatgtccaaggtaagctattaaaaggcaggttacttccaaatcgcactgaaggaaaaggttaagaataatacatgatcacagaaatgcataccactgtctgtaaacccaacaaaattcactgttctcttttggatttatttagcctgatgtatttttaattcaatttttatggtgatgggcaaatcattcttggtaaatgtaaatcaaacatgattgatttaaaacttcatggaatttgtagaaaattatggacatttttggtgagaaagaacaatagtcaaaactcacatggatagagtgtgtttgttttttgccaaaaatgccccagactttttcccaaacctcaaaaacgtcttggaaaaattgtaaaagtttgataacagaaacatctttaggatatttttgtctgacatattttgcttctagtatgtgcctactgtgatttttttcatgtggaaaatgcaaaatttgtaacaaaatggttatatggaacatgcctattaaatgaattttactatcttccctaa

SEQ ID NO: 95159 - DNA, 1398 bp, Artificial Sequence
  derived and/or modified sequence
gaaaaaagctaccgtggcacgtgccccggggagtgatgcggtggcccggtttgcacggagagcgggacaccgcctggggagccgcgctcgtagcctgggggcgggacgcggcggccgctccctccgcccccgagtagctgccaccgcctggctgcgccccagcccagtagctcagacgcggccgcatcccggtggactgtagaggcggcagcgagctagagcccgagtcgcagctccgggccgcagagcgctgggcgagcgcgagcgccagggcaccggcagggcaggcagctgcgcgcggctggagtcatgctatactgaaaagacacttcatcaagataactctgggagaagcagaaaaccctgtgccagggacaggaaagataggagaaagaaagtttatcagaattttttaaacctgtctcagaaataacaacatattttaatcagagatttatgttgctatgaggacagattcatcaaaaatgactgacgtggagtctggggtcgccaattttgcatcttcagcaagggcaggccgccggaatgccttaccagacatccagagttcagctgccacagacggaacctcagatttgcccctcaaactggaggctctctccgtgaaggaagatgcaaaagagaaagatgaaaaaacaacacaagaccaattggaaaagcctcaaaatgaagaaaaatgaaggctcataatctatcaagagtgctgaatttctgcatgttgaaagacttagtggttctgttttcttgagacatttaatctggtggtaactgtggtaacattgcagccctaagcagcatgtgtatattagataattgtgttgtgatgctactcactttgattgcaatgatgatgtccaaggtaagctattaaaaggcaggttacttccaaatcgcactgaaggaaaaggttaagaataatacatgatcacagaaatgcataccactgtctgtaaacccaacaaaattcactgttctcttttggatttatttagcctgatgtatttttaattcaatttttatggtgatgggcaaatcattcttggtaaatgtaaatcaaacatgattgatttaaaacttcatggaatttgtagaaaattatggacatttttggtgagaaagaacaatagtcaaaactcacatggatagagtgtgtttgttttttgccaaaaatgccccagactttttcccaaacctcaaaaacgtcttggaaaaattgtaaaagtttgataacagaaacatctttaggatatttttgtctgacatattttgcttctagtatgtgcctactgtgatttttttcatgtggaaaatgcaaaatttgtaacaaaatggttatatggaacatgcctattaaatgaattttactatcttccctaa

SEQ ID NO: 95160 - DNA, 1811 bp, Artificial Sequence
  derived and/or modified sequence
gaaaaaagctaccgtggcacgtgccccggggagtgatgcggtggcccggtttgcacggagagcgggacaccgcctggggagccgcgctcgtagcctgggggcgggacgcggcggccgctccctccgcccccgagtagctgccaccgcctggctgcgccccagcccagtagctcagacgcggccgcatcccggtggactgtagaggcggcagcgagctagagcccgagtcgcagctccgggccgcagagcgctgggcgagcgcgagcgccagggcaccggcagggcaggcagctgcgcgcggctggagtcatgctatactgaaaagacacttcatcaagataactctgggagaagcagaaaaccctgtgccagggacaggaaagataggaatgttgctatgaggacagattcatcaaaaatgactgacgtggagtctggggtcgccaattttgcatcttcagcaagggcaggccgccggaatgccttaccagacatccagagttcagctgccacagacggaacctcagatttgcccctcaaactggaggctctctccgtgaaggaagatgcaaaagagaaagatgaaaaaacaacacaagaccaattggaaaagcctcaaaatgaagaaaaatgaaggctcataatctatcaagagtgctgaatttctgcatgttgaaagacttagtggttctgttttcttgagacatttaatctggtggtaactgtggtaacattgcagccctaagcagcatgtgtatattagataattgtgttgtgatgctactcactttgattgcaatgatgatgtccaaggtaagctattaaaaggcaggttacttccaaatcgcactgaaggaaaaggttaagaataatacatgatcacagaaatgcataccactgtctgtaaacccaacaaaattcactgttctcttttggatttatttagcctgatgtatttttaattcaatttttatggtgatgggcaaatcattcttggtaaatgtaaatcaaacatgattgatttaaaacttcatggaatttgtagaaaattatggacatttttggtgagaaagaacaatagtcaaaactcacatggatagagtgtgtttgttttttgccaaaaatgccccagactttttcccaaacctcaaaaacgtcttggaaaaattgtaaaagtttgataacagaaacatctttaggatatttttgtctgacatattttgcttctagtatgtgcctactgtgatttttttcatgtggaaaatgcaaaatttgtaacaaaatggttatatggaacatgcctattaaatgaattttactatcttccctaactttggtctgtgtatgtgtgtgtgttttactttaatatgaattatacaaaatactagttgttttacactctcttttcttattcttagggcttttgtgtatgtctgacttgtttttaaataacttcctcagcaatgcagaccttaatttttatatttttttaaagtagctaacatagcagtaggcacttaagcatttagtcaatgatattggtagaaatagtaaaatacatcctttaaatatatatctaagcatatattttaaaaggagcaaaaataaaaccaaagtgttagtaaattttgatttattagatattttagaaaaataatagaattctgaagttttaaaaatgtcagtaattaatttattttcattttcagaaatatatgcatgcagttatgttttatttgattgttgacttaggctatgtctgtatacagtaaccaaataaactctttcactattaaagagatttcttactg

SEQ ID NO: 95161 - DNA, 1875 bp, Artificial Sequence
  derived and/or modified sequence
gactgcgcatgcgcgtcactagacgacacggctgtcttctttcctggagaatttctcaaggactgctggctggaaacttaacggctaatgtggatctgaccgtagtttgccaaattaagaaaacgtttttaccctgttgaagatttgctttaacttcaaaagtgatgacaagaaagtatggacaccccttcaggaccaacctgataagtcactggtttttctttcgtttaaagatgacacactctgaaattaatttgattttgagatttgagaacttggacatacatacttcctatggaaggagtcatgctatactgaaaagacacttcatcaagataactctgggagaagcagaaaaccctgtgccagggacaggaaagataggagaaagaaagtttatcagaattttttaaacctgtctcagaaataacaacatattttaatcagagatttatgttgctatgaggacagattcatcaaaaatgactgacgtggagtctggggtcgccaattttgcatcttcagcaagggcaggccgccggaatgccttaccagacatccagagttcagctgccacagacggaacctcagatttgcccctcaaactggaggctctctccgtgaaggaagatgcaaaagagaaagatgaaaaaacaacacaagaccaattggaaaagcctcaaaatgaagaaaaatgaaggctcataatctatcaagagtgctgaatttctgcatgttgaaagacttagtggttctgttttcttgagacatttaatctggtggtaactgtggtaacattgcagccctaagcagcatgtgtatattagataattgtgttgtgatgctactcactttgattgcaatgatgatgtccaaggtaagctattaaaaggcaggttacttccaaatcgcactgaaggaaaaggttaagaataatacatgatcacagaaatgcataccactgtctgtaaacccaacaaaattcactgttctcttttggatttatttagcctgatgtatttttaattcaatttttatggtgatgggcaaatcattcttggtaaatgtaaatcaaacatgattgatttaaaacttcatggaatttgtagaaaattatggacatttttggtgagaaagaacaatagtcaaaactcacatggatagagtgtgtttgttttttgccaaaaatgccccagactttttcccaaacctcaaaaacgtcttggaaaaattgtaaaagtttgataacagaaacatctttaggatatttttgtctgacatattttgcttctagtatgtgcctactgtgatttttttcatgtggaaaatgcaaaatttgtaacaaaatggttatatggaacatgcctattaaatgaattttactatcttccctaactttggtctgtgtatgtgtgtgtgttttactttaatatgaattatacaaaatactagttgttttacactctcttttcttattcttagggcttttgtgtatgtctgacttgtttttaaataacttcctcagcaatgcagaccttaatttttatatttttttaaagtagctaacatagcagtaggcacttaagcatttagtcaatgatattggtagaaatagtaaaatacatcctttaaatatatatctaagcatatattttaaaaggagcaaaaataaaaccaaagtgttagtaaattttgatttattagatattttagaaaaataatagaattctgaagttttaaaaatgtcagtaattaatttattttcattttcagaaatatatgcatgcagttatgttttatttgattgttgacttaggctatgtctgtatacagtaaccaaataaactctttcactattaaagagatttcttactg

SEQ ID NO: 95162 - DNA, 258 bp, Artificial Sequence
  derived and/or modified sequence
atgagccaccaggacgtggccatgagaaccgacagcagcaagatgaccgacgtggagagcggcgtggccaacttcgccagcagcgccagagccggcagaagaaacgccctgcccgacatccagagcagcgccgccaccgacggcaccagcgacctgcccctgaagctggaggccctgagcgtgaaggaggacgccaaggagaaggacgagaagaccacccaggaccagctggagaagccccagaacgaggagaagtag

SEQ ID NO: 95163 - DNA, 264 bp, Artificial Sequence
  derived and/or modified sequence
atgcacatcctgttcgtggacgtggccatgagaaccgacagcagcaagatgaccgacgtggagagcggcgtggccaacttcgccagcagcgccagagccggcagaagaaacgccctgcccgacatccagagcagcgccgccaccgacggcaccagcgacctgcccctgaagctggaggccctgagcgtgaaggaggacgccaaggagaaggacgagaagaccacccaggaccagctggagaagccccagaacgaggagaagtag

SEQ ID NO: 95164 - DNA, 3213 bp, Artificial Sequence
  derived and/or modified sequence
atgggggcagcaaggggtagccctgccaggccaagaaggttgccactactctctgtccttctgctgccccttcttggcgggactcagacagcgattgtcttcataaaacagccaagttctcaggacgccttacaaggacgccgggccctgctccgctgcgaggtggaggcccccggtccggtccatgtctactggttactcgacggtgctcctgttcaggacaccgaaagacgatttgcccagggttcaagcctgtctttcgctgccgttgatcgtttgcaagattctggaacctttcaatgtgtcgccagagatgatgtcactggcgaggaggccaggtctgccaatgcaagcttcaacatcaaatggatcgaggctgggcccgtggtcctcaagcaccctgcaagcgaggcagagattcagccccagactcaggtgacgctgcgttgtcatatcgacggtcacccccgaccaacataccaatggttcagagacggcactccgttgagtgatggccagagtaaccacaccgttagttctaaagaaaggaatctgacactgaggccagccgggccggagcactctggattatatagttgctgcgcccattccgcgttcggtcaggcgtgctcctcacaaaatttcactctcagcatcgcggatgagagcttcgcccgcgtggtcctcgctccccaagatgtagtggtggcccggtacgaggaggctatgtttcattgccagttctctgctcagccccccccttcattacagtggttgttcgaggatgagaccccgatcacaaataggtcccgcccccctcaccttcgaagggccaccgtcttcgcaaatgggtcattactcctgactcaggtgcgaccaaggaatgccggaatttatagatgtattgggcagggccagaggggtcctccaatcatactggaagccacgctgcatttggccgagattgaggatatgcccctgttcgaaccacgggtttttaccgccgggagcgaggagcgagttacatgcctaccccccaaagggctgcctgaaccctcggtttggtgggaacatgctggtgtcagactccccacacatgggcgcgtttaccaaaagggccacgagctggtgttggctaatatcgcagagtcggatgcaggcgtgtacacctgtcatgcagccaacctggccgggcagagacgccaggatgtgaacatcacagtcgccaccgtacccagctggctcaagaagccccaagatagccagttagaggaaggcaaaccaggctacctcgactgcttgacccaggcgactcctaagcccacggtagtttggtaccggaaccagatgttaatttctgaagacagccggtttgaggtctttaagaatggaacgctgcgaatcaattctgtcgaagtgtacgatggcacctggtaccgttgcatgtccagcacccctgccggttccatcgaagcccaagcgcgggtgcaagtgttagagaagctgaagttcacacctccacctcagccacagcaatgcatggagtttgacaaagaggcaacagtgccatgcagcgccacggggcgggaaaagccaaccatcaagtgggagagagcagatggcagtagtctccctgaatgggttactgacaacgctgggacccttcactttgcaagggtgacccgtgatgacgcagggaactacacctgtatagccagtaacggccctcagggacagatccgtgcacacgtccagcttactgtagccgttttcatcacatttaaggttgaaccagaaaggaccacagtgtaccagggacatactgcgcttcttcagtgcgaggcccagggtgaccccaaacccctcattcagtggaaagggaaagatcgcatcctcgatcccaccaagctgggaccgagaatgcacattttccaaaacggttccctggttattcatgacgtggcccctgaagattccgggcgatatacatgcatagccgggaattcctgcaatattaagcacacagaggcccccctatacgtggtggataagcctgtgcctgaggaaagtgagggacctgggtcaccccctccctacaagatgatccaaaccattgggttaagtgtgggcgccgccgtggcctacatcattgccgtcttagggttgatgttttactgcaaaaaacggtgcaaagccaagagactccaaaagcaacccgaaggagaagagcccgagatggaatgcctgaatgggggccccttgcagaatgggcaacccagtgcggaaatccaagaagaagtggccctgaccagtctcggttccggccctgctgctactaacaaacgacacagtacctccgataagatgcatttcccccggtcaagcttgcagccaattacgacactggggaagtcagaatttggtgaggtctttttggccaaggcacagggtttagaagagggagtggctgaaacccttgtgctggtgaagtccctgcaatccaaggatgagcaacaacagctagattttcgaagggaactggagatgttcgggaagttgaaccacgcaaacgtggtgcgccttcttggcctatgccgggaggccgagccgcactatatggtcctagagtatgtagaccttggggatctcaagcaatttctacgcatctctaaatctaaagacgaaaaactgaaatctcagcccctgagtactaagcagaaagtagccctgtgtacacaggtcgccttgggaatggaacatctttctaataataggtttgtgcacaaagatctggccgctaggaactgcctcgttagcgctcaacgacaggtgaaagtgtctgcactgggcctatcaaaagatgtctataattctgaatactatcattttagacaagcctgggtgcctttaagatggatgtcccctgaggctattctcgagggagacttttcgacaaaaagtgacgtctgggcgttcggggtactcatgtgggaagtgtttacacacggcgagatgccgcacggtggccaggccgacgatgaggtgctggccgacctccaggccggtaaagccaggctgccacaaccagaagggtgtcccagtaagctgtatcggctcatgcagagatgctgggcgctaagtccaaaggaccgtcccagtttctcagagatagccagcgctctgggcgatagtaccgtggatagcaaaccgtag

SEQ ID NO: 95165 - DNA, 3213 bp, Artificial Sequence
  derived and/or modified sequence
atgggcgccgcccggggcagccctgcccggccccggcggctgcccctgctgtctgtgctgctgctgcccctgctgggcggcacccagacagccatcgtgttcatcaagcagcccagcagccaggatgccctgcagggcagaagagccctgctgcgctgtgaggtggaggcccctggccctgtgcacgtgtactggctgctggatggagcccctgtgcaggacacagaaagaagatttgcccagggcagcagcctgagctttgctgctgtggaccggctgcaggacagcggcaccttccagtgtgtggccagagatgatgtgactggagaggaggcccggagcgccaatgccagcttcaacatcaagtggattgaggccggccctgtggtgctgaagcacccagccagcgaggccgagatccagccccagacccaggtgaccctgcgctgccacattgatggccacccccggcccacctaccagtggttcagagatggcacccccctgagtgatggccagagcaaccacacagtgagcagcaaggagaggaacctgaccctgcggcctgctggccctgagcacagcggcctgtacagctgctgtgcccacagcgccttcggccaggcctgcagcagccagaacttcaccctgagcattgctgatgagagctttgcccgggtggtgctggccccccaggatgtggtggtggcccgctatgaggaggccatgttccactgccagttcagcgcccagcccccacccagcctgcagtggctgtttgaagatgagacccccatcaccaacagaagccggcccccccacctgcggcgggccaccgtgtttgccaacggcagcctgctgctgacccaggtgcggcccagaaatgccggcatctaccgctgcatcggccagggccagaggggcccccccatcatcctggaggccaccctgcacctggccgagattgaggacatgcccctgtttgagcccagggtcttcaccgctggcagcgaggagcgggtgacctgcctgccccccaagggcctgcctgagcccagcgtgtggtgggagcacgccggcgtgcggctgcccacccacggccgggtgtaccagaagggccacgagctggtgctggccaacattgctgagagtgatgctggggtgtacacctgccacgccgccaacctggccggccagaggcggcaggatgtgaacatcaccgtggccaccgtgcccagctggctgaagaagccccaggacagccagctggaggagggcaagccaggctacctggactgcctgacccaggccacccccaagcccaccgtggtgtggtacagaaaccagatgctgatcagcgaggacagcagatttgaggtgttcaagaatggcaccctgcgcatcaacagcgtggaggtgtatgatggcacctggtaccgctgcatgagcagcaccccagctggcagcattgaggcccaggcccgggtgcaggtgctggagaagctgaagttcaccccaccaccccagccccagcagtgcatggagtttgacaaggaggccaccgtgccctgcagcgccaccggccgggagaagcccaccatcaagtgggagcgggcagatggcagcagcctgcctgagtgggtgacagacaatgccggcaccctgcactttgcccgggtgaccagagatgatgctggcaactacacctgcatcgccagcaatggcccccagggccagatccgggcccacgtgcagctgactgtggccgtgttcatcaccttcaaggtggagcctgagaggaccaccgtgtaccagggccacacagccctgctgcagtgtgaggcccagggcgaccccaagcccctcatccagtggaagggcaaggaccgcatcctggaccccaccaagctgggccccaggatgcacatcttccagaatggcagcctggtgattcatgatgtggccccagaagattctggccgctacacctgcatcgccggcaacagctgcaacatcaagcacacagaggcccccctgtatgtggtggacaagcctgtgcctgaggagagcgagggccctggcagccccccaccctacaagatgatccagaccatcggcctgtctgtgggcgctgctgtggcctacatcatcgctgtgctgggcctgatgttctactgcaagaagcgctgcaaggccaagaggctgcagaagcagcctgagggggaggagcctgagatggagtgcctgaatggaggccccctgcagaatggccagcccagcgctgagatccaggaggaggtggccctgaccagcctgggcagcggccctgctgccaccaacaagaggcacagcaccagtgacaagatgcacttccccaggagcagcctgcagcccatcaccaccctgggcaagtcagaatttggagaggtgttcctggccaaggcccagggcctggaggagggcgtggccgagaccctggtgctggtgaagagcctgcagagcaaggatgagcagcagcagctggacttccggcgggagctggagatgtttgggaagctgaaccacgccaacgtggtgcggctgctgggcctgtgccgggaggccgagccccactacatggtgctggagtatgtggacctgggggacctgaagcagttcctgcgcatcagcaagagcaaggatgagaagctgaagagccagcccctgagcaccaagcagaaggtggccctgtgcacccaggtggccctgggcatggagcacctgagcaacaacagatttgtgcacaaggacctggccgccaggaactgcctggtgtctgcccagaggcaggtgaaggtgtctgccctgggcctgagcaaggatgtgtacaacagcgagtactaccacttccggcaggcctgggtgcccctgcgctggatgagccctgaggccatcctggagggggacttcagcaccaagagtgatgtgtgggccttcggcgtgctgatgtgggaggtgttcacccacggggagatgcctcatggaggccaggctgatgatgaggtgctggccgacctgcaggccggcaaggcccggctgccccagcctgagggctgccccagcaagctgtaccgcctgatgcagcgctgctgggccctgagccccaaggaccggcccagcttcagcgagatcgccagcgccctgggggacagcacagtggacagcaagccctag

SEQ ID NO: 95166 - DNA, 3213 bp, Artificial Sequence
  derived and/or modified sequence
atgggcgccgcccggggcagccccgcccggccccggcggctgcccctcttgagcgtccttcttctgcctctgttagggggaacccagaccgcaattgtgttcataaaacagcctagtagccaggatgctttacaggggcgtcgcgccttactccgatgcgaagtggaagcccccggacccgtgcacgtgtattggctcctggatggtgcccccgtgcaagatactgagcgcaggttcgctcaaggctcgtcactgtccttcgctgccgtggatcgactacaagattccggcaccttccaatgtgttgctcgcgacgacgtaactggagaggaggcccgctcagccaatgcttctttcaacattaagtggattgaagcaggccccgtagtacttaagcatccagcatcggaggctgagatccagccacagacccaagtgacccttaggtgtcacattgatggccacccccgtcccacctaccagtggtttagagacggaacccccctgtcagacggccagtccaaccacactgtgagttcgaaagagcgcaatctgactctgaggccagccggcccagagcattcaggtttatactcctgctgcgcacatagcgcgttcggccaggcatgcagctcgcagaactttaccttaagcattgctgacgaaagtttcgctagggtcgtgttagctccccaggacgtggtcgtggctaggtacgaggaagctatgtttcactgtcagttcagcgctcaaccccccccctctctccagtggctgtttgaggatgaaacaccaatcacaaataggagccgtcccccacacctgagacgggctacggtttttgccaatggctccttactgctgacacaggttcgcccccggaacgccggaatctatcgatgcataggtcaggggcagaggggccccccaatcattttagaagcaacactgcacctggctgaaatcgaagatatgcccctcttcgagccccgtgtctttacagctggcagcgaggagcgcgtgacctgccttcctccaaaaggtttaccagagcctagtgtgtggtgggagcacgccggcgtgaggctgcccacccacggacgggtgtaccagaagggtcacgaactcgtcctcgcaaacatcgcagagtccgacgctggagtgtatacatgtcacgctgccaacctcgctggacagcggagacaggatgtaaacatcacagtggctactgtgccctcatggctcaaaaagccccaggacagccagctggaggaaggcaaacctggatatctggactgcctgactcaggccacacccaaacccacagtggtgtggtacagaaatcagatgctcatctctgaagactcccggttcgaggtcttcaaaaatgggacgctgaggattaacagcgttgaggtgtacgacggcacatggtaccggtgcatgtccagcaccccagcagggagtatcgaagcccaggcccgcgtgcaagtgctggagaagctgaagtttaccccacctcctcaaccgcagcaatgtatggagttcgacaaagaagctactgttccctgctctgccacaggcagagaaaagccaacaattaagtgggagcgtgctgatggtagttcactgcctgagtgggtgactgacaacgcgggtactctgcacttcgcgagggttactcgggacgacgctggcaattacacctgcatagcctcgaatggaccgcagggacagatccgtgcccacgtgcagctgacagttgctgtattcatcacttttaaagtagaacccgaacgcaccacggtataccagggtcacactgctctcctccagtgtgaggcccagggagatcccaaaccgttaattcagtggaagggcaaagacaggatcttggatccaacaaaactggggcctaggatgcacatcttccagaatggttccctggttatccacgacgtggctccagaagacagtgggagatatacctgcattgcgggtaattcgtgcaatattaagcatacggaggcccccctctacgtagtcgacaaaccagtgcctgaggagagtgagggccctggttctccccctccctataagatgatacaaactatagggctgtctgttggagcagcagttgcctacatcatcgccgttctgggcctgatgttctattgtaagaagagatgtaaggccaagagacttcagaaacagcccgagggagaggagcctgaaatggaatgtctgaacgggggaccactgcaaaacggccagccatcagccgaaattcaagaagaggtggctctaacatcacttggctcaggacccgctgcgacaaacaagcggcacagtaccagtgacaagatgcactttccacgatcctctctgcagcctatcaccacgctcggcaaaagcgagttcggggaggtgttcctggccaaagcgcagggactagaggaaggcgtggctgagactcttgtgcttgtgaaatccctgcagtcgaaggatgagcagcaacagctggactttcggagagaactggaaatgttcggcaaattgaaccacgccaatgtcgttagattgcttggactatgcagagaggcggagccacactacatggtcctcgaatacgtcgacctgggcgatttgaagcagtttctgcgtattagtaagtctaaagatgagaagctcaagtctcaacctctgtcaacgaagcagaaggttgccctgtgcacccaggtggctctgggaatggagcacctctctaacaatcgatttgtgcacaaagatctggccgcccggaactgtcttgtctccgcacaacgccaggtcaaggttagtgcgcttggcctgtctaaagacgtgtacaattctgaatactatcatttcaggcaggcatgggttccactgaggtggatgtcacctgaagccatcttggagggagattttagcacaaaatccgatgtgtgggccttcggcgtgctgatgtgggaggtatttacccacggtgagatgccccacggtgggcaagctgacgatgaggtcttagcagacctgcaggccggtaaagcacggctgccacagcctgaaggatgtccttctaaactgtaccgtctgatgcaaagatgctgggcgctgtctccaaaggatcgtcccagtttcagtgagattgcatcagcactgggcgattctaccgtggattctaaaccctag

SEQ ID NO: 95167 - DNA, 3213 bp, Artificial Sequence
  derived and/or modified sequence
atgggagccgctcggggttctccagccaggccccgaaggctacctctgctgtctgtcttgctgttaccgcttcttggagggacccagacggctatcgtgttcataaaacagccttctagccaggatgctttacagggccgacgggcattacttcgctgtgaagttgaagcacccggacccgtccacgtctactggctattagatggtgcgccagtgcaggataccgagcgtaggttcgctcagggcagttcactgtccttcgccgctgtagacaggcttcaagattcaggaaccttccaatgtgtggctcgagatgatgtgactggcgaggaggccagatctgccaatgcctcttttaatatcaagtggattgaagcaggccctgtagtcctgaagcatcctgcgagtgaggccgagatccagcctcaaacacaggttactctgagatgccatatcgacggtcacccccgtcctacttaccaatggtttagggacggaactcctctctcggacggccagtctaaccatacagtttcttctaaagaacgcaacctaacgttgagacccgcaggtccagagcattctggcctgtattcttgctgtgcccatagtgcctttgggcaggcgtgttcatcgcagaatttcaccctgagcattgcagacgagtcttttgctcgggtggtgctggcccctcaggatgttgtggtcgctaggtacgaagaggcgatgttccattgtcagttttccgcccagccccctccctctctacagtggctatttgaggacgaaacacctatcacaaaccgctcacgcccaccgcatctgaggagagccactgtttttgccaatggctccctgctgctcactcaggtcaggccccgaaatgccggaatctacagatgcattggccaggggcagcgcggaccgcctatcatcttagaggcaacactgcacctggcggagatcgaggatatgccgctgttcgagcccagggtgttcacggccggttccgaggaaagagtcacgtgcctgccacctaaagggctgcctgagccatctgtttggtgggagcatgctggagtgaggctgccaacccacggcagagtataccagaagggacacgagctggtgctggctaatatcgcggagtcggatgcaggggtgtatacctgccatgccgctaaccttgctggacaaagaagacaagacgtaaacatcaccgtggccaccgtgccctcatggctcaaaaagcctcaagactcccaactcgaggaaggaaagcccggataccttgattgtctcactcaggctactccaaaaccgaccgttgtatggtataggaaccaaatgctgatctctgaggacagcagatttgaagtgttcaaaaacgggaccttaaggatcaactcagtagaggtttacgacggaacttggtatcgctgtatgtcttccaccccagctggtagtattgaggcacaggccagggtgcaggtgctagaaaaacttaagttcacacccccaccccagccacagcagtgtatggaattcgacaaagaagcgaccgtgccttgtagtgccaccggcagggaaaagccaacaattaagtgggaacgtgcagacggctcatccctccctgaatgggtaacagacaacgccggaactctgcactttgcgagggtgaccagggacgatgcaggcaattacacctgcatagcatccaacggaccacagggtcaaatccgagcccatgttcagctaaccgtagccgtttttattacgttcaaagtcgagccagagcgcacaaccgtttaccaggggcacacggccctgctccagtgcgaggctcagggcgacccgaagcccctgattcagtggaaggggaaagatcgcattctagaccctacaaaattgggtccaagaatgcatatattccagaatggttcactggtcattcacgacgtcgcaccggaagactcaggaaggtatacatgcatcgctggcaattcctgtaatatcaaacataccgaggctcccctgtatgtggtagataaaccagtgcctgaggaatctgaggggccaggcagcccaccaccttataagatgatccagacaatcggactgtcagtcggtgctgcagtggcctatattatcgccgtgcttggcctcatgttctattgcaagaagaggtgcaaggccaaacgcttgcaaaagcagccagagggcgaggagcccgagatggagtgcctgaatggcggtccactgcagaacggccaaccgtctgctgagatccaggaagaagtcgccttaaccagcttgggctctggacctgcggcaaccaataagagacactccacctctgataaaatgcatttcccaaggtcatctttgcagcctatcaccaccctcggcaagagcgaatttggggaagtgtttttggcgaaggcacagggtctggaagagggggtagcagagaccctggtcctggtaaagagcctgcagagcaaggatgagcagcaacaactggacttccgtcgggagcttgaaatgttcggtaaactcaaccatgcaaacgtcgtgcgtttgttggggttgtgtcgggaggccgagccccattatatggttctagagtacgtcgacctgggtgacttgaaacagtttttacgtattagtaagtccaaggatgaaaaacttaagtcgcaacctctgtcgaccaagcagaaggtggcactgtgcacacaggtggctctgggtatggagcacttgtctaacaacaggttcgtgcataaagacctcgctgctcggaactgtctcgtgtctgcccagaggcaggttaaggtaagcgctctcgggctctcaaaggacgtctacaacagcgagtactaccactttcgccaagcctgggtccctctccggtggatgtcccccgaagccatcctagagggagacttctcaaccaagagcgatgtgtgggcattcggcgtgctgatgtgggaggtgttcacacatggcgagatgccacacgggggtcaagccgacgacgaggtcctggccgatctccaggcgggaaaggctcggctccctcagcccgagggctgccctagcaaactctacagactgatgcagcgatgctgggccttgagtcccaaggacagaccatcatttagcgagattgcatccgctctcggcgactctacagtcgactcaaaaccctag

SEQ ID NO: 95168 - DNA, 3213 bp, Artificial Sequence
  derived and/or modified sequence
atgggcgccgccagaggcagccccgccagacccagaagactgcccctgctgagcgtgctgctgctgcccctgctgggcggcacccagaccgccatcgtgttcatcaagcagcccagcagccaggacgccctgcagggcagaagagccctgctgagatgcgaggtggaggcccccggccccgtgcacgtgtactggctgctggacggcgcccccgtgcaggacaccgagagaagattcgcccagggcagcagcctgagcttcgccgccgtggacagactgcaggacagcggcaccttccagtgcgtggccagagacgacgtgaccggcgaggaggccagaagcgccaacgccagcttcaacatcaagtggatcgaggccggccccgtggtgctgaagcaccccgccagcgaggccgagatccagccccagacccaggtgaccctgagatgccacatcgacggccaccccagacccacctaccagtggttcagagacggcacccccctgagcgacggccagagcaaccacaccgtgagcagcaaggagagaaacctgaccctgagacccgccggccccgagcacagcggcctgtacagctgctgcgcccacagcgccttcggccaggcctgcagcagccagaacttcaccctgagcatcgccgacgagagcttcgccagagtggtgctggccccccaggacgtggtggtggccagatacgaggaggccatgttccactgccagttcagcgcccagcccccccccagcctgcagtggctgttcgaggacgagacccccatcaccaacagaagcagacccccccacctgagaagagccaccgtgttcgccaacggcagcctgctgctgacccaggtgagacccagaaacgccggcatctacagatgcatcggccagggccagagaggcccccccatcatcctggaggccaccctgcacctggccgagatcgaggacatgcccctgttcgagcccagagtgttcaccgccggcagcgaggagagagtgacctgcctgccccccaagggcctgcccgagcccagcgtgtggtgggagcacgccggcgtgagactgcccacccacggcagagtgtaccagaagggccacgagctggtgctggccaacatcgccgagagcgacgccggcgtgtacacctgccacgccgccaacctggccggccagagaagacaggacgtgaacatcaccgtggccaccgtgcccagctggctgaagaagccccaggacagccagctggaggagggcaagcccggctacctggactgcctgacccaggccacccccaagcccaccgtggtgtggtacagaaaccagatgctgatcagcgaggacagcagattcgaggtgttcaagaacggcaccctgagaatcaacagcgtggaggtgtacgacggcacctggtacagatgcatgagcagcacccccgccggcagcatcgaggcccaggccagagtgcaggtgctggagaagctgaagttcaccccccccccccagccccagcagtgcatggagttcgacaaggaggccaccgtgccctgcagcgccaccggcagagagaagcccaccatcaagtgggagagagccgacggcagcagcctgcccgagtgggtgaccgacaacgccggcaccctgcacttcgccagagtgaccagagacgacgccggcaactacacctgcatcgccagcaacggcccccagggccagatcagagcccacgtgcagctgaccgtggccgtgttcatcaccttcaaggtggagcccgagagaaccaccgtgtaccagggccacaccgccctgctgcagtgcgaggcccagggcgaccccaagcccctgatccagtggaagggcaaggacagaatcctggaccccaccaagctgggccccagaatgcacatcttccagaacggcagcctggtgatccacgacgtggcccccgaggacagcggcagatacacctgcatcgccggcaacagctgcaacatcaagcacaccgaggcccccctgtacgtggtggacaagcccgtgcccgaggagagcgagggccccggcagcccccccccctacaagatgatccagaccatcggcctgagcgtgggcgccgccgtggcctacatcatcgccgtgctgggcctgatgttctactgcaagaagagatgcaaggccaagagactgcagaagcagcccgagggcgaggagcccgagatggagtgcctgaacggcggccccctgcagaacggccagcccagcgccgagatccaggaggaggtggccctgaccagcctgggcagcggccccgccgccaccaacaagagacacagcaccagcgacaagatgcacttccccagaagcagcctgcagcccatcaccaccctgggcaagagcgagttcggcgaggtgttcctggccaaggcccagggcctggaggagggcgtggccgagaccctggtgctggtgaagagcctgcagagcaaggacgagcagcagcagctggacttcagaagagagctggagatgttcggcaagctgaaccacgccaacgtggtgagactgctgggcctgtgcagagaggccgagccccactacatggtgctggagtacgtggacctgggcgacctgaagcagttcctgagaatcagcaagagcaaggacgagaagctgaagagccagcccctgagcaccaagcagaaggtggccctgtgcacccaggtggccctgggcatggagcacctgagcaacaacagattcgtgcacaaggacctggccgccagaaactgcctggtgagcgcccagagacaggtgaaggtgagcgccctgggcctgagcaaggacgtgtacaacagcgagtactaccacttcagacaggcctgggtgcccctgagatggatgagccccgaggccatcctggagggcgacttcagcaccaagagcgacgtgtgggccttcggcgtgctgatgtgggaggtgttcacccacggcgagatgccccacggcggccaggccgacgacgaggtgctggccgacctgcaggccggcaaggccagactgccccagcccgagggctgccccagcaagctgtacagactgatgcagagatgctgggccctgagccccaaggacagacccagcttcagcgagatcgccagcgccctgggcgacagcaccgtggacagcaagccctag

SEQ ID NO: 95169 - DNA, 4272 bp, Artificial Sequence
  derived and/or modified sequence
ggcggggcttggcggcggcggcggcggcgcgcggggactcggaggtactgggcgcgcgcggctccggctcgggacgcctcgggacgcctcggggtcgggctccggctgcggctgctgctgcggcgcccgcgctccggtgcgctccgcctcctgtgcccgccgcggagcgcagtctgcgcgcccgccgtgcgccctcagctccttttcctgagcccgccgcgatgggagctgcgcggggatccccggccagaccccgccggttgcctctgctcagcgtcctgctgctgccgctgctgggcggtacccagacagccattgtcttcatcaagcagccgtcctcccaggatgcactgcaggggcgccgggcgctgcttcgctgtgaggttgaggctccgggcccggtacatgtgtactggctgctcgatggggcccctgtccaggacacggagcggcgtttcgcccagggcagcagcctgagctttgcagctgtggaccggctgcaggactctggcaccttccagtgtgtggctcgggatgatgtcactggagaagaagcccgcagtgccaacgcctccttcaacatcaaatggattgaggcaggtcctgtggtcctgaagcatccagcctcggaagctgagatccagccacagacccaggtcacacttcgttgccacattgatgggcaccctcggcccacctaccaatggttccgagatgggacccccctttctgatggtcagagcaaccacacagtcagcagcaaggagcggaacctgacgctccggccagctggtcctgagcatagtgggctgtattcctgctgcgcccacagtgcttttggccaggcttgcagcagccagaacttcaccttgagcattgctgatgaaagctttgccagggtggtgctggcaccccaggacgtggtagtagcgaggtatgaggaggccatgttccattgccagttctcagcccagccacccccgagcctgcagtggctctttgaggatgagactcccatcactaaccgcagtcgccccccacacctccgcagagccacagtgtttgccaacgggtctctgctgctgacccaggtccggccacgcaatgcagggatctaccgctgcattggccaggggcagaggggcccacccatcatcctggaagccacacttcacctagcagagattgaagacatgccgctatttgagccacgggtgtttacagctggcagcgaggagcgtgtgacctgccttccccccaagggtctgccagagcccagcgtgtggtgggagcacgcgggagtccggctgcccacccatggcagggtctaccagaagggccacgagctggtgttggccaatattgctgaaagtgatgctggtgtctacacctgccacgcggccaacctggctggtcagcggagacaggatgtcaacatcactgtggccactgtgccctcctggctgaagaagccccaagacagccagctggaggagggcaaacccggctacttggattgcctgacccaggccacaccaaaacctacagttgtctggtacagaaaccagatgctcatctcagaggactcacggttcgaggtcttcaagaatgggaccttgcgcatcaacagcgtggaggtgtatgatgggacatggtaccgttgtatgagcagcaccccagccggcagcatcgaggcgcaagcccgtgtccaagtgctggaaaagctcaagttcacaccaccaccccagccacagcagtgcatggagtttgacaaggaggccacggtgccctgttcagccacaggccgagagaagcccactattaagtgggaacgggcagatgggagcagcctcccagagtgggtgacagacaacgctgggaccctgcattttgcccgggtgactcgagatgacgctggcaactacacttgcattgcctccaacgggccgcagggccagattcgtgcccatgtccagctcactgtggcagtttttatcaccttcaaagtggaaccagagcgtacgactgtgtaccagggccacacagccctactgcagtgcgaggcccagggggaccccaagccgctgattcagtggaaaggcaaggaccgcatcctggaccccaccaagctgggacccaggatgcacatcttccagaatggctccctggtgatccatgacgtggcccctgaggactcaggccgctacacctgcattgcaggcaacagctgcaacatcaagcacacggaggcccccctctatgtcgtggacaagcctgtgccggaggagtcggagggccctggcagccctcccccctacaagatgatccagaccattgggttgtcggtgggtgccgctgtggcctacatcattgccgtgctgggcctcatgttctactgcaagaagcgctgcaaagccaagcggctgcagaagcagcccgagggcgaggagccagagatggaatgcctcaacggtgggcctttgcagaacgggcagccctcagcagagatccaagaagaagtggccttgaccagcttgggctccggccccgcggccaccaacaaacgccacagcacaagtgataagatgcacttcccacggtctagcctgcagcccatcaccacgctggggaagagtgagtttggggaggtgttcctggcaaaggctcagggcttggaggagggagtggcagagaccctggtacttgtgaagagcctgcagagcaaggatgagcagcagcagctggacttccggagggagttggagatgtttgggaagctgaaccacgccaacgtggtgcggctcctggggctgtgccgggaggctgagccccactacatggtgctggaatatgtggatctgggagacctcaagcagttcctgaggatttccaagagcaaggatgaaaaattgaagtcacagcccctcagcaccaagcagaaggtggccctatgcacccaggtagccctgggcatggagcacctgtccaacaaccgctttgtgcataaggacttggctgcgcgtaactgcctggtcagtgcccagagacaagtgaaggtgtctgccctgggcctcagcaaggatgtgtacaacagtgagtactaccacttccgccaggcctgggtgccgctgcgctggatgtcccccgaggccatcctggagggtgacttctctaccaagtctgatgtctgggccttcggtgtgctgatgtgggaagtgtttacacatggagagatgccccatggtgggcaggcagatgatgaagtactggcagatttgcaggctgggaaggctagacttcctcagcccgagggctgcccttccaaactctatcggctgatgcagcgctgctgggccctcagccccaaggaccggccctccttcagtgagattgccagcgccctgggagacagcaccgtggacagcaagccgtgaggagggagcccgctcaggatggcctgggcaggggaggacatctctagagggaagctcacagcatgatgggcaagatccctgtcctcctgggccctgaggcccctgccctagtgcaacaggcattgctgaggtctgagcagggcctggcctttcctcctcttcctcaccctcatcctttgggaggctgacttggacccaaactgggcgactagggctttgagctgggcagttttccctgccacctcttcctctatcagggacagtgtgggtgccacaggtaaccccaatttctggccttcaacttctccccttgaccgggtccaactctgccactcatctgccaactttgcctggggagggctaggcttgggatgagctgggtttgtggggagttccttaatattctcaagttctgggcacacagggttaatgagtctcttggcccactggtcccacttgggggtctagaccaggattatagaggacacagcaagtgagtcctccccactctgggcttgtgcacactgacccagacccacgtcttccccacccttctctcctttcctcatcctaagtgcctggcagatgaaggagttttcaggagcttttgacactatataaaccgccctttttgtatgcaccacgggcggcttttatatgtaattgcagcgtggggtgggtgggcatgggaggtaggggtgggccctggagatgaggagggtgggccatccttaccccacacttttattgttgtcgttttttgtttgttttgtttttttgtttttgtttttgtttttacactcgctgctctcaataaataagccttttttacaacctg

SEQ ID NO: 95170 - protein, 451 aa, Artificial Sequence
  derived and/or modified sequence
MRECISIHVGQAGVQIGNACWELYCLEHGIQPDGQMPSDKTIGGGDDSFNTFFSETGAGKHVPRAVFVDLEPTVIDEVRTGTYRQLFHPEQLITGKEDAANNYARGHYTIGKEIIDLVLDRIRKLADQCTGLQGFLVFHSFGGGTGSGFTSLLMERLSVDYGKKSKLEFSIYPAPQVSTAVVEPYNSILTTHTTLEHSDCAFMVDNEAIYDICRRNLDIERPTYTNLNRLIGQIVSSITASLRFDGALNVDLTEFQTNLVPYPRIHFPLATYAPVISAEKAYHEQLSVAEITNACFEPANQMVKCDPRHGKYMACCLLYRGDVVPKDVNAAIATIKTKRTIQFVDWCPTGFKVGINYQPPTVVPGGDLAKVQRAVCMLSNTTAIAEAWARLDHKFDLMYAKRAFVHWYVGEGMEEGEFSEAREDMAALEKDYEEVGVDSVEGEGEEEGEEY

SEQ ID NO: 95171 - DNA, 1356 bp, Artificial Sequence
  derived and/or modified sequence
atgagagagtgcatcagcatccacgtgggccaggccggcgtgcagatcggcaacgcctgctgggagctgtactgcctggagcacggcatccagcccgacggccagatgcccagcgacaagaccatcggcggcggcgacgacagcttcaacaccttcttcagcgagaccggcgccggcaagcacgtgcccagagccgtgttcgtggacctggagcccaccgtgatcgacgaggtgagaaccggcacctacagacagctgttccaccccgagcagctgatcaccggcaaggaggacgccgccaacaactacgccagaggccactacaccatcggcaaggagatcatcgacctggtgctggacagaatcagaaagctggccgaccagtgcaccggcctgcagggcttcctggtgttccacagcttcggcggcggcaccggcagcggcttcaccagcctgctgatggagagactgagcgtggactacggcaagaagagcaagctggagttcagcatctaccccgccccccaggtgagcaccgccgtggtggagccctacaacagcatcctgaccacccacaccaccctggagcacagcgactgcgccttcatggtggacaacgaggccatctacgacatctgcagaagaaacctggacatcgagagacccacctacaccaacctgaacagactgatcggccagatcgtgagcagcatcaccgccagcctgagattcgacggcgccctgaacgtggacctgaccgagttccagaccaacctggtgccctaccccagaatccacttccccctggccacctacgcccccgtgatcagcgccgagaaggcctaccacgagcagctgagcgtggccgagatcaccaacgcctgcttcgagcccgccaaccagatggtgaagtgcgaccccagacacggcaagtacatggcctgctgcctgctgtacagaggcgacgtggtgcccaaggacgtgaacgccgccatcgccaccatcaagaccaagagaaccatccagttcgtggactggtgccccaccggcttcaaggtgggcatcaactaccagccccccaccgtggtgcccggcggcgacctggccaaggtgcagagagccgtgtgcatgctgagcaacaccaccgccatcgccgaggcctgggccagactggaccacaagttcgacctgatgtacgccaagagagccttcgtgcactggtacgtgggcgagggcatggaggagggcgagttcagcgaggccagagaggacatggccgccctggagaaggactacgaggaggtgggcgtggacagcgtggagggcgagggcgaggaggagggcgaggagtactag

SEQ ID NO: 95172 - DNA, 1356 bp, Artificial Sequence
  derived and/or modified sequence
atgagagaatgtattagtattcacgtaggtcaggcaggtgtgcagataggaaatgcttgctgggaactgtactgcctggagcatggtattcagcctgacggtcagatgcccagcgacaaaaccattggaggaggagatgactcatttaacacctttttcagtgagacaggggccggaaagcacgttccccgggctgttttcgtggatctagagcctacagtgatcgacgaggtgcgcacaggtacgtacagacagttgttccaccccgagcagctaataaccggaaaagaagatgccgcgaataactatgctcgtgggcattacacaatagggaaggagatcatcgatcttgttctggacagaatccgaaagttagcagatcagtgcaccggcttgcaggggtttctagtctttcatagtttcggtggcggaacaggctctggatttacttcactcctaatggaacgtttaagtgtagactatgggaagaaatccaagctggaattttctatctatcccgcacctcaggtcagcaccgcggtagttgagccctataactcaattctgaccacacatacaactcttgaacactccgactgtgcattcatggtggacaatgaagctatctatgacatttgccgcagaaacttggacattgaacggcctacttataccaacctgaaccgcttgatcggtcaaattgtgtcttctattacagcaagtttgcgtttcgacggcgccctgaacgtggatctgaccgaattccagaccaacttggtgccgtacccaagaatacactttccactggctacctacgcacctgttatatccgcagagaaagcttaccatgagcagctgtctgtcgcagagattaccaacgcttgcttcgaacctgcaaaccagatggtgaagtgcgaccctaggcacggaaagtacatggcctgctgcttactctatcgaggcgacgttgtaccgaaggatgttaacgctgccattgccaccattaaaactaaacgtactattcagttcgttgattggtgcccaacaggattcaaagttggtatcaattatcagccccctacagtggtacccggcggggacctcgcaaaggtacagcgggctgtgtgtatgctgagtaacacaacagccattgcggaggcatgggcaagactggaccacaaatttgatctcatgtacgccaagagggcatttgttcactggtacgtcggcgaggggatggaggagggcgaattctctgaggcacgggaggatatggctgctctggaaaaggattacgaggaggttggcgttgatagtgtggagggcgagggggaagaggagggcgaagaatattag

SEQ ID NO: 95173 - DNA, 1356 bp, Artificial Sequence
  derived and/or modified sequence
atgcgcgagtgtatctcaattcatgttgggcaggctggcgtacagattgggaacgcttgctgggaactatattgcctggaacatggcattcagcccgatggacagatgcctagcgacaagaccataggaggcggcgacgactcctttaacacctttttctcagagacgggcgccggcaagcatgtgccaagggcagtgttcgtggacctggagcccacggtgatcgatgaagtgcggaccggaacgtatcggcagctgttccatccagaacagcttataactggcaaggaagacgcagctaataactacgcccggggccactatactataggcaaagagataattgatctggttttagacagaataaggaagcttgcggatcaatgcacaggcctgcagggctttttggtgtttcactcctttggcggcgggaccggtagtggctttacctccctcctgatggagcggctgtcggtcgactacggcaagaagtctaagctagaattttccatctatcccgccccgcaggtaagcactgccgtggttgagccctataatagtattcttacgacacacactacactcgaacacagcgactgcgctttcatggttgacaatgaagccatctacgacatctgtcggaggaaccttgatatcgaaaggcccacgtacaccaacttgaatcgtctaatcggtcagattgtgtcctcaatcacagcatctctgcgattcgacggggcattgaacgtggacctgacagagttccagacaaatctcgtaccgtaccctaggattcatttcccacttgccacctatgccccggtgatctcagcagaaaaagcatatcacgaacaactgtcagtggctgagattaccaacgcctgttttgagcctgcgaaccagatggtgaagtgtgaccctcgacatggtaagtacatggcctgctgcctgctgtaccggggggacgtcgtcccaaaggacgtgaacgcagctatcgccaccatcaagaccaaaaggactatccagttcgtggattggtgtccgaccgggtttaaggtagggatcaattaccagcctccaactgttgtcccgggaggagacctggcaaaggtacagagggccgtttgcatgctgtcaaacactaccgctatagctgaagcctgggctcgtctggaccataaatttgacctgatgtacgccaaacgagcttttgtccattggtatgtgggggaaggcatggaagaaggggaattctcagaggcccgcgaagacatggccgcgcttgaaaaagattacgaagaggttggcgtggactccgtcgaaggtgaaggcgaggaggaaggtgaggaatactag

SEQ ID NO: 95174 - DNA, 1356 bp, Artificial Sequence
  derived and/or modified sequence
atgagggagtgcatcagcatccacgtgggccaggccggcgtgcagattggaaatgcctgctgggagctgtactgcctggagcacggcatccagccagatggccagatgcccagcgacaagaccatcggcggcggagatgacagcttcaacaccttcttcagcgagaccggggccggcaagcacgtgcccagggctgtgtttgtggacctggagcccaccgtgattgatgaggtgaggacaggcacctaccggcagctgttccaccctgagcagctgatcaccgggaaggaggatgctgccaacaactatgcccggggccactacaccatcggcaaggagatcatcgacctggtgctggaccgcatcaggaagctggccgaccagtgcaccggcctgcagggcttcctggtgttccacagctttggaggcggcactggaagtggcttcaccagcctgctgatggagcggctgtctgtggactatggcaagaagagcaagctggagttcagcatctacccagccccccaggtgtccacagctgtggtggagccctacaacagcatcctgaccacccacaccaccctggagcacagcgactgtgccttcatggtggacaatgaggccatctatgacatctgcagaagaaacctggacatcgagcggcccacctacaccaacctgaaccggctgattggccagatcgtgagcagcatcacagccagcctgcgctttgatggagccctgaatgtggacctgacagagttccagaccaacctggtgccctacccccgcatccacttccccctggccacctacgcccctgtgatctctgctgagaaggcctaccacgagcagctgtctgtggccgagatcaccaatgcctgctttgagcccgccaaccagatggtgaagtgtgaccccaggcatggcaagtacatggcctgctgcctgctgtacagaggagatgtggtgcccaaggatgtgaatgctgccatcgccaccatcaagaccaagaggaccatccagtttgtggactggtgccccaccggcttcaaggtgggcatcaactaccagcccccaacagtggtgcctggaggagacctggccaaggtgcagagagctgtgtgcatgctgagcaacaccacagccatcgccgaggcctgggcccggctggaccacaagtttgacctgatgtatgccaagagggcctttgtgcactggtacgtgggggagggcatggaggagggggagttcagcgaggcccgggaggacatggccgccctggagaaggactatgaggaggtgggcgtggacagcgtggagggggagggggaggaggagggggaggagtactag

SEQ ID NO: 95175 - DNA, 1356 bp, Artificial Sequence
  derived and/or modified sequence
atgcgggagtgcatcagcatccacgtgggccaggccggcgtgcagatcgggaacgcttgttgggagttgtactgcctagaacacggcatccagcctgacggccaaatgccctccgataaaacaatcggcggcggcgacgactcatttaatacctttttctctgagacgggggcggggaagcatgtgccacgggccgtatttgttgatctggagcccactgtaatcgacgaggtgcgaacaggcacctatagacagctctttcatcctgagcagctcattacaggcaaagaggacgccgctaataactacgcaagaggacactatacaatcggtaaggagatcatcgatctggttctcgatcgcattcggaagttggccgatcagtgtactggtctccaaggcttcctggtattccattccttcggcgggggtacaggatctgggttcacttcacttttgatggaacgtctgagtgtggattatgggaaaaagtccaagttggaattttctatttaccctgcgcctcaagtgtctacagcagtggtcgaaccctacaatagcattttgaccacgcacaccaccttggagcacagtgactgcgccttcatggtggataatgaagccatctacgacatttgccgcaggaacctcgacatcgaacgccctacgtatactaacctgaatcggctcattggacagatcgtcagtagcattactgctagcctcaggtttgacggcgccttgaatgttgaccttaccgagttccagaccaatcttgtcccatatcctagaattcacttcccgctcgctacttatgcacctgtcatcagcgccgaaaaagcctaccacgaacaactcagtgtggctgaaatcacaaatgcatgctttgaacctgcaaatcagatggtcaaatgtgacccaaggcacggcaagtacatggcctgctgcctgttgtacaggggagatgtggttcctaaggatgtcaatgccgctatcgcgaccatcaaaaccaagagaaccatccagtttgttgattggtgcccgacgggcttcaaggtgggcatcaattaccagcctcccactgtcgtcccgggcggagacctcgcaaaggtccagcgcgctgtgtgcatgctgtccaacaccaccgccattgcagaagcatgggctcggttagaccataagtttgatctgatgtatgcaaagcgggcgtttgtgcactggtatgtgggggaagggatggaggagggagagttctccgaagcacgcgaagacatggcggccttagagaaagactacgaggaagtgggggtggattccgtcgagggcgagggtgaagaagaaggcgaggaatactag

SEQ ID NO: 95176 - DNA, 1356 bp, Artificial Sequence
  derived and/or modified sequence
atgcgggagtgcatcagcatccacgtgggccaggccggcgtgcagatcgggaacgcttgttgggaattgtattgcctggagcatgggatccagccggatggtcagatgccaagcgacaaaactattggcggcggggatgacagctttaacaccttttttagcgagaccggggcgggcaagcacgttccacgcgccgtgtttgtggatctcgaaccaactgtgatcgatgaggtgcggacgggcacttaccgacaattgttccatcccgaacaattgatcaccggaaaagaggatgccgcgaataactacgccagggggcattacactatcggaaaggagatcatagacctggtccttgatcgcatcagaaagttggccgatcagtgtactggactgcaggggttcctcgttttccattccttcggaggcggcactggcagtggctttacctccctgcttatggagcggctcagtgtggactatggtaaaaagtccaagctggagttttctatatatcctgcaccacaggtatcgacagctgttgtggaaccctacaatagtatccttacaacacatacaacactggagcacagtgattgcgcatttatggttgataatgaagccatatacgatatctgtagacgcaatttggacatcgaacgccccacttacacaaatctgaaccggctgattgggcagatcgtgagctctattaccgcatctctgagattcgatggcgccctgaatgtggatctgactgagttccaaaccaatttggtcccgtatcctagaattcacttccccttggccacatatgctccggtcatctccgctgagaaagcctaccatgaacagttgtccgtggctgaaattacaaacgcatgttttgagccagctaatcaaatggtgaagtgcgatccacgccacggcaagtacatggcctgctgcctactctacagaggggatgtggtgccgaaagacgtcaacgctgccatcgctacgatcaagactaagaggactatacagttcgtggactggtgccctaccggatttaaggttgggattaattatcagcctcctaccgttgttcctggtggagacctggccaaagttcagcgcgccgtatgcatgctgagcaatacaactgccatagcagaagcctgggcacgtttggaccacaaatttgatctgatgtacgccaagcgagctttcgtccactggtatgttggcgagggcatggaagaaggcgaatttagtgaagcgagagaagacatggccgctcttgaaaaggattacgaagaggttggcgtggatagtgtagagggcgagggcgaagaagagggggaggagtattag

SEQ ID NO: 95177 - DNA, 1356 bp, Artificial Sequence
  derived and/or modified sequence
atgagggagtgtatttcaattcacgtcggccaggcgggtgtgcagattggcaatgcgtgctgggagctttactgtctagagcacggtattcagcccgatggtcaaatgcctagcgacaaaactataggagggggtgacgactcctttaacactttcttttcagagactggtgccggaaagcacgtaccgagggctgtgttcgtagacctcgagcccactgttatcgatgaagtgcgcactggaacttatagacagctgttccatccagagcaattaatcacgggcaaggaggacgcagccaacaattatgctaggggccactatacaattggcaaagagattattgatcttgtgctggacaggattcgtaagctcgcggatcagtgcacgggtcttcaagggttcttagtgttccattcctttgggggaggaaccggatcggggtttacgtcgttattgatggagcgcttgtcagttgactacgggaaaaagtcaaagctcgagttctctatctaccccgctccccaggtcagtactgcagtggtggagccatacaattcaattctcaccactcataccacgttggagcattcagactgcgcgttcatggtggataatgaggccatctacgatatttgtagacggaatttggacatcgagcgcccaacctacacaaatttaaaccggctgattggtcagattgtgtcatctattacagcatccctccgtttcgacggagctctgaacgtggatctgactgaatttcagactaatctcgtcccgtacccaaggatccacttccccctcgccacatatgccccagtcatctctgctgagaaggcatatcacgaacaactttctgtagccgaaattacaaacgcttgttttgaacctgccaaccaaatggtgaagtgcgaccctaggcatggcaagtatatggcttgctgcctcctctacagaggcgatgttgtgcctaaggacgtgaacgcggcaatagcaacaataaagacaaagcgcaccatccagttcgtggactggtgtccaacgggttttaaagttgggattaattaccagcctcccaccgtggtgcccggaggagacctcgctaaggttcagcgcgctgtttgcatgctgtccaacaccactgccatcgcggaggcttgggccagactggatcacaaattcgatctcatgtacgctaagcgtgcttttgtccactggtacgtgggagaaggaatggaggagggagaattctccgaagcgcgagaagacatggccgctttggaaaaggactatgaggaagtaggagtggactcggtggaaggtgaaggagaggaggagggagaggaatactag

SEQ ID NO: 95178 - DNA, 1356 bp, Artificial Sequence
  derived and/or modified sequence
atgcgagaatgtatatctattcatgtggggcaggctggggttcagataggcaatgcgtgttgggaactgtactgcctggaacacgggattcagcccgatggtcaaatgccgagtgataagaccatcggcggtggggacgactcgttcaacacgttcttttctgagaccggggcaggtaagcacgtgcctagggcagtctttgtagatctcgagccgaccgtgatagacgaagtcagaaccggtacctataggcagcttttccatcccgaacagctgattaccgggaaggaggacgcagccaacaattatgccagaggccactataccattgggaaggagatcatcgacctggtactggatcgaattagaaagctggcagaccagtgtacaggcctgcaggggttcctggtcttccattcattcggtggcggaactggtagtggcttcacaagcctgctgatggaacgcctttctgtggattatggcaagaagagcaagctggagttctctatctaccccgcacctcaggtgtccaccgccgttgtcgagccatataactcaatactgaccacgcacacgactctagaacattccgactgtgccttcatggtggacaacgaagctatctacgacatttgcagacggaacttagatatcgagcgtcctacctacactaatcttaatcgtctgattggccagatcgtttcaagtatcaccgccagtctcagattcgacggcgcattaaatgtggacttgactgagtttcagaccaatctggttccctacccccgaattcattttcctttggccacatatgcccctgtgatatcggccgaaaaggcttatcacgaacagctaagcgtggctgagatcacaaacgcatgcttcgagccggctaatcagatggttaaatgcgaccctcgccacgggaagtatatggcgtgttgtctgctctacagaggcgacgtggttcctaaagatgtgaacgccgctattgcaacgataaaaactaaaagaacaatccagtttgtggactggtgtcctactgggttcaaggtcggtatcaattatcagcctcctacagtggtgccaggcggagatctggccaaagtacagcgcgctgtgtgtatgttgagcaatacgacagcaatcgctgaagcatgggcgcgactggatcataaatttgacttaatgtacgcgaagcgagctttcgttcattggtatgttggcgagggcatggaagaaggggagttctccgaggcacgcgaagatatggccgcattagaaaaggattacgaggaagtgggcgtggatagcgtggagggagagggggaggaggagggtgaagagtactag

SEQ ID NO: 95179 - DNA, 1887 bp, Artificial Sequence
  derived and/or modified sequence
tcttttctttcgtaagctctctgggcgagggtggtggtatgttttgtgaggtttagcttagccccaaatcctcaagccccgccgccgccgcagtgcgggtgcaggaaccgggccagtactgcgcccagggcgcagcagagcgctggggaggaacaaaggcggcgcctaggcgcctgtgttatccgagagactttcgggggccgcgggcagcccgtctgccgcgaccgaggggtctggggcgtcccggctgggccccgtgtctgtgcgcacggtttcgctgatgctgaggggccactttctgtctcgcgttgttctctggggaccgggagaggaggaggcacccaaaaagagcgggggcgttgggcgagctgggggacgtgggagggggaacgggaacaaagcgcagcctagggttagcgtgggaagaccctccgcggtctttggcgttttggaaagatacccacacattcccgggaaaacatgcgtgagtgcatctccatccacgttggccaggctggtgtccagattggcaatgcctgctgggagctctactgcctggaacacggcatccagcccgatggccagatgccaagtgacaagaccattgggggaggagatgattccttcaacaccttcttcagtgagacgggggctggcaagcatgtgccccgggcagtgtttgtagacttggaacccacagtcattgatgaagttcgcactggcacctaccgccagctcttccaccctgagcaacttatcacaggcaaagaagatgctgccaataactatgcccgagggcactacaccattggcaaggagatcattgacctcgtgttggaccgaattcgcaagctggccgaccagtgcacgggtctccagggcttcttggttttccacagctttggtgggggaactggttctgggttcacctcgctgctcatggaacgtctctcagttgattatggcaagaagtccaagctggagttctctatttacccggcgccccaggtttccacagctgtagttgagccctacaactccatcctcaccacccacaccaccctggagcactctgattgtgccttcatggtagacaatgaggccatctatgacatctgtcgtagaaacctcgatattgagcgtccaacctatactaacctgaataggttaataggtcaaattgtgtcctccatcactgcttccctgagatttgatggagccctgaatgttgacctgacagaattccagaccaacctggtgccctatccccgcatccacttccctctggccacatatgcccctgtcatctctgctgagaaagcctaccatgaacagctttctgtagcagagatcaccaatgcttgctttgagccagccaaccagatggtgaaatgtgaccctcgccatggtaaatacatggcttgctgcctgttgtaccgtggtgacgtggttcccaaagatgtcaatgctgccattgccaccatcaagaccaagcgtaccatccagtttgtggattggtgccccactggcttcaaggttggcatcaactaccagcctcccactgtggtgcctggtggagacctggccaaggtacagagagctgtgtgcatgctgagcaacaccacagccattgctgaggcctgggctcgcctggaccacaagtttgacctgatgtatgccaaacgtgcctttgttcactggtacgttggggaggggatggaggaaggtgagttttcagaggcccgtgaggacatggctgcccttgagaaggattatgaggaggttggtgtggattctgttgaaggagagggtgaggaagaaggagaggaatactaaagttaaaacgtcacaaaggtgctgcttttacagggaagcttattctgtttt

SEQ ID NO: 95180 - DNA, 1915 bp, Artificial Sequence
  derived and/or modified sequence
ataatggatgctcggccgactgcttctgcacggtctctttgtctaaaggatgcaaacagtctacggatgctagagaaaaaggggtgggggagagattacctcatcccacgtcgcttgcaccaatcaccagtctcctgtcatggcttctctgggcagattgggggtctggaccaacaggaaaaggccccggcccatccccatggtgaccgagttgtatatagggagccgcatccgcctatgtgccgcaggttctcttacatcgaccgcctaagagtcgcgctgtaagaagcaacaacctctcctcttcgtctccgccatcagctcggcagtcgcgaagcagcaaccatgcgtgagtgcatctccatccacgttggccaggctggtgtccagattggcaatgcctgctgggagctctactgcctggaacacggcatccagcccgatggccagatgccaagtgacaagaccattgggggaggagatgattccttcaacaccttcttcagtgagacgggggctggcaagcatgtgccccgggcagtgtttgtagacttggaacccacagtcattgatgaagttcgcactggcacctaccgccagctcttccaccctgagcaacttatcacaggcaaagaagatgctgccaataactatgcccgagggcactacaccattggcaaggagatcattgacctcgtgttggaccgaattcgcaagctggccgaccagtgcacgggtctccagggcttcttggttttccacagctttggtgggggaactggttctgggttcacctcgctgctcatggaacgtctctcagttgattatggcaagaagtccaagctggagttctctatttacccggcgccccaggtttccacagctgtagttgagccctacaactccatcctcaccacccacaccaccctggagcactctgattgtgccttcatggtagacaatgaggccatctatgacatctgtcgtagaaacctcgatattgagcgtccaacctatactaacctgaataggttaataggtcaaattgtgtcctccatcactgcttccctgagatttgatggagccctgaatgttgacctgacagaattccagaccaacctggtgccctatccccgcatccacttccctctggccacatatgcccctgtcatctctgctgagaaagcctaccatgaacagctttctgtagcagagatcaccaatgcttgctttgagccagccaaccagatggtgaaatgtgaccctcgccatggtaaatacatggcttgctgcctgttgtaccgtggtgacgtggttcccaaagatgtcaatgctgccattgccaccatcaagaccaagcgtaccatccagtttgtggattggtgccccactggcttcaaggttggcatcaactaccagcctcccactgtggtgcctggtggagacctggccaaggtacagagagctgtgtgcatgctgagcaacaccacagccattgctgaggcctgggctcgcctggaccacaagtttgacctgatgtatgccaaacgtgcctttgttcactggtacgttggggaggggatggaggaaggtgagttttcagaggcccgtgaggacatggctgcccttgagaaggattatgaggaggttggtgtggattctgttgaaggagagggtgaggaagaaggagaggaatactaaagttaaaacgtcacaaaggtgctgcttttacagggaagcttattctgttttaaacattgaaaagttgtggtctgatcagttaatttgtatgtagcagtgtatgctctcatatacaattactgacctatgctctaaaacatgaatgctttgttacagacccaagctgtccatttctgtgatgggttttgaataaagtattccctgtcttaaatga

SEQ ID NO: 95181 - DNA, 549 bp, Artificial Sequence
  derived and/or modified sequence
atgagagagtgcatcagcatccacgtgggccaggccggcgtgcagatcggcaacgcctgctgggagctgtactgcctggagcacggcatccagcccgacggccagatgcccagcgacaagaccatcggcggcggcgacgacagcttcaacaccttcttcagcgagaccggcgccggcaagcacgtgcccagagccgtgttcgtggacctggagcccaccgtgatcgactggtgccccaccggcttcaaggtgggcatcaactaccagccccccaccgtggtgcccggcggcgacctggccaaggtgcagagagccgtgtgcatgctgagcaacaccaccgccatcgccgaggcctgggccagactggaccacaagttcgacctgatgtacgccaagagagccttcgtgcactggtacgtgggcgagggcatggaggagggcgagttcagcgaggccagagaggacatggccgccctggagaaggactacgaggaggtgggcgtggacagcgtggagggcgagggcgaggaggagggcgaggagtactag

SEQ ID NO: 95182 - DNA, 549 bp, Artificial Sequence
  derived and/or modified sequence
atgcgggagtgtatcagtatccacgtgggccaagctggcgtgcagattggcaacgcgtgttgggagctgtactgcctagagcacggaattcagcccgacggccagatgccctccgacaagactatcggcggaggagatgatagctttaatacttttttttctgagaccggagccggcaaacacgtccctagggctgtcttcgtggatctggagccaactgtgatcgactggtgccccacagggtttaaggtagggattaactaccagcctcccacagtcgtgcccgggggcgatcttgcgaaggtgcagcgcgccgtgtgcatgctttcaaatacaaccgcgattgccgaagcctgggcaaggctcgatcacaaattcgacctgatgtacgcaaaacgagcatttgttcactggtatgtcggggagggcatggaggaaggggaattcagcgaggctcgcgaagatatggcagcattggaaaaggactatgaagaggtgggggttgattcagttgaaggagaaggagaggaggagggcgaggagtattag

SEQ ID NO: 95183 - DNA, 549 bp, Artificial Sequence
  derived and/or modified sequence
atgagggagtgcatcagcatccacgtgggccaggccggcgtgcagattggaaatgcctgctgggagctgtactgcctggagcacggcatccagccagatggccagatgcccagcgacaagaccatcggcggcggagatgacagcttcaacaccttcttcagcgagaccggggccggcaagcacgtgcccagggctgtgtttgtggacctggagcccaccgtgattgactggtgccccaccggcttcaaggtgggcatcaactaccagccccccaccgtggtgcctggaggagacctggccaaggtgcagagagctgtgtgcatgctgagcaacaccacagccatcgccgaggcctgggcccggctggaccacaagtttgacctgatgtatgccaagagggcctttgtgcactggtacgtgggggagggcatggaggagggggagttcagcgaggcccgggaggacatggccgccctggagaaggactatgaggaggtgggcgtggacagcgtggagggggagggggaggaggagggggaggagtactag

SEQ ID NO: 95184 - DNA, 549 bp, Artificial Sequence
  derived and/or modified sequence
atgcgggagtgcatcagcatccacgtgggccaggccggcgtgcagatagggaatgcttgctgggagctatactgcttagagcatggaatacagcctgacgggcaaatgccctcagacaagaccattggtggcggggatgattctttcaacacctttttctccgaaactggagctggtaaacatgttccgagggcagtctttgttgacctcgaacctactgtcatagactggtgcccaactgggttcaaagtggggatcaactaccaacctccaacagtcgtcccgggcggagatctggctaaggtgcaacgggcagtctgtatgttgtccaacacaaccgccatcgccgaagcctgggccagactagaccataagtttgatctgatgtacgccaaaagggcctttgtacattggtatgtcggcgaaggcatggaggaaggagaatttagcgaggctcgggaagacatggctgctcttgaaaaagactacgaggaggtgggggtcgactctgtggagggggaaggcgaagaggaaggcgaggagtactag

SEQ ID NO: 95185 - DNA, 549 bp, Artificial Sequence
  derived and/or modified sequence
atgcgggagtgcatctcaatccatgtaggacaagctggggtacagatcggcaatgcgtgctgggagctgtattgtctggaacatggtatccagccggatgggcagatgcctagcgacaagactatcgggggaggcgacgattccttcaacactttcttttcagagacaggcgctggcaagcatgtgccgcgagcagttttcgtcgacctagagccgactgtgattgattggtgccccacagggtttaaggtaggcattaactatcagcccccaacagtggttccaggaggcgatctcgcaaaagtgcaaagggcagtgtgtatgctttccaatactactgccatcgcagaagcctgggcccgtctcgaccataagttcgatctcatgtatgcaaagcgtgcttttgttcactggtacgtaggtgagggcatggaagaaggagaattctcagaggcacgcgaggatatggcagcgctggaaaaagactatgaggaggtgggtgtggacagtgtcgaaggggaaggcgaggaggagggggaggagtattag

SEQ ID NO: 95186 - DNA, 644 bp, Artificial Sequence
  derived and/or modified sequence
agtgcgttacttacctcgactcttagcttgtcggggacggtaaccgggacccggtgtctgctcctgtcgccttcgcctcctaatccctagccactatgcgtgagtgcatctccatccacgttggccaggctggtgtccagattggcaatgcctgctgggagctctactgcctggaacacggcatccagcccgatggccagatgccaagtgacaagaccattgggggaggagatgactccttcaacaccttcttcagtgagacgggcgctggcaagcacgtgccccgggctgtgtttgtagacttggaacccacagtcattgattggtgccccactggcttcaaggttggcatcaactaccagcctcccactgtggtgcctggtggagacctggccaaggtacagagagctgtgtgcatgctgagcaacaccacagccattgctgaggcctgggctcgcctggaccacaagtttgacctgatgtatgccaagcgtgcctttgttcactggtacgtgggtgaggggatggaggaaggcgagttttcagaggcccgtgaagatatggctgcccttgagaaggattatgaggaggttggtgtggattctgttgaaggagagggtgaggaagaaggagaggaatactaa

SEQ ID NO: 95187 - protein, 537 aa, Artificial Sequence
  derived and/or modified sequence
MSWAARPPFLPQRHAAGQCGPVGVRKEMHCGVASRWRRRRPWLDPAAAAAAAVAGGEQQTPEPEPGEAGRDGMGDSGRDSRSPDSSSPNPLPQGVPPPSPPGPPLPPSTAPSLGGSGAPPPPPMPPPPLGSPFPVISSSMGSPGLPPPAPPGFSGPVSSPQINSTVSLPGGGSGPPEDVKPPVLGVRGLHCPPPPGGPGAGKRLCAICGDRSSGKHYGVYSCEGCKGFFKRTIRKDLTYSCRDNKDCTVDKRQRNRCQYCRYQKCLATGMKREAVQEERQRGKDKDGDGEGAGGAPEEMPVDRILEAELAVEQKSDQGVEGPGGTGGSGSSPNDPVTNICQAADKQLFTLVEWAKRIPHFSSLPLDDQVILLRAGWNELLIASFSHRSIDVRDGILLATGLHVHRNSAHSAGVGAIFDRSLSRVLTELVSKMRDMRMDKTELGCLRAIILFNPDAKGLSNPSEVEVLREKVYASLETYCKQKYPEQQGRFAKLLLRLPALRSIGLKCLEHLFFFKLIGDTPIDTFLMEMLEAPHQLA

SEQ ID NO: 95188 - protein, 129 aa, Artificial Sequence
  derived and/or modified sequence
MILSNTTAVTPFLTKLWQETVQQGGNMSGLARRSPRSSDGKLEALYVLMVLGFFGFFTLGIMLSYIRSKKLEHSNDPFNVYIESDAWQEKDKAYVQARVLESYRSCYVVENHLAIEQPNTHLPETKPSP

SEQ ID NO: 95189 - DNA, 390 bp, Artificial Sequence
  derived and/or modified sequence
atgatcttgagcaacaccaccgccgtgacccctttcctaactaagctgtggcaagagaccgtgcagcagggaggtaacatgtccgggttagcacggcgaagcccacggtccagcgatgggaaattggaagcactctatgtgttgatggtcttaggctttttcggcttctttacactcggcataatgctgtcatacatccggagcaagaagctggaacattcgaatgacccattcaatgtatatatagagtcggatgcctggcaggagaaagataaggcctatgtccaggcccgggtgctcgaatcatataggagttgttacgtggtcgagaatcacctggccattgagcagcccaatacacaccttccagaaactaaaccctccccatag

SEQ ID NO: 95190 - DNA, 390 bp, Artificial Sequence
  derived and/or modified sequence
atgatcctatctaacaccaccgcggtgactccattcctcactaagctctggcaggagacagttcaacaaggcgggaatatgtcaggcttggctcggagatcacctaggtcctctgacgggaaactggaagccttgtacgtattgatggtgctagggtttttcggcttttttaccttaggcatcatgctcagctatatccgctccaagaagctcgagcactcgaacgatcctttcaacgtgtacatcgaaagcgatgcatggcaggagaaggataaagcatatgtgcaggcgcgcgtgctggagtcatataggagttgctacgtggtcgaaaatcacctggcaatcgaacagccaaacacccatcttcctgaaaccaagccaagtccgtag

SEQ ID NO: 95191 - DNA, 390 bp, Artificial Sequence
  derived and/or modified sequence
atgattctgtctaatacgactgctgtaacaccatttctcaccaagctgtggcaggagaccgtgcagcaagggggcaatatgtcaggactcgcgcgaagaagtccccggagctcggatgggaagctggaagctctgtatgtcttgatggtgctggggtttttcggattttttactcttgggatcatgctgagttatatccgctccaaaaagctcgaacactcaaacgatcctttcaatgtgtatatcgaatcagatgcatggcaggagaaggataaggcgtacgtgcaagcacgcgtgctggagtcatatcggtcatgctacgtcgtggaaaaccacctcgccatcgaacagccaaatacccatctacctgagactaagccttccccgtag

SEQ ID NO: 95192 - DNA, 390 bp, Artificial Sequence
  derived and/or modified sequence
atgattctttcaaacactacagccgtgacgccttttttgacaaagctgtggcaggagaccgtccagcaaggcggaaacatgagtggactggccaggaggtcaccgaggagttctgatggaaagctcgaagcattgtacgtactgatggtccttggattctttggcttttttactctggggatcatgctttcctatattagatccaaaaagctggaacacagcaatgatccattcaatgtgtacatcgagagcgacgcttggcaggagaaagataaagcctatgtccaggcacgagtgctagaaagttatcggtcatgctatgtggtcgaaaaccacctcgccatcgagcaaccgaatactcacctaccagagaccaagccctcaccatag

SEQ ID NO: 95193 - DNA, 390 bp, Artificial Sequence
  derived and/or modified sequence
atgattctctctaatacaactgccgtgacacctttcctcacaaaattgtggcaagagacagtgcaacagggtggtaatatgtcgggcctagcacgccggagtcccaggtcgagcgatggtaaactggaagcgttgtacgttctgatggtccttggcttttttggcttttttactctgggtatcatgctatcctacattcggagcaagaagctggaacactctaacgaccctttcaacgtctacatcgagagcgatgcgtggcaggagaaagacaaggcatatgtccaggccagagtgctagaatcctaccggtcgtgttacgttgtcgagaaccatctcgccatcgagcagcccaacacccaccttcctgaaacaaagccatctccatag

SEQ ID NO: 95194 - DNA, 390 bp, Artificial Sequence
  derived and/or modified sequence
atgatcctgtcgaataccactgccgttacgcctttccttaccaagctgtggcaagagactgtccagcaaggaggaaacatgtccggcctggcacggaggtccccgcgctccagtgacgggaaactggaagcactgtacgtgttgatggtgctcgggttcttcggcttcttcacactgggtattatgctgagctatattagatcaaaaaaactggagcacagtaatgaccccttcaacgtttacatcgaaagcgatgcgtggcaggagaaggacaaagcttacgtgcaggcaagagtgctcgaaagttacaggtcctgttacgtggtcgagaaccatctcgccattgagcagccaaacacacatctgccggagacgaaaccttcaccctag

SEQ ID NO: 95195 - DNA, 390 bp, Artificial Sequence
  derived and/or modified sequence
atgatcctgagcaacaccacagctgtgacccccttcctgaccaagctgtggcaggagaccgtgcagcagggcggcaacatgagcggcctggcccggcgcagccccaggagcagtgatggcaagctggaggccctgtatgtgctgatggtgctgggcttcttcggcttcttcaccctgggcatcatgctgagctacatccgcagcaagaagctggagcacagcaatgaccccttcaacgtgtacatcgagagtgatgcctggcaggagaaggacaaggcctacgtgcaggcccgggtgctggagagctaccgcagctgctacgtggtggagaaccacctggccatcgagcagcccaacacccacctgcctgagaccaagcccagcccctag

SEQ ID NO: 95196 - DNA, 390 bp, Artificial Sequence
  derived and/or modified sequence
atgatcctgagcaacaccaccgccgtgacccccttcctgaccaagctctggcaggaaaccgtgcagcaaggcggaaacatgagcggcctggcccgccgcagcccaaggagctctgacggaaaactggaagcactctacgtactgatggttttgggatttttcggatttttcaccctggggatcatgctgagctacatcagatccaaaaagctggagcactcaaatgatcctttcaatgtgtacattgagagcgacgcctggcaggaaaaagataaggcatacgtgcaggctcgggtcctggaatcctatcgctcatgttatgtggtagaaaaccacttggccattgaacagcccaatactcacttgcccgaaaccaagcccagcccctag

SEQ ID NO: 95197 - DNA, 390 bp, Artificial Sequence
  derived and/or modified sequence
atgatcctgagcaacaccaccgccgtgacccccttcctgaccaagttgtggcaagagactgtacaacaagggggtaacatgagcggcctcgcccgtcgctctccaagatccagcgatgggaagctcgaggccctgtacgtactgatggtgcttggattctttggatttttcactctgggcataatgctgtcatacatcaggtctaagaagctggagcacagcaatgaccctttcaacgtttacattgagtccgacgcatggcaggagaaggacaaggcctatgtgcaggctcgggtgctggaatcttacaggtcttgttacgtggtcgagaatcacctggcaattgaacagccgaatacacacttacccgagacaaaaccctccccttag

SEQ ID NO: 95198 - DNA, 390 bp, Artificial Sequence
  derived and/or modified sequence
atgatcctgagcaacaccaccgccgtgacccccttcctgaccaagctctggcaggaaactgttcagcagggagggaatatgtcgggacttgcgcgacggtcaccccggagctccgatgggaaactggaggcactgtacgtgctcatggtcctaggctttttcggcttctttactctgggaattatgctctcttacatccggtctaagaagttagagcactctaacgacccatttaatgtttatatcgagagcgacgcatggcaggagaaggataaggcttatgttcaagcccgcgtcctggagagttatagaagctgttacgtcgtagaaaatcacctcgcaatcgagcaacctaacacccacctgcctgagacgaaaccgagcccgtag

SEQ ID NO: 95199 - DNA, 390 bp, Artificial Sequence
  derived and/or modified sequence
atgatcctgagcaacaccaccgccgtgacccccttcctgaccaagctatggcaggaaaccgtgcagcagggtgggaacatgtccgggcttgctcggcgcagtccccgctcctcggacggaaaattagaagccctgtacgtgctgatggtgctcgggttctttggatttttcacattgggtattatgctcagctatatcaggagtaagaagctcgagcactcaaatgatccattcaacgtgtacattgaatccgacgcttggcaggagaaggacaaagcctacgtgcaggcccgcgtccttgaaagctacaggagctgttatgtggtcgaaaaccatcttgcgattgaacaacctaatacacacttgcctgaaacgaaaccttctccatag

SEQ ID NO: 95200 - DNA, 390 bp, Artificial Sequence
  derived and/or modified sequence
atgatcctgagcaacaccaccgccgtgacccccttcctgaccaagctgtggcaggagacagtgcagcagggcggtaacatgagtggcctggcgagacggtcccccaggtcctcagatggtaaattagaagcactttatgttttgatggtgctggggttctttggattttttactctcggtattatgttaagttacatcaggtcaaagaagttagagcactcaaatgacccattcaatgtgtatattgagtctgacgcatggcaagaaaaggacaaggcctacgtccaggcccgcgtgctcgagtcttacaggagttgctacgtggtggaaaatcacctggcaatcgagcaacccaacacccacctcccagaaacgaagccgagtccatag

SEQ ID NO: 95201 - DNA, 390 bp, Artificial Sequence
  derived and/or modified sequence
atgatcctgagcaacaccaccgccgtgacccccttcctgaccaagctctggcaggagaccgtgcagcaaggagggaatatgtctggtctcgctagacgctccccaaggtcgagcgatggcaagctcgaggctctgtacgtgctgatggtgcttggcttcttcggttttttcaccctcggcatcatgctctcatatattcggtcgaagaagttagaacactctaacgacccatttaacgtctacattgaatccgatgcctggcaggagaaggataaggcttatgtgcaagcccgcgttctggagtcatatagatcatgttatgtagtggagaaccatttggcaattgaacaaccgaatactcaccttcccgagaccaagccatcgccttag

SEQ ID NO: 95202 - DNA, 390 bp, Artificial Sequence
  derived and/or modified sequence
atgatcctgagcaacactaccgccgtgacaccttttctgaccaaattgtggcaggagaccgtgcagcagggagggaacatgtctggccttgcgaggaggtcaccacgatcctcagatggaaagcttgaagccctatacgttcttatggttctgggattctttgggttctttacgctggggattatgctgagctacatccgcagtaaaaagctggagcactcaaacgaccccttcaacgtttatattgagtctgacgcctggcaagaaaaagacaaggcttacgtgcaggctagagtgctcgagagctaccggtcttgctacgtcgtggagaaccatctcgcaattgaacaacctaacacgcacctgccagaaaccaagccgtctccctag

SEQ ID NO: 95203 - DNA, 390 bp, Artificial Sequence
  derived and/or modified sequence
atgattctgtctaacaccactgcagtgacaccttttctgactaagctgtggcaagagactgtgcaacaaggtggtaatatgagcggtttggcgaggaggagtcctcggagcagtgacggtaagttagaagcattatacgttcttatggtgcttggcttttttggcttttttactttggggatcatgctttcatacattagatctaaaaagttggagcactcaaatgatccattcaacgtgtacattgaatccgatgcgtggcaggaaaaagataaggcctatgtccaggccagggtcctggaatcataccgaagttgctacgtagtagagaaccacctggccattgagcagccgaatacacacctgccagaaaccaaaccttcaccttag

SEQ ID NO: 95204 - DNA, 390 bp, Artificial Sequence
  derived and/or modified sequence
atgatcttatccaacaccactgcagtcacaccctttctgactaagctgtggcaagagacagtccagcaaggcggaaacatgagcggactcgccagacggagccctcgttcttcggatgggaagctggaggccctgtatgttctaatggtgctcggcttctttgggtttttcaccctcggaatcatgcttagctacatccgcagcaagaaacttgagcattctaatgacccctttaacgtttacatcgagtctgacgcatggcaagaaaaagataaggcctatgttcaggcgagagtcctggagtcctatcgtagctgttacgttgttgaaaatcatctggctatagagcaaccaaacactcatctcccagagaccaaacccagtccctag

SEQ ID NO: 95205 - DNA, 390 bp, Artificial Sequence
  derived and/or modified sequence
atgatcttgtcgaataccaccgccgtcacccctttcctgactaaattatggcaggaaactgtgcaacaggggggtaatatgagtggcctggccaggcggagccccagatctagtgatgggaaactggaggccctctacgtacttatggtgctgggattctttggattcttcaccctagggattatgttatcttacatccgctctaagaaattggaacatagcaatgacccctttaatgtgtacattgagagtgacgcttggcaggaaaaggacaaggcgtatgttcaggcccgagtgctcgagagctataggtcatgttatgtggttgaaaaccatctggccattgagcagcctaacacgcatctaccagagaccaaaccctctccatag

SEQ ID NO: 95206 - DNA, 390 bp, Artificial Sequence
  derived and/or modified sequence
atgattctcagtaacacaaccgcggtgaccccttttctcaccaagttgtggcaggagaccgtacaacagggcggtaacatgagtgggttggccagacgctccccaagatcgagcgacggaaaactggaggccctgtacgtgctcatggtgctcggttttttcggcttcttcactcttggcatcatgttaagctatatccgctccaagaaactggagcacagtaacgatccttttaacgtatatatagaaagtgatgcttggcaggagaaagacaaggcttatgtgcaggcaagagtgttggagagttaccgctcctgttacgtggtcgagaaccatctggcgatagaacagccaaacacccacttgcctgaaactaagccatcgccttag

SEQ ID NO: 95207 - DNA, 390 bp, Artificial Sequence
  derived and/or modified sequence
atgattctctccaatacgacagcagttacgccctttctcacaaagctctggcaagagacggtgcaacagggtggaaatatgagcgggctcgccagacgcagtccaaggtcatcagatggcaaactggaagcgctgtacgtgctgatggtactcggtttcttcggctttttcactttagggatcatgctgtcgtacatccgttccaagaaactggagcacagtaacgacccattcaacgtgtacattgagagtgacgcttggcaggaaaaagacaaagcctacgtgcaggcaagggttttggaaagttaccgttcttgctatgtggtggagaatcacctggcgatagagcagcccaacacccaccttcccgaaactaaaccaagcccttag

SEQ ID NO: 95208 - DNA, 390 bp, Artificial Sequence
  derived and/or modified sequence
atgatcctgagcaacaccaccgccgtgacccccttcctgaccaagctgtggcaggagaccgtgcagcagggcggcaacatgagcggcctggccagaagaagccccagaagcagcgacggcaagctggaggccctgtacgtgctgatggtgctgggcttcttcggcttcttcaccctgggcatcatgctgagctacatcagaagcaagaagctggagcacagcaacgaccccttcaacgtgtacatcgagagcgacgcctggcaggagaaggacaaggcctacgtgcaggccagagtgctggagagctacagaagctgctacgtggtggagaaccacctggccatcgagcagcccaacacccacctgcccgagaccaagcccagcccctag

SEQ ID NO: 95209 - protein, 262 aa, Artificial Sequence
  derived and/or modified sequence
MARRSRHRLLLLLLRYLVVALGYHKAYGFSAPKDQQVVTAVEYQGDFKNRAEMIDFNIRIKNVTRSDAGKYRCEVSAPSEQGQNLEEDTVTLEVLVAPAVPSCEVPSSALSGTVVELRCQDKEGNPAPEYTWFKDGIRLLENPRLGSQSTNSSYTMNTKTGTLQFNTVSKLDTGEYSCEARNSVGYRRCPGKRMQVDDLNISGIIAAVVVVALVISVCGLGVCYAQRKGYFSKETSFQKSNSSSKATTMSENDFKHTKSFII

SEQ ID NO: 95210 - DNA, 789 bp, Artificial Sequence
  derived and/or modified sequence
atggcccgacgtagcaggcacagattgctgttgctgcttctgcggtacctggtcgtggccctgggttatcacaaggcttacggcttctccgcacccaaagaccagcaggttgtaacagcagtggaataccagggcgatttcaaaaacagggcggagatgatagactttaatatccgcatcaagaatgtcactagatctgatgcgggaaaatataggtgtgaggtgagtgccccgtccgaacaaggacagaatctggaggaggatactgttacgttggaggtattggtcgctccggctgtaccgagctgtgaagtaccttcatccgcgttgtcaggtactgttgtggaactcagatgccaggacaaagagggcaaccctgcccccgagtacacttggttcaaagatgggattcgtctgctggaaaatccaaggctgggaagccagagcactaactcctcatataccatgaatactaagaccggcacactgcagttcaatactgtgtccaaactggacacaggtgaatactcctgtgaagctagaaacagtgttggttatagacgctgcccaggcaagcggatgcaggtggacgacttgaatatcagtggcatcatagctgccgtggtggttgttgccctcgtgattagtgtctgtgggttaggcgtttgttatgcccaacggaagggctacttcagcaaggagacctccttccagaagtccaactcaagcagcaaggccacaacgatgagcgaaaatgacttcaaacataccaagtcctttatcatttag

SEQ ID NO: 95211 - DNA, 1677 bp, Artificial Sequence
  derived and/or modified sequence
agacccccatccctgggctggaggacccgcctcttggcagccagctgagaaggcgccccggggagggggaaactgacatcccatctagagccgtccctcctcttcctcccctcccgactctctgctcctttcccgccccagaagttcaagggcccccggcctcctgcgctcctgccgccgggaccctcgacctcctcagagcagccggctgccgccccgggaagatggcgaggaggagccgccaccgcctcctcctgctgctgctgcgctacctggtggtcgccctgggctatcataaggcctatgggttttctgccccaaaagaccaacaagtagtcacagcagtagagtaccaaggtgattttaaaaatcgagctgagatgatagatttcaatatccggatcaaaaatgtgacaagaagtgatgcggggaaatatcgttgtgaagttagtgccccatctgagcaaggccaaaacctggaagaggatacagtcactctggaagtattagtggctccagcagttccatcatgtgaagtaccctcttctgctctgagtggaactgtggtagagctacgatgtcaagacaaagaagggaatccagctcctgaatacacatggtttaaggatggcatccgtttgctagaaaatcccagacttggctcccaaagcaccaacagctcatacacaatgaatacaaaaactggaactctgcaatttaatactgtttccaaactggacactggagaatattcctgtgaagcccgcaattctgttggatatcgcaggtgtcctgggaaacgaatgcaagtagatgatctcaacataagtggcatcatagcagccgtagtagttgtggccttagtgatttccgtttgtggccttggtgtatgctatgctcagaggaaaggctacttttcaaaagaaacctccttccagaagagtaattcttcatctaaagccacgacaatgagtgaaaatgatttcaagcacacaaaatcctttataatttaaagactccactttagagatacaccaaagccaccgttgttacacaagttattaaactattataaaactctgctttgtccgacatttgcaaagaggtacacgaggaaatggaattggtatttcattttaattttcatgactactaactcacctgaacttgctattttaaacaaatagttctgtcgacacctaaaatataatctggcttcttgtgtctggactaagttaaaagaattaaaatactttgtaatgtcctgggctttgggaaatgttaaccacgtcctaacttctagagaacgttactaaaatataacatactgattgtgaagtcaatccacaggtcatgaaaatataaatcagactctgcacgagagtctgatttagggggtccaacaaatactctgacagatgcaaaaggaacctctggtctcatttctgccagaatcctcttttctcccctaatatcatccttattctgatgctcgttcatcactaacacacccacagaaaggaggaagcgggatgggtcttatgcccaaggatttgcactttgtgtttacttccattcctgggaactaaaagcaacatcaaaagaaatgcctaatggctggagcccacaggtgtgcaccacaggatttgcctggtgtgtgtcactgatttcttcatt

SEQ ID NO: 95212 - DNA, 789 bp, Artificial Sequence
  derived and/or modified sequence
atggcccggcgcagccgccaccggctgctgctgctgctgctgcgctacctggtggtggccctgggctaccacaaggcctacggcttcagcgcccccaaggaccagcaggtggtgacagctgtggagtaccagggcgacttcaagaacagagctgagatgattgacttcaacatccgcatcaagaatgtgaccaggagtgatgctgggaagtaccgctgtgaggtgtctgcccccagcgagcagggccagaacctggaggaggacacagtgaccctggaggtgctggtggccccagctgtgcccagctgtgaggtgcccagcagcgccctgtctggaacagtggtggagctgcgctgccaggacaaggagggcaacccagcccctgagtacacctggttcaaggatggcatccggctgctggagaacccccggctgggcagccagagcaccaacagcagctacaccatgaacaccaagacaggcaccctgcagttcaacacagtgtccaagctggacacaggagagtacagctgtgaggccagaaattctgtgggctaccgccgctgccctgggaagaggatgcaggtggatgacctgaacatcagcggcatcatcgctgctgtggtggtggtggccctggtgatctctgtgtgtggcctgggcgtgtgctacgcccagaggaagggctacttcagcaaggagaccagcttccagaagagcaacagcagcagcaaggccaccaccatgtctgaaaatgacttcaagcacaccaagagcttcatcatctag

SEQ ID NO: 95213 - DNA, 789 bp, Artificial Sequence
  derived and/or modified sequence
atggcccggcggagccggcaccggctgctgctgctgctgctgcggtatctggtggtcgccctaggataccacaaggcctacggcttctcagctccaaaagatcagcaggtcgttacagccgtcgaatatcagggagattttaagaaccgcgctgagatgattgattttaacattcgaataaagaatgtgactcgttcagacgctggtaaatacagatgtgaagtgagcgctccctcggagcaaggtcagaaccttgaggaggacaccgtgaccttggaggtactagtcgccccagctgtgccctcctgcgaggtcccatctagtgctttatccggcactgttgtcgaactcaggtgccaggataaggaagggaatcccgctccggaatatacatggttcaaggacgggatcagattgctagaaaatccccgcctgggatcacagtcgaccaattcctcttacactatgaataccaagaccggtactctccagtttaatacagtcagcaagttagacacgggtgagtatagttgcgaggccagaaacagcgtcggatacaggaggtgccctggaaaaagaatgcaggtcgatgatttaaacatttctggcataatcgcagctgttgtggtggtcgccttggtcattagcgtgtgcggacttggtgtgtgttatgcccaacgaaaaggatatttttcaaaggaaacctcgttccagaaaagtaatagctcttccaaagcaacaaccatgtccgaaaatgacttcaaacatacaaagagttttattatctag

SEQ ID NO: 95214 - DNA, 789 bp, Artificial Sequence
  derived and/or modified sequence
atggccagacggagcaggcataggctgttactgcttctccttaggtatttggtggttgcactcggctaccacaaagcttatggtttctcagctcccaaggaccagcaggtggtgaccgccgtagaatatcagggggactttaagaatagggctgaaatgatagatttcaacattaggatcaaaaacgtgacacgttctgacgcaggaaagtaccggtgtgaggtaagcgctccaagcgagcagggccagaatctagaagaggacaccgtgaccctagaggttctggtagcacctgcggtaccctcctgcgaagtcccaagtagcgctctcagtggcaccgtggtggaattacggtgccaggacaaagaaggcaatcccgctccagaatacacctggttcaaagacggaatacgcctgctggaaaatcccagactgggctcccagagcaccaattcgagctataccatgaacactaagacaggcacactccagttcaacaccgtctctaaactggacacgggtgagtactcctgcgaagcaagaaactcggtcggttacagacggtgtccaggcaagcgtatgcaagttgacgacctgaatatctcaggcatcattgctgcagtcgtggtggtggccctggtcatctctgtatgtggcttgggggtatgctacgcacagagaaagggctatttttctaaagaaacctcgttccagaagtctaactcatcaagcaaagccactaccatgtctgagaacgattttaaacatacgaaatcctttatcatctag

SEQ ID NO: 95215 - DNA, 789 bp, Artificial Sequence
  derived and/or modified sequence
atggccagaagaagcagacacagactgctgctgctgctgctgagatacctggtggtggccctgggctaccacaaggcctacggcttcagcgcccccaaggaccagcaggtggtgaccgccgtggagtaccagggcgacttcaagaacagagccgagatgatcgacttcaacatcagaatcaagaacgtgaccagaagcgacgccggcaagtacagatgcgaggtgagcgcccccagcgagcagggccagaacctggaggaggacaccgtgaccctggaggtgctggtggcccccgccgtgcccagctgcgaggtgcccagcagcgccctgagcggcaccgtggtggagctgagatgccaggacaaggagggcaaccccgcccccgagtacacctggttcaaggacggcatcagactgctggagaaccccagactgggcagccagagcaccaacagcagctacaccatgaacaccaagaccggcaccctgcagttcaacaccgtgagcaagctggacaccggcgagtacagctgcgaggccagaaacagcgtgggctacagaagatgccccggcaagagaatgcaggtggacgacctgaacatcagcggcatcatcgccgccgtggtggtggtggccctggtgatcagcgtgtgcggcctgggcgtgtgctacgcccagagaaagggctacttcagcaaggagaccagcttccagaagagcaacagcagcagcaaggccaccaccatgagcgagaacgacttcaagcacaccaagagcttcatcatctag

SEQ ID NO: 95216 - protein, 312 aa, Artificial Sequence
  derived and/or modified sequence
MARRSRHRLLLLLLRYLVVALGYHKAYGFSAPKDQQVVTAVEYQEAILACKTPKKTVSSRLEWKKLGRSVSFVYYQQTLQGDFKNRAEMIDFNIRIKNVTRSDAGKYRCEVSAPSEQGQNLEEDTVTLEVLVAPAVPSCEVPSSALSGTVVELRCQDKEGNPAPEYTWFKDGIRLLENPRLGSQSTNSSYTMNTKTGTLQFNTVSKLDTGEYSCEARNSVGYRRCPGKRMQVDDLNISGIIAAVVVVALVISVCGLGVCYAQRKGYFSKETSFQKSNSSSKATTMSENVQWLTPVIPALWKAAAGGSRGQEF

SEQ ID NO: 95217 - DNA, 939 bp, Artificial Sequence
  derived and/or modified sequence
atggcgagaaggtctcggcacaggttgcttttactcctgctgaggtatctggtggtcgccctcggctatcacaaagcctatggcttcagtgctccgaaggatcagcaggttgtgaccgcggtcgagtaccaggaggccatcctcgcatgtaagactccaaaaaagactgtgagcagtcggcttgaatggaagaagctgggcaggtctgtctccttcgtgtattaccagcagacattgcagggggatttcaaaaatcgggcagaaatgattgatttcaacattagaatcaagaacgtaacccgctcagatgctggaaaatatagatgtgaggtctcagcacccagtgagcaaggccagaatctggaggaagatacagtaacactcgaagtcctcgtcgcccctgctgtgccatcctgtgaggtgccctccagtgcactgagtggcaccgtcgtggagctaaggtgccaggacaaggagggcaatccggctccagagtatacgtggtttaaggacggaattagactcctagagaacccccggctcgggtctcagagcacaaactcgagctatacaatgaatactaaaaccgggacacttcagttcaacactgtgtccaagctggatacgggagagtactcatgcgaggcaaggaactccgtggggtatagacgctgtcccggcaaacgcatgcaggttgatgatttgaatatttctggtattattgcagccgtggtggtcgtagcactggtgatttccgtgtgcggactaggagtgtgctacgcccagagaaagggatattttagtaaagagaccagttttcaaaaatccaattcttccagcaaagccaccactatgagcgaaaatgttcagtggctaaccccggtgatcccagctttgtggaaagctgccgccggaggctcaaggggccaggaattttag

SEQ ID NO: 95218 - DNA, 1757 bp, Artificial Sequence
  derived and/or modified sequence
agccaacgaggggaagaaaggagttggggcaaaacaggaggcgtttccctacccgcatacatccccgtccccgagacacccaatccccccacccccagcctgcccgcgcctcccgcccccagctcctcgccctggggacagctggcagccccgcgcggaccagacacaaagccgatcaatcccggaggcgtgggggcggagggacgacccgccggggctttcccgggcgctgctctcctcctgctgccccctcgctaggacccggcggacgcctcgtctggttttcacgccctctagcccctacccccacacccccaaaacagaacagacccccatccctgggctggaggacccgcctcttggcagccagctgagaaggcgccccggggagggggaaactgacatcccatctagagccgtccctcctcttcctcccctcccgactctctgctcctttcccgccccagaagttcaagggcccccggcctcctgcgctcctgccgccgggaccctcgacctcctcagagcagccggctgccgccccgggaagatggcgaggaggagccgccaccgcctcctcctgctgctgctgcgctacctggtggtcgccctgggctatcataaggcctatgggttttctgccccaaaagaccaacaagtagtcacagcagtagagtaccaagaggctattttagcctgcaaaaccccaaagaagactgtttcctccagattagagtggaagaaactgggtcggagtgtctcctttgtctactatcaacagactcttcaaggtgattttaaaaatcgagctgagatgatagatttcaatatccggatcaaaaatgtgacaagaagtgatgcggggaaatatcgttgtgaagttagtgccccatctgagcaaggccaaaacctggaagaggatacagtcactctggaagtattagtggctccagcagttccatcatgtgaagtaccctcttctgctctgagtggaactgtggtagagctacgatgtcaagacaaagaagggaatccagctcctgaatacacatggtttaaggatggcatccgtttgctagaaaatcccagacttggctcccaaagcaccaacagctcatacacaatgaatacaaaaactggaactctgcaatttaatactgtttccaaactggacactggagaatattcctgtgaagcccgcaattctgttggatatcgcaggtgtcctgggaaacgaatgcaagtagatgatctcaacataagtggcatcatagcagccgtagtagttgtggccttagtgatttccgtttgtggccttggtgtatgctatgctcagaggaaaggctacttttcaaaagaaacctccttccagaagagtaattcttcatctaaagccacgacaatgagtgaaaatgtgcagtggctcacgcctgtaatcccagcactttggaaggccgcggcgggcggatcacgaggtcaggagttctagaccagtctggccaatatggtgaaaccccatctctactaaaatacaaaaattagctgggcatggtggcatgtgcctgcagttccagctgcttgggagacaggagaatcacttgaacccgggaggcggaggttgcagtgagctgagatcacgccactgcagtccagcctgggtaacagagcaagattccatctcaaaaaataaaataaataaataaataaatactggtttttacctgtagaattcttacaataaatatagcttgatattc

SEQ ID NO: 95219 - DNA, 939 bp, Artificial Sequence
  derived and/or modified sequence
atggcccggcgcagccgccaccggctgctgctgctgctgctgcgctacctggtggtggccctgggctaccacaaggcctacggcttcagcgcccccaaggaccagcaggtggtgacagctgtggagtaccaggaggccatcctggcctgcaagacccccaagaagacagtgagcagccggctggagtggaagaagctgggccgctctgtgtcctttgtgtactaccagcagaccctgcagggcgacttcaagaacagagctgagatgattgacttcaacatccgcatcaagaatgtgaccaggagtgatgctgggaagtaccgctgtgaggtgtctgcccccagcgagcagggccagaacctggaggaggacacagtgaccctggaggtgctggtggccccagctgtgcccagctgtgaggtgcccagcagcgccctgtctggaacagtggtggagctgcgctgccaggacaaggagggcaacccagcccctgagtacacctggttcaaggatggcatccggctgctggagaacccccggctgggcagccagagcaccaacagcagctacaccatgaacaccaagacaggcaccctgcagttcaacacagtgtccaagctggacacaggagagtacagctgtgaggccagaaattctgtgggctaccgccgctgccctgggaagaggatgcaggtggatgacctgaacatcagcggcatcatcgctgctgtggtggtggtggccctggtgatctctgtgtgtggcctgggcgtgtgctacgcccagaggaagggctacttcagcaaggagaccagcttccagaagagcaacagcagcagcaaggccaccaccatgtctgaaaatgtgcagtggctgacccctgtgatcccagccctgtggaaggctgctgctgggggcagccggggccaggagttctag

SEQ ID NO: 95220 - DNA, 939 bp, Artificial Sequence
  derived and/or modified sequence
atggcccggcggagccggcaccggctgctgctgctgctgctgcggtacttggtggtggcactggggtatcataaagcctatggcttctctgctcccaaggaccagcaggtggtgaccgctgtggaatatcaggaagccattttggcatgcaaaactcccaaaaagactgtgtcgagtcgactggaatggaagaagctgggacgcagtgtaagcttcgtgtattatcagcagacactccaaggcgactttaagaaccgcgctgaaatgatcgattttaacatccggattaaaaacgtcaccaggtcagatgccggaaaataccgttgcgaagtcagcgcaccgtctgaacaggggcagaacctggaagaggatacggtcaccctcgaggtccttgtggcaccggccgtgcctagttgcgaagtgccctcctccgcgctgtctggaacggtggtcgagttaaggtgccaggataaagagggtaacccagcccctgagtacacttggtttaaggacggtattaggctcctggagaatccaaggcttggatcgcagtccactaatagctcatacaccatgaatacgaaaacagggactctgcagtttaataccgtcagtaagctggacactggagagtactcttgcgaagcccgtaattctgttggatatcgaagatgtcccggcaagcgcatgcaagtagatgacctcaatatctccggcatcatcgccgccgtggtggtggtggcgttggtgattagcgtgtgtggtttgggcgtgtgttacgcacagcggaaagggtatttttccaaagagacatctttccagaagtctaattcctcaagcaaagcaactactatgtccgagaatgtccagtggctgactccagtcatacccgccctttggaaagcagcagctggtggctcccgtggccaggagttctag

SEQ ID NO: 95221 - DNA, 939 bp, Artificial Sequence
  derived and/or modified sequence
atggcacgacggagccggcatcgcttattgcttttgctgctccgctatctggtggtggcgctcggatatcacaaggcctacggattctcagcccctaaggaccagcaggttgtcactgctgtggaataccaggaggccatcctggcctgtaaaacgcctaaaaagaccgtgtcatcacgcctcgaatggaaaaagttgggcaggtccgtctcttttgtgtattatcagcagactctgcagggagatttcaaaaatagggccgagatgatcgacttcaacattcggattaaaaacgtgactcgaagtgacgctggaaaatatcgctgcgaggtgagcgctccatcagagcagggacagaatttggaggaggatacggttacactcgaggtgctggtggcacctgccgttccttcctgcgaggtccctagctccgcgctgtccggcaccgtcgtggagctccggtgccaggataaggaggggaatcctgccccagagtacacttggttcaaggatggcataaggctccttgagaatcccagacttgggagtcagtcaacaaactctagttatacgatgaacacaaaaacagggacactgcaatttaataccgtgtccaaactggacacgggggagtacagctgcgaagcccgaaatagcgtgggctaccgccgatgccctggaaagcgcatgcaggtggacgatctgaacatttctgggatcattgccgctgtggtggtggtggctctggtgatctctgtgtgcggccttggcgtttgctatgcccagcgcaaaggctacttctctaaagagacctcttttcagaaatcaaactcttcgtctaaggccacaaccatgtcagagaatgtgcagtggctgacgcccgtcatccctgccttatggaaagcagccgcaggtgggagtagaggtcaggagttttag

SEQ ID NO: 95222 - DNA, 939 bp, Artificial Sequence
  derived and/or modified sequence
atggccagaagaagcagacacagactgctgctgctgctgctgagatacctggtggtggccctgggctaccacaaggcctacggcttcagcgcccccaaggaccagcaggtggtgaccgccgtggagtaccaggaggccatcctggcctgcaagacccccaagaagaccgtgagcagcagactggagtggaagaagctgggcagaagcgtgagcttcgtgtactaccagcagaccctgcagggcgacttcaagaacagagccgagatgatcgacttcaacatcagaatcaagaacgtgaccagaagcgacgccggcaagtacagatgcgaggtgagcgcccccagcgagcagggccagaacctggaggaggacaccgtgaccctggaggtgctggtggcccccgccgtgcccagctgcgaggtgcccagcagcgccctgagcggcaccgtggtggagctgagatgccaggacaaggagggcaaccccgcccccgagtacacctggttcaaggacggcatcagactgctggagaaccccagactgggcagccagagcaccaacagcagctacaccatgaacaccaagaccggcaccctgcagttcaacaccgtgagcaagctggacaccggcgagtacagctgcgaggccagaaacagcgtgggctacagaagatgccccggcaagagaatgcaggtggacgacctgaacatcagcggcatcatcgccgccgtggtggtggtggccctggtgatcagcgtgtgcggcctgggcgtgtgctacgcccagagaaagggctacttcagcaaggagaccagcttccagaagagcaacagcagcagcaaggccaccaccatgagcgagaacgtgcagtggctgacccccgtgatccccgccctgtggaaggccgccgccggcggcagcagaggccaggagttctag

SEQ ID NO: 95223 - protein, 507 aa, Artificial Sequence
  derived and/or modified sequence
MAELDQLPDESSSAKALVSLKEGSLSNTWNEKYSSLQKTPVWKGRNTSSAVEMKFTATMSTPDKKASQKIGFRLRNLLKLPKAHKWCIYEWFYSNIDKPLFEGDNDFCVCLKESFPNLKTRKLTRVEWGKIRRLMGKPRRCSSAFFEEERSALKQKRQKIRLLQQRKVADVSQFKDLPDEIPLPLVIGTKVTARLRGVHDGLFTGQIDAVDTLNATYRVTFDRTGLGTHTIPDYEVLSNEPHETMPIAAFGQKQRPSRFFMTPPRLHYTPPLQSPIIDNDPLLGQSPWRSKISGSDTETLGGFPVEFLIQVTRLSKILMIKKEHIKKLREMNTEAEKLKSYSMPISIEFQRRYATIVLELEQLNKDLNKVLHKVQQYCYELAPDQGLQPADQPTDMRRRCEEEAQEIVRHANSSTGQPCVENENLTDLISRLTAILLQIKCLAEGGDLNSFEFKSLTDSLNDIKSTIDASNISCFQNNVEIHVAHIQSGLSQMGNLHAFAANNTNRD

SEQ ID NO: 95224 - DNA, 1524 bp, Artificial Sequence
  derived and/or modified sequence
atggccgagctggaccagctgcccgacgagagcagcagcgccaaggccctggtgagcctgaaggagggcagcctgagcaacacctggaacgagaagtacagcagcctgcagaagacccccgtgtggaagggcagaaacaccagcagcgccgtggagatgaagttcaccgccaccatgagcacccccgacaagaaggccagccagaagatcggcttcagactgagaaacctgctgaagctgcccaaggcccacaagtggtgcatctacgagtggttctacagcaacatcgacaagcccctgttcgagggcgacaacgacttctgcgtgtgcctgaaggagagcttccccaacctgaagaccagaaagctgaccagagtggagtggggcaagatcagaagactgatgggcaagcccagaagatgcagcagcgccttcttcgaggaggagagaagcgccctgaagcagaagagacagaagatcagactgctgcagcagagaaaggtggccgacgtgagccagttcaaggacctgcccgacgagatccccctgcccctggtgatcggcaccaaggtgaccgccagactgagaggcgtgcacgacggcctgttcaccggccagatcgacgccgtggacaccctgaacgccacctacagagtgaccttcgacagaaccggcctgggcacccacaccatccccgactacgaggtgctgagcaacgagccccacgagaccatgcccatcgccgccttcggccagaagcagagacccagcagattcttcatgaccccccccagactgcactacaccccccccctgcagagccccatcatcgacaacgaccccctgctgggccagagcccctggagaagcaagatcagcggcagcgacaccgagaccctgggcggcttccccgtggagttcctgatccaggtgaccagactgagcaagatcctgatgatcaagaaggagcacatcaagaagctgagagagatgaacaccgaggccgagaagctgaagagctacagcatgcccatcagcatcgagttccagagaagatacgccaccatcgtgctggagctggagcagctgaacaaggacctgaacaaggtgctgcacaaggtgcagcagtactgctacgagctggcccccgaccagggcctgcagcccgccgaccagcccaccgacatgagaagaagatgcgaggaggaggcccaggagatcgtgagacacgccaacagcagcaccggccagccctgcgtggagaacgagaacctgaccgacctgatcagcagactgaccgccatcctgctgcagatcaagtgcctggccgagggcggcgacctgaacagcttcgagttcaagagcctgaccgacagcctgaacgacatcaagagcaccatcgacgccagcaacatcagctgcttccagaacaacgtggagatccacgtggcccacatccagagcggcctgagccagatgggcaacctgcacgccttcgccgccaacaacaccaacagagactag

SEQ ID NO: 95225 - DNA, 1524 bp, Artificial Sequence
  derived and/or modified sequence
atggccgagctagaccagctgccagacgaaagctcatccgctaaagccctcgtgtctctaaaggagggttctctgagtaacacctggaatgagaagtattcgtcacttcaaaagacacccgtgtggaagggtagaaatacgagttccgcagtggagatgaagttcaccgccacaatgtcaacgcccgacaagaaagcttcacagaagattgggttccgactgcggaatcttctgaagttgcccaaagcacataaatggtgtatctatgagtggttctactcaaacatcgacaaacccttgtttgaaggcgacaatgatttctgcgtgtgtctaaaggaatcgttccccaacttgaaaacacgcaagctgacccgtgtggagtggggcaagatacggcgacttatgggaaaaccacgaagatgtagtagtgcgttctttgaggaagagcggagcgccttgaagcagaaaaggcaaaagatacggctactgcagcagcgcaaggttgctgacgtgagtcagtttaaggatttgcctgatgaaattcctctacccctggttatcggcacgaaggtgaccgcaagacttcgcggcgtccatgatggtctgttcaccgggcagattgacgccgtggatactttaaatgccacctatagagtgactttcgataggacaggcctggggacacataccatcccagattacgaggttctcagcaatgaaccccatgagaccatgcctattgccgccttcgggcagaagcagaggccatctcggttctttatgacaccgccccgtttacattacacaccacctttacaatcgcctatcatcgacaatgaccccctgcttggccagtctccatggcgcagcaaaatttcagggtccgacactgaaaccctcgggggctttcccgtggaatttctcatccaggttacccgactgtcaaaaatcctgatgataaagaaagagcacataaaaaagttgagagagatgaacacagaagccgaaaaactgaaaagttactcgatgccgatttccattgaattccagaggcgttatgccacaatcgtcctggaacttgaacagctgaacaaggatctcaataaagttctccacaaggtgcagcagtactgttacgagctggcccccgatcaagggctgcaaccagcagatcaaccgaccgatatgcgcaggagatgtgaggaagaggcccaagaaatcgtgaggcatgctaattcgagcaccggacagccctgcgtggagaacgagaacctcactgatctcatatctcggctgacagcaattttgctccagattaagtgtctcgccgagggaggggatctgaacagtttcgagttcaagagcctgacagattccctgaacgatatcaaatctaccatcgatgccagcaacatctcctgcttccaaaataatgtggagatccatgtcgcccacatccagtcaggtttgagccagatgggtaacttgcacgccttcgccgccaataacactaatagggattag

SEQ ID NO: 95226 - DNA, 1524 bp, Artificial Sequence
  derived and/or modified sequence
atggccgagctggaccagctgcctgatgagagcagcagcgccaaggccctggtgtccctgaaggagggcagcctgagcaacacctggaatgagaagtacagcagcctgcagaagacccctgtgtggaagggcaggaacaccagcagcgctgtggagatgaagttcaccgccaccatgagcaccccagacaagaaggccagccagaagattggcttccggctgaggaacctgctgaagctgcccaaggcccacaagtggtgcatctatgagtggttctacagcaacatcgacaagcccctgtttgaaggagacaatgacttctgtgtgtgcctgaaggagagcttccccaacctgaagaccaggaagctgaccagggtggagtggggcaagatccggcggctgatgggcaagccccggcgctgcagcagcgccttctttgaggaggagaggtctgccctgaagcagaagaggcagaagatccggctgctgcagcagaggaaggtggctgatgtgtcccagttcaaggacctgcctgatgagatccccctgcccctggtgattggcaccaaggtgacagcccggctgcggggcgtgcatgatggcctcttcaccggccagattgatgctgtggacaccctgaatgccacctacagagtgacctttgacagaacaggcctgggcacccacaccatcccagactatgaggtgctgagcaatgagccccatgagaccatgcccatcgccgccttcggccagaagcagaggcccagccgcttcttcatgaccccaccccggctgcactacaccccacccctgcagagccccatcatcgacaatgaccccctgctgggccagagcccctggaggagcaagatcagcggcagtgacacagagaccctgggcggcttccctgtggagttcctgatccaggtgacccggctgagcaagatcctgatgatcaagaaggagcacatcaagaagctgcgggagatgaacacagaagctgagaagctgaagagctacagcatgcccatcagcattgagttccagaggagatatgccaccatcgtgctggagctggagcagctgaacaaggacctgaacaaggtgctgcacaaggtgcagcagtactgctatgagctggccccagaccagggcctgcagcctgctgaccagcccacagacatgagaagaagatgtgaggaggaggcccaggagatcgtgagacatgccaacagcagcacaggccagccctgtgtggagaatgaaaacctgacagacctgatcagccggctgacagccatcctgctgcagatcaagtgcctggccgagggcggggacctgaacagctttgagttcaagagcctgacagacagcctgaatgacatcaagagcaccattgatgccagcaacatcagctgcttccagaacaacgtggagatccacgtggcccacatccagagcggcctgagccagatgggcaacctgcacgcctttgctgccaacaacaccaacagagactag

SEQ ID NO: 95227 - DNA, 3219 bp, Artificial Sequence
  derived and/or modified sequence
agcgcgggccgcggaacatgcgccgggagcggggcccgggcgggactccggagctggtactgctccccccgcgctccggcgccgggcctcgccgtgcggcctccttcctcccttcctcccgcccggctcggccggaggcggcggcggaggggcgaggcgcggccccccttcggcggcacctcctccccgggcaggcgcgggcggagccgggcccgcctcagccagccgcggcgggagcagcgcagcgcggcgccgcgggcagcgagctccgcattcgaacctccctcgcaaagacagtctccgccccacaatgcaccgcggcgggcagcctttgaaaaagcggcgcggctcgttcaagatggcggagctcgaccagttgcctgacgagagctcttcagcaaaagcccttgtcagtttaaaagaaggaagcttatctaacacgtggaatgaaaagtacagttctttacagaaaacacctgtttggaaaggcaggaatacaagctctgctgtggaaatgaaatttacagcaacaatgtcaacaccagataagaaagcttcacagaagattggttttcgattacgtaatctgctcaagcttcctaaagcacataaatggtgtatatacgagtggttctattcaaatatagataaaccactttttgaaggtgataatgacttctgtgtatgtctaaaggaatcttttcctaatttgaaaacaagaaagttaacaagagtagaatggggaaaaattcggcggcttatgggaaaaccacggagatgttcttctgcattttttgaggaagagagatcagcattaaaacagaaacggcagaaaataaggctcttacaacaaaggaaagttgcagatgtttcacaattcaaagatctcccagatgaaattcctttgcctctggttattggaacgaaagttacagcacgattacgtggtgttcatgatggtttgttcactggacaaatagatgctgtggatactcttaatgctacttatagagtaacttttgataggacagggcttggaacccataccatccctgactatgaagttctcagtaatgaacctcatgagacaatgccaattgctgcctttggacaaaaacagcggccttctcgattttttatgaccccaccacggttacattatactcctcctctccagtcaccaattatagataatgatcctttattaggacagtcgccgtggagaagtaaaatttctggctctgacactgaaacattaggtggttttccagtagaatttcttatccaagtgaccagattatcaaaaattctcatgattaaaaaggaacatatcaagaaattaagggaaatgaacacagaagcagaaaaattgaaatcatattccatgcccatcagcattgaatttcagcggagatatgcaacaattgttctggagcttgaacagctgaacaaggacctaaacaaagttttgcataaagttcaacagtattgctatgagcttgctccagaccaggggctccagcctgcagatcagccaacagatatgagacgcaggtgtgaggaagaagcacaggaaattgttcggcatgcaaattcctcaacaggacagccctgcgttgaaaatgaaaatctgacagacttaatttccaggcttacagctattttgttacaaattaagtgtctagcagaaggaggagacctgaattcctttgaattcaaatcacttacagactcattaaatgatatcaagagtacaatagacgcttctaatatcagttgctttcagaataatgtagaaatccatgttgcacatattcagagtggcctgagccagatgggaaacttacatgcctttgcagcaaataacaccaacagagactgagtaaagatttcattattccaactgcacgggacattgtttttgagaagttcttttcctttatataggcttccaacaccaaataacctaactgctggaaaacaagggaaatttaaatctccaaataaggcattttaatagactgtactgcttcttaaaccagcattgctgaccagcattatatttatttttcttttattattcagatgcagtagcattgcttatgttacatatgtttatattcacaaatatttttaaactgaaatatctgaacataatataatttcgtggaagaatacattgaccattttttttaatgtgcatgaattcaccgcaacacatgcagacaactgctgcaatggagagtatgaagaaacctggtctttttattcatgtcggtggcagtgtggaaattccatccagaaaattacaactccacttgatttagttgatcaccatctcagtcttcaaaagataacatcatgaggtgtgggaagtcctagttttaaggaaaccactgaaatatagatgggaaatgtggactttacaagtatatgttatatatacttgcaatgtgacatggttctgtagatcattttataataataaatattttaatttatcataacatataaaagaaacctttgttgtttgttgaaagaaaatgaaggaacagggggaaaaaaggtgcaaaatgctaaatttctaaaaatggatttggcatgtcttcccatcagttcaggtcaaaagtgcattgttgtgagatttattaaaaaaaaaatgataacacactattttcatatttttttgtttatttgcacaacttttaaaccagattactggttaaaatccaacagtacacaatttataaagtaaaaagattttataaggaaaacaaatataataaccagtgctgtgaaatgcagaagaaaggcttgttttggttgtttttcttttttaggaaaacgctgcctaaaatgttaatcttgtaaaaagtatgtatttggaattttcttcgttttaatagaatattataaactcaaaatataaatttttttcaaatttggagtttaagatatagctgtagaggtggttttaattcctttagatgtctcataaaatgagactttttatatgttaatgtataataaaactgaaacaagattattttccatttgaaatttttgtatagtttaaaaaggcttccgtattctttgttggtattgtgccactgcagaactttagtgcagagtttatatttagctaaactgttatgttaattaagaaatgcataaatcttctattcttaatatttgtaattctaaataaattgatctatg

SEQ ID NO: 95228 - DNA, 1524 bp, Artificial Sequence
  derived and/or modified sequence
atggccgagctggaccagctgcccgacgagagcagcagcgccaaggccctggttagcctcaaggagggctcattgtctaacacctggaacgaaaagtattcttcactccagaaaactccggtgtggaagggcaggaacacaagctctgccgtggaaatgaaattcaccgcgaccatgtcaaccccagacaagaaagcttcccagaaaattggatttcgactgcgaaatttactgaaattgccaaaggcacacaaatggtgtatttacgaatggttctacagtaacattgataaaccacttttcgaaggggataacgatttctgtgtgtgtctgaaagaatccttccccaatctgaagactaggaaactgaccagggtagagtggggtaaaatacgtcgcctcatgggtaagccgcgacggtgcagcagcgccttcttcgaggaggaacgttccgcattgaagcagaagagacaaaagatccgcctcctgcaacagcgcaaagttgcggatgtctcccaatttaaggacctgcccgacgagatccccctccccctggttattggtaccaaggtgacggctcgcctgcgcggggtccatgacggcctgttcaccggtcagattgacgcggtggatactctgaacgccacctaccgcgtgacattcgatcggactggcttgggcacgcacactatcccagactacgaagtgctgtcaaatgagccgcatgaaaccatgcctattgctgcttttggccagaaacagcgaccatccagattttttatgacccccccacggctgcactacacccccccactgcagtcgccaatcatagacaatgatcctcttttagggcagtccccatggagaagtaagatctcggggtctgatacagagaccctagggggattcccggtggagtttttaatacaggttactagactgagcaaaatattgatgataaaaaaagaacacattaagaaactgagagaaatgaacactgaggctgagaaactgaaatcttactccatgccaattagtatcgagtttcaacgccggtacgccactatcgtgctggaacttgagcagttaaataaggacctgaataaagtgctccacaaggtgcagcagtactgttacgagctggctcccgaccaagggctgcaaccagccgaccagcccaccgatatgagacggcgttgtgaggaggaagcccaagaaatcgtgcggcacgctaatagttctacaggtcagccctgtgtggaaaacgaaaacctcactgacctgatttcccggcttacagctatcctactccaaattaaatgcctcgcagagggtggcgatctcaatagtttcgaatttaaatctctgaccgacagcttgaacgatattaagagcacgattgacgcatccaacatctcatgctttcagaataacgttgagattcacgtagcccacatccagtccggattgtcacagatggggaacttgcacgccttcgcagctaataatacaaacagggattag

SEQ ID NO: 95229 - DNA, 1524 bp, Artificial Sequence
  derived and/or modified sequence
atggctgaactcgatcaacttcccgacgagtccagctcagccaaggcgttggtgtctcttaaggagggaagcctgtctaacacctggaacgagaagtatagctcactgcagaaaacgccggtgtggaaagggaggaatactagttccgccgtggagatgaaattcaccgccaccatgtccactcccgataagaaggcttcacagaaaattggatttaggttgaggaatctcctgaagcttcccaaggctcacaagtggtgcatttatgagtggttttactctaatatcgacaagcctctcttcgagggagataacgacttctgtgtgtgtctgaaggagtcattccctaacctgaaaaccaggaagttaactcgcgtggagtggggcaaaatcagaaggctgatggggaagccacggcgatgtagcagcgctttcttcgaggaggagcgcagcgcactgaaacagaagaggcagaagatccggctgttacaacagcgtaaagtagcggacgttagccagtttaaagacttgccggacgagattcccctgcctctggtcatcggcaccaaagtaaccgctcgtcttagaggggtgcacgatgggctgtttaccggacagattgatgcggtggatacgctcaatgcaacttacagggtgaccttcgaccggacaggtctcggaactcatacaattccagactacgaggtgttatcaaacgagccacacgagacaatgcccattgctgccttcgggcagaaacagagacccagcaggtttttcatgacaccacccagattacactacactccacccttacagagccctattattgataatgatcctttgttggggcagtcgccttggagatccaagatttccggtagcgatacagagaccctgggaggattccccgtggagtttctgattcaggtgactcgcctcagcaaaattctaatgattaaaaaagagcacatcaagaaactcagggagatgaacactgaagccgaaaagctgaagagctactctatgccgatttcaattgaattccagcgcagatacgctactattgtgctcgagctcgaacaactcaataaagacttgaacaaggtcttacataaagttcaacagtactgttacgagttggcgcctgatcagggactccagcccgcagaccagcccacagatatgaggcggcgatgcgaggaggaggcgcaggagatcgtgagacatgccaatagcagcactggacaaccgtgtgtagaaaatgaaaacctaacagatctgatcagtaggttgaccgcaatcctgctgcagatcaaatgtctcgccgagggcggtgatctcaacagtttcgaattcaagagcctcacagacagtcttaatgatattaaaagtaccatcgatgcgtccaacatttcttgcttccagaataatgttgaaatccatgtagcacacattcagagcggcctgagccaaatgggaaatcttcacgcttttgcagctaacaacactaacagggattag

SEQ ID NO: 95230 - protein, 357 aa, Artificial Sequence
  derived and/or modified sequence
MNPQIRNPMERMYRDTFYDNFENEPILYGRSYTWLCYEVKIKRGRSNLLWDTGVFRGQVYFKPQYHAEMCFLSWFCGNQLPAYKCFQITWFVSWTPCPDCVAKLAEFLSEHPNVTLTISAARLYYYWERDYRRALCRLSQAGARVTIMDYEEFAYCWENFVYNEGQQFMPWYKFDENYAFLHRTLKEILRYLMDPDTFTFNFNNDPLVLRRRQTYLCYEVERLDNGTWVLMDQHMGFLCNELDPAQIYRVTWFISWSPCFSWGCAGEVRAFLQENTHVRLRIFAARIYDYDPLYKEALQMLRDAGAQVSIMTYDEFEYCWDTFVYRQGCPFQPWDGLEEHSQALSGRLRAILQNQGN

SEQ ID NO: 95231 - DNA, 1074 bp, Artificial Sequence
  derived and/or modified sequence
atgaacccacaaattcgcaatcctatggaaaggatgtatcgggacacattttacgacaactttgaaaatgagcccattctctacggtcggtcttatacctggctatgttacgaagtgaagattaagcgaggaaggagtaacctgttgtgggatacgggcgtcttcagagggcaagtctactttaaacctcagtatcacgccgagatgtgttttttgtcatggttctgtggaaaccagctacctgcctacaaatgcttccagatcacctggtttgtcagttggacgccctgcccagattgcgtggctaagctggcagagttcctcagtgagcaccctaacgtaacactgacgataagtgccgcccggctgtactattattgggaaagggactatcggcgggcgctgtgtcgtttgtcacaggccggggccagagtgacaataatggattatgaggaattcgcgtattgctgggagaacttcgtttataatgagggtcagcaattcatgccttggtataagtttgacgagaattatgcattcctgcatcggacacttaaggagattctccggtacctgatggatcccgatacatttacattcaatttcaataatgatccactagttttgcggaggagacagacctacctctgctacgaggtcgagcgacttgacaacggcacatgggttttaatggaccagcatatgggattcctgtgcaacgagctggaccctgctcagatttacagggtcacatggtttataagctggtccccctgtttttcctggggttgtgcaggcgaagttcgcgcatttctccaggagaatactcatgtgaggctgcgcatctttgcggctcggatctacgactatgatccgctttacaaagaggctcttcaaatgttaagagatgccggagctcaggttagcattatgacctatgacgaatttgagtactgttgggatacgtttgtgtaccggcaggggtgtccttttcaaccctgggatgggctggaggaacatagtcaagcgttgtctggtagattgagggcaatcctccagaatcaaggaaactag

SEQ ID NO: 95232 - DNA, 1074 bp, Artificial Sequence
  derived and/or modified sequence
atgaacccccagatccggaaccccatggagaggatgtacagagacaccttctatgacaactttgaaaatgagcccatcctgtatggccgcagctacacctggctgtgctatgaggtgaagatcaagaggggccgcagcaacctgctgtgggacaccggggtcttccggggccaggtgtacttcaagccccagtaccacgccgagatgtgcttcctgtcctggttctgtggcaaccagctgcctgcctacaagtgcttccagatcacctggtttgtgtcctggaccccctgcccagactgtgtggccaagctggccgagttcctgtctgagcaccccaacgtgaccctgaccatctctgctgcccggctgtactactactgggagcgggactaccgccgggccctgtgccgcctgagccaggccggggcccgggtgaccatcatggactatgaggagtttgcctactgctgggagaactttgtgtacaatgaaggccagcagttcatgccctggtacaagtttgatgagaactatgccttcctgcacaggaccctgaaggagatcctgcgctacctgatggaccctgacaccttcaccttcaacttcaacaatgaccccctggtgctgcggcggcggcagacctacctgtgctatgaggtggagcggctggacaatggcacctgggtgctgatggaccagcacatgggcttcctgtgcaatgagctggaccctgcccagatctacagagtgacctggttcatctcctggagcccctgcttctcctggggctgtgccggggaggtgcgggccttcctgcaggagaacacccacgtgcggctgcgcatctttgctgcccgcatctatgactatgaccccctgtacaaggaggccctgcagatgctgagagatgctggggcccaggtgtccatcatgacctatgatgaatttgagtactgctgggacacctttgtgtaccggcagggctgccccttccagccctgggatggcctggaggagcacagccaggccctgagcggccgcctgcgggccatcctgcagaaccagggcaactag

SEQ ID NO: 95233 - DNA, 1074 bp, Artificial Sequence
  derived and/or modified sequence
atgaacccccagatccggaaccccatggagcggatgtaccgggacaccttctatgacaactttgagaatgagcccatcctctacggtaggtcatacacctggctgtgctatgaggtaaaaatcaaacggggtcgaagcaacctgctctgggataccggggtgtttcgtgggcaggtttacttcaaaccgcagtaccacgccgaaatgtgcttcctttcttggttttgtggaaaccaactccccgcctataagtgtttccagattacctggtttgtctcttggacgccgtgccccgattgcgtggccaaactggccgaattcctgagcgaacacccaaacgttactctaactatcagcgcagctagactctactattactgggaaagggactatcggagggcactttgtagactgtcacaggccggtgccagggttactattatggactatgaggaatttgcttactgctgggaaaattttgtgtacaatgaggggcagcaattcatgccgtggtacaaattcgacgagaactacgcttttttgcacagaactctcaaagagatcctgcgctaccttatggaccccgatacgttcacatttaatttcaataacgacccgctcgtgttgagaaggcgtcagacctatctatgttacgaggtagaaagactagacaatgggacatgggtgctgatggaccaacacatgggcttcctgtgcaatgagcttgaccccgcccaaatttacagggtaacgtggtttatctcatggtcaccatgtttctcctggggatgtgccggcgaggtcagagcgtttctacaggagaatacccacgtaaggttacgaatttttgcagccaggatatatgactacgatcctctctacaaggaagctctccaaatgctgcgggacgcaggcgcccaggtatccatcatgacttacgacgagtttgaatattgctgggacacgttcgtttacaggcagggttgtccgtttcagccctgggacggcctggaggagcactctcaggctctgtcgggtaggttacgcgccatactgcagaaccagggaaactag

SEQ ID NO: 95234 - DNA, 1074 bp, Artificial Sequence
  derived and/or modified sequence
atgaacccccagatccgcaaccccatggagaggatgtatagggacaccttttacgacaactttgaaaacgaacctatcctttacggtaggtcttatacttggctgtgttacgaggtaaaaattaaacgcggtaggtccaacctgttgtgggacactggcgttttccgaggccaggtgtacttcaagccccagtatcatgccgagatgtgcttcctctcctggttctgtggtaatcagctccccgcttacaaatgtttccagatcacctggttcgtgtcttggacaccttgccctgattgcgtcgctaagttggctgaatttttgtccgagcatccgaacgtgacgcttacaataagtgccgctcggttgtattattactgggaacgagactaccggagggcactatgccgactgtcacaggccggtgcccgagtgacaattatggactacgaagagttcgcatattgttgggagaacttcgtttataacgaggggcaacagtttatgccctggtataaattcgacgagaactatgcattcctccatagaacccttaaggagatattgcggtacctgatggatccagatactttcacctttaatttcaacaacgatccacttgtcctgagacgacggcagacatacctgtgctacgaggtcgagagattggataatggcacgtgggtgctgatggatcagcatatggggtttttgtgcaacgagctagaccctgcccaaatctaccgcgtcacatggttcattagttggagtccttgttttagttggggctgtgcaggagaggtaagggcgttcctccaggagaatactcacgttagactgcgtattttcgcagccaggatctacgactatgaccccctttacaaagaggctctccagatgctgcgggacgccggagcccaggtctcaataatgacatacgacgagtttgaatattgttgggacaccttcgtgtataggcagggttgcccattccagccgtgggacggattggaggaacactcacaggccctgtctggcaggctgcgggcaatcctacaaaaccaggggaattag

SEQ ID NO: 95235 - DNA, 1282 bp, Artificial Sequence
  derived and/or modified sequence
actttaaggagggctgtccaactgcaaggacgctgtaagcaggaagtgaaaccacagagcttcaaaaaaagagcgggacagggacaagcgtatctaagaggctgaacatgaatccacagatcagaaatccgatggagcggatgtatcgagacacattctacgacaactttgaaaacgaacccatcctctatggtcggagctacacttggctgtgctatgaagtgaaaataaagaggggccgctcaaatctcctttgggacacaggggtctttcgaggccaggtgtatttcaagcctcagtaccacgcagaaatgtgcttcctctcttggttctgtggcaaccagctgcctgcttacaagtgtttccagatcacctggtttgtatcctggaccccctgcccggactgtgtggcgaagctggccgaattcctgtctgagcaccccaatgtcaccctgaccatctctgccgcccgcctctactactactgggaaagagattaccgaagggcgctctgcaggctgagtcaggcaggagcccgcgtgacgatcatggactatgaagaatttgcatactgctgggaaaactttgtgtacaatgaaggtcagcaattcatgccttggtacaaattcgatgaaaattatgcattcctgcaccgcacgctaaaggagattctcagatacctgatggatccagacacattcactttcaactttaataatgaccctttggtccttcgacggcgccagacctacttgtgctatgaggtggagcgcctggacaatggcacctgggtcctgatggaccagcacatgggctttctatgcaacgagttggacccggcccagatctacagggtcacttggttcatctcctggagcccctgcttctcctggggctgtgccggggaagtgcgtgcgttccttcaggagaacacacacgtgagactgcgcatcttcgctgcccgcatctatgattacgaccccctatataaggaggcgctgcaaatgctgcgggatgctggggcccaagtctccatcatgacctacgatgagtttgagtactgctgggacacctttgtgtaccgccagggatgtcccttccagccctgggatggactagaggagcacagccaagccctgagtgggaggctgcgggccattctccagaatcagggaaactgaaggatgggcctcagtctctaaggaaggcagagacctgggttgagcagcagaataaaagatcttcttccaagaaatgcaaacagaccgttcaccaccatctc

SEQ ID NO: 95236 - DNA, 1074 bp, Artificial Sequence
  derived and/or modified sequence
atgaacccccagatcagaaaccccatggagagaatgtacagagacaccttctacgacaacttcgagaacgagcccatcctgtacggcagaagctacacctggctgtgctacgaggtgaagatcaagagaggcagaagcaacctgctgtgggacaccggcgtgttcagaggccaggtgtacttcaagccccagtaccacgccgagatgtgcttcctgagctggttctgcggcaaccagctgcccgcctacaagtgcttccagatcacctggttcgtgagctggaccccctgccccgactgcgtggccaagctggccgagttcctgagcgagcaccccaacgtgaccctgaccatcagcgccgccagactgtactactactgggagagagactacagaagagccctgtgcagactgagccaggccggcgccagagtgaccatcatggactacgaggagttcgcctactgctgggagaacttcgtgtacaacgagggccagcagttcatgccctggtacaagttcgacgagaactacgccttcctgcacagaaccctgaaggagatcctgagatacctgatggaccccgacaccttcaccttcaacttcaacaacgaccccctggtgctgagaagaagacagacctacctgtgctacgaggtggagagactggacaacggcacctgggtgctgatggaccagcacatgggcttcctgtgcaacgagctggaccccgcccagatctacagagtgacctggttcatcagctggagcccctgcttcagctggggctgcgccggcgaggtgagagccttcctgcaggagaacacccacgtgagactgagaatcttcgccgccagaatctacgactacgaccccctgtacaaggaggccctgcagatgctgagagacgccggcgcccaggtgagcatcatgacctacgacgagttcgagtactgctgggacaccttcgtgtacagacagggctgccccttccagccctgggacggcctggaggagcacagccaggccctgagcggcagactgagagccatcctgcagaaccagggcaactag

SEQ ID NO: 95237 - protein, 873 aa, Artificial Sequence
  derived and/or modified sequence
MNPGFDLSRRNPQEDFELIQRIGSGTYGDVYKARNVNTGELAAIKVIKLEPGEDFAVVQQEIIMMKDCKHPNIVAYFGSYLRRDKLWICMEFCGGGSLQDIYHVTGPLSELQIAYVSRETLQGLYYLHSKGKMHRDIKGANILLTDNGHVKLADFGVSAQITATIAKRKSFIGTPYWMAPEVAAVERKGGYNQLCDLWAVGITAIELAELQPPMFDLHPMRALFLMTKSNFQPPKLKDKMKWSNSFHHFVKMALTKNPKKRPTAEKLLQHPFVTQHLTRSLAIELLDKVNNPDHSTYHDFDDDDPEPLVAVPHRIHSTSRNVREEKTRSEITFGQVKFDPPLRKETEPHHELDLQLEYGQGHQGGYFLGANKSLLKSVEEELHQRGHVAHLEDDEGDDDESKHSTLKAKIPPPLPPKPKSIFIPQEMHSTEDENQGTIKRCPMSGSPAKPSQVPPRPPPPRLPPHKPVALGNGMSSFQLNGERDGSLCQQQNEHRGTNLSRKEKKDVPKPISNGLPPTPKVHMGACFSKVFNGCPLKIHCASSWINPDTRDQYLIFGAEEGIYTLNLNELHETSMEQLFPRRCTWLYVMNNCLLSISGKASQLYSHNLPGLFDYARQMQKLPVAIPAHKLPDRILPRKFSVSAKIPETKWCQKCCVVRNPYTGHKYLCGALQTSIVLLEWVEPMQKFMLIKHIDFPIPCPLRMFEMLVVPEQEYPLVCVGVSRGRDFNQVVRFETVNPNSTSSWFTESDTPQTNVTHVTQLERDTILVCLDCCIKIVNLQGRLKSSRKLSSELTFDFQIESIVCLQDSVLAFWKHGMQGRSFRSNEVTQEISDSTRIFRLLGSDRVVVLESRPTDNPTANSNLYILAGHENSY

SEQ ID NO: 95238 - DNA, 2622 bp, Artificial Sequence
  derived and/or modified sequence
atgaaccccggcttcgacctgagcagaagaaacccccaggaggacttcgagctgatccagagaatcggcagcggcacctacggcgacgtgtacaaggccagaaacgtgaacaccggcgagctggccgccatcaaggtgatcaagctggagcccggcgaggacttcgccgtggtgcagcaggagatcatcatgatgaaggactgcaagcaccccaacatcgtggcctacttcggcagctacctgagaagagacaagctgtggatctgcatggagttctgcggcggcggcagcctgcaggacatctaccacgtgaccggccccctgagcgagctgcagatcgcctacgtgagcagagagaccctgcagggcctgtactacctgcacagcaagggcaagatgcacagagacatcaagggcgccaacatcctgctgaccgacaacggccacgtgaagctggccgacttcggcgtgagcgcccagatcaccgccaccatcgccaagagaaagagcttcatcggcaccccctactggatggcccccgaggtggccgccgtggagagaaagggcggctacaaccagctgtgcgacctgtgggccgtgggcatcaccgccatcgagctggccgagctgcagccccccatgttcgacctgcaccccatgagagccctgttcctgatgaccaagagcaacttccagccccccaagctgaaggacaagatgaagtggagcaacagcttccaccacttcgtgaagatggccctgaccaagaaccccaagaagagacccaccgccgagaagctgctgcagcaccccttcgtgacccagcacctgaccagaagcctggccatcgagctgctggacaaggtgaacaaccccgaccacagcacctaccacgacttcgacgacgacgaccccgagcccctggtggccgtgccccacagaatccacagcaccagcagaaacgtgagagaggagaagaccagaagcgagatcaccttcggccaggtgaagttcgacccccccctgagaaaggagaccgagccccaccacgagctggacctgcagctggagtacggccagggccaccagggcggctacttcctgggcgccaacaagagcctgctgaagagcgtggaggaggagctgcaccagagaggccacgtggcccacctggaggacgacgagggcgacgacgacgagagcaagcacagcaccctgaaggccaagatccccccccccctgccccccaagcccaagagcatcttcatcccccaggagatgcacagcaccgaggacgagaaccagggcaccatcaagagatgccccatgagcggcagccccgccaagcccagccaggtgccccccagaccccccccccccagactgcccccccacaagcccgtggccctgggcaacggcatgagcagcttccagctgaacggcgagagagacggcagcctgtgccagcagcagaacgagcacagaggcaccaacctgagcagaaaggagaagaaggacgtgcccaagcccatcagcaacggcctgccccccacccccaaggtgcacatgggcgcctgcttcagcaaggtgttcaacggctgccccctgaagatccactgcgccagcagctggatcaaccccgacaccagagaccagtacctgatcttcggcgccgaggagggcatctacaccctgaacctgaacgagctgcacgagaccagcatggagcagctgttccccagaagatgcacctggctgtacgtgatgaacaactgcctgctgagcatcagcggcaaggccagccagctgtacagccacaacctgcccggcctgttcgactacgccagacagatgcagaagctgcccgtggccatccccgcccacaagctgcccgacagaatcctgcccagaaagttcagcgtgagcgccaagatccccgagaccaagtggtgccagaagtgctgcgtggtgagaaacccctacaccggccacaagtacctgtgcggcgccctgcagaccagcatcgtgctgctggagtgggtggagcccatgcagaagttcatgctgatcaagcacatcgacttccccatcccctgccccctgagaatgttcgagatgctggtggtgcccgagcaggagtaccccctggtgtgcgtgggcgtgagcagaggcagagacttcaaccaggtggtgagattcgagaccgtgaaccccaacagcaccagcagctggttcaccgagagcgacaccccccagaccaacgtgacccacgtgacccagctggagagagacaccatcctggtgtgcctggactgctgcatcaagatcgtgaacctgcagggcagactgaagagcagcagaaagctgagcagcgagctgaccttcgacttccagatcgagagcatcgtgtgcctgcaggacagcgtgctggccttctggaagcacggcatgcagggcagaagcttcagaagcaacgaggtgacccaggagatcagcgacagcaccagaatcttcagactgctgggcagcgacagagtggtggtgctggagagcagacccaccgacaaccccaccgccaacagcaacctgtacatcctggccggccacgagaacagctactag

SEQ ID NO: 95239 - DNA, 1344 bp, Artificial Sequence
  derived and/or modified sequence
atgcacagcaccgaggacgagaaccagggcaccatcaagagatgccccatgagcggcagccccgccaagcccagccaggtgccccccagaccccccccccccagactgcccccccacaagcccgtggccctgggcaacggcatgagcagcttccagctgaacggcgagagagacggcagcctgtgccagcagcagaacgagcacagaggcaccaacctgagcagaaaggagaagaaggacgtgcccaagcccatcagcaacggcctgccccccacccccaaggtgcacatgggcgcctgcttcagcaaggtgttcaacggctgccccctgaagatccactgcgccagcagctggatcaaccccgacaccagagaccagtacctgatcttcggcgccgaggagggcatctacaccctgaacctgaacgagctgcacgagaccagcatggagcagctgttccccagaagatgcacctggctgtacgtgatgaacaactgcctgctgagcatcagcggcaaggccagccagctgtacagccacaacctgcccggcctgttcgactacgccagacagatgcagaagctgcccgtggccatccccgcccacaagctgcccgacagaatcctgcccagaaagttcagcgtgagcgccaagatccccgagaccaagtggtgccagaagtgctgcgtggtgagaaacccctacaccggccacaagtacctgtgcggcgccctgcagaccagcatcgtgctgctggagtgggtggagcccatgcagaagttcatgctgatcaagcacatcgacttccccatcccctgccccctgagaatgttcgagatgctggtggtgcccgagcaggagtaccccctggtgtgcgtgggcgtgagcagaggcagagacttcaaccaggtggtgagattcgagaccgtgaaccccaacagcaccagcagctggttcaccgagagcgacaccccccagaccaacgtgacccacgtgacccagctggagagagacaccatcctggtgtgcctggactgctgcatcaagatcgtgaacctgcagggcagactgaagagcagcagaaagctgagcagcgagctgaccttcgacttccagatcgagagcatcgtgtgcctgcaggacagcgtgctggccttctggaagcacggcatgcagggcagaagcttcagaagcaacgaggtgacccaggagatcagcgacagcaccagaatcttcagactgctgggcagcgacagagtggtggtgctggagagcagacccaccgacaaccccaccgccaacagcaacctgtacatcctggccggccacgagaacagctactag

SEQ ID NO: 95240 - DNA, 480 bp, Artificial Sequence
  derived and/or modified sequence
atgcagaagttcatgctgatcaagcacatcgacttccccatcccctgccccctgagaatgttcgagatgctggtggtgcccgagcaggagtaccccctggtgtgcgtgggcgtgagcagaggcagagacttcaaccaggtggtgagattcgagaccgtgaaccccaacagcaccagcagctggttcaccgagagcgacaccccccagaccaacgtgacccacgtgacccagctggagagagacaccatcctggtgtgcctggactgctgcatcaagatcgtgaacctgcagggcagactgaagagcagcagaaagctgagcagcgagctgaccttcgacttccagatcgagagcatcgtgtgcctgcaggacagcgtgctggccttctggaagcacggcatgcagggcagaagcttcagaagcaacgaggtgacccaggagatcagcgacagcaagaacttccaggccgcctggatctag

SEQ ID NO: 95241 - DNA, 2622 bp, Artificial Sequence
  derived and/or modified sequence
atgaaccctgggttcgacctctctcgccggaacccccaggaggattttgagctcattcagcggatcggcagtggcacttatggagacgtgtataaggcccgaaatgtgaacacgggggaactggctgccataaaggtcattaagctggaacctggagaggactttgcagtggtgcagcaagagattatcatgatgaaagactgtaaacaccccaacatcgttgcctacttcgggtcctatctccggcgagacaagctctggatctgtatggagttttgcggtgggggctctctccaggatatctaccacgtgaccgggcctttgtcagagctgcagatcgcttacgttagtcgcgagactctgcagggactctattatcttcattccaaggggaaaatgcaccgggacatcaagggtgctaatatcctgctgactgacaatggtcacgtaaagcttgctgattttggcgtgagtgcccaaatcaccgccacgatcgccaagaggaaaagcttcatcggtaccccatactggatggcaccggaagttgctgcggtagagcgtaaaggcggatacaaccaactgtgcgatctctgggccgtgggaatcacggccattgaactcgccgaattacaaccccccatgttcgatctacatccaatgcgggccctcttcctgatgacgaaaagcaatttccagcccccgaaactgaaagataagatgaaatggagcaactccttccaccactttgtcaagatggcactcacaaagaaccctaagaagcgccccaccgccgaaaagcttttgcaacacccattcgtcactcaacatctgacccgttctctggccatcgaactgctcgacaaagtgaacaatcccgaccacagtacctaccacgattttgacgatgacgaccctgaaccgctcgtagctgttccacatcgaattcattcgacctctagaaacgtccgagaggaaaaaacaagaagcgaaatcacctttggacaggttaaattcgaccctcctctgagaaaagaaaccgagcctcaccacgaactggacctgcaacttgagtatgggcaaggccatcaaggcggctattttctgggcgccaacaaatccttattgaaatcagtagaggaagagctacaccagcggggtcacgtagcccatctggaagacgatgaaggagatgatgatgagtctaagcattcgacccttaaagccaaaataccacccccattgccacccaaaccaaagtccatcttcattccccaggagatgcatagtaccgaggacgagaaccaggggaccatcaaacgctgtcctatgagtggctccccagccaagccgtcccaagtaccacccaggccaccccctcctcggctgcccccgcataaacccgttgcgttagggaatgggatgtccagtttccagctgaacggtgaacgagacggctctctatgccaacagcagaacgagcaccgcggtaccaatctgtcgcgcaaggaaaaaaaagacgttcccaagcctatcagtaacggcttgccacccacacctaaagtgcacatgggagcatgcttctctaaggtctttaacggctgtcctctcaagatacactgtgcctcttcctggatcaacccagacaccagagatcagtacctcattttcggcgctgaggaaggcatctataccctgaatctcaatgaactgcacgagacctccatggagcagttgttccctcgacgctgcacatggttgtacgtcatgaacaattgtttgctttcaatatctggaaaggcctcacagctctatagtcataacttaccgggtctctttgattacgcaagacaaatgcaaaagctgcctgtggccattccagcacataagctgcccgaccgcattctgcccagaaagttttcagtgagcgccaagattcctgagacaaaatggtgtcagaagtgctgtgtagtgaggaacccttacaccgggcataagtatctgtgtggcgccctgcagacttctatcgtgctcctcgaatgggtggagccgatgcaaaaatttatgcttatcaagcatatcgacttccctatcccatgtcccctcaggatgttcgaaatgctggtggttccggaacaggagtaccccctcgtgtgtgttggggtgtcccgcggccgagactttaaccaggtcgtccgcttcgagaccgtaaacccaaactctactagttcttggttcactgagtccgacaccccccagacgaatgtaacccatgtgacacagctcgaaagggatacaatcctcgtgtgcctggattgctgcatcaagattgtgaatttacagggtcggctcaagtctagcagaaaactatcaagtgagctgacattcgacttccagatcgagtccatcgtgtgcttacaagatagtgtgctcgctttctggaagcacgggatgcagggtcgatcctttcgaagcaacgaagtcacacaggagatctcggacagcacacgtatttttcgactactcgggtcagacagggtggtggtgctcgagagccgacccacagacaaccctacagccaacagtaacctctacatcctggccggacatgaaaattcttactag

SEQ ID NO: 95242 - DNA, 1344 bp, Artificial Sequence
  derived and/or modified sequence
atgcactccactgaagatgagaaccaggggaccatcaagcggtgtcctatgtcaggctcgcccgctaagccatctcaggtgccaccacgcccacctcctccacgactccccccgcacaaaccagttgccctcgggaacggaatgagtagttttcagctcaacggcgaacgggacggctccctgtgccagcaacaaaatgagcatcgtggtaccaacttaagccgcaaggaaaaaaaggatgtcccgaagcctattagtaatggactgccccctacccctaaagttcatatgggcgcctgcttcagcaaggttttcaatggatgtcccctgaagatccactgcgctagctcttggattaatccagacactcgtgatcagtatctaattttcggggctgaggagggtatctatactctgaatctgaacgagctccacgaaacatcaatggaacagctcttcccccggaggtgtacatggctgtatgtcatgaacaactgcctgttgagcatcagtgggaaagcttcacagctgtatagccataatctcccaggactgttcgactacgctcgccagatgcagaaactgcccgtggctatccccgcgcacaagctacccgaccgaatcctgccccgtaagttttctgtttccgctaagatccccgagaccaagtggtgccagaagtgctgcgtcgtcagaaacccctacacagggcataagtacttgtgcggcgccctgcagacaagcatagtacttctggagtgggtggaaccaatgcaaaaattcatgcttatcaaacacatcgatttcccgattccgtgccccctccgcatgtttgagatgctcgtggtgcctgagcaggaatatccgctggtatgcgtgggcgtgtcacgtggaagagacttcaaccaagtggttagattcgaaaccgtcaaccccaacagtaccagcagttggttcactgaatctgacaccccacaaacaaatgtaactcatgtgacccagctggaacgggataccattctggtttgcctcgattgttgcatcaagatcgtgaacctgcaaggccggctcaaaagcagtcgcaaactgtcatcagaactgacatttgatttccagattgagtcaattgtctgtctccaagacagcgtgcttgccttctggaaacacggaatgcaagggagaagtttcagatctaacgaggtaactcaggaaatctccgatagcactcgcattttcaggctgctggggtctgatcgggtggtagttctcgaaagtagacctacagacaacccaactgcaaattccaacttatatatcctcgcaggtcacgagaattcctactag

SEQ ID NO: 95243 - DNA, 480 bp, Artificial Sequence
  derived and/or modified sequence
atgcagaagtttatgctgataaaacatattgactttccaattccttgccccttaagaatgttcgagatgctggtggtccctgagcaggagtatcccctggtgtgtgtgggcgtaagtcggggccgggattttaaccaagtagtgaggtttgagactgttaaccctaactccaccagcagctggttcactgaatccgatactccacaaacaaacgtcacccacgtgacacagttagaacgcgacactatcctcgtctgccttgactgctgcatcaaaatcgtcaatctgcagggccggctgaagagctcccggaagctgtcgtcggaactgaccttcgacttccagatcgagtctatcgtgtgtttacaagactccgtactggcgttctggaagcacgggatgcagggaaggagctttcgaagcaacgaggttacccaggagatcagcgatagcaagaactttcaggccgcatggatttag

SEQ ID NO: 95244 - DNA, 2622 bp, Artificial Sequence
  derived and/or modified sequence
atgaaccctggctttgacctgagcagaagaaacccccaggaggactttgagctgatccagagaattggcagcggcacctatggagatgtgtacaaggccagaaatgtgaacacaggagagctggccgccatcaaggtgatcaagctggagcctggagaagattttgctgtggtgcagcaggagatcatcatgatgaaggactgcaagcaccccaacatcgtggcctacttcggcagctacctgcggcgggacaagctgtggatctgcatggagttctgtggcggcggcagcctgcaggacatctaccacgtgacaggccccctgtctgagctgcagatcgcctacgtgtcccgggagaccctgcagggcctgtactacctgcacagcaagggcaagatgcaccgggacatcaagggggccaacatcctgctgacagacaatggacatgtgaagctggccgactttggagtgtctgcccagatcacagccaccatcgccaagaggaagagcttcatcggcaccccctactggatggcccctgaggtggccgctgtggagaggaagggcggctacaaccagctgtgtgacctgtgggccgtgggcatcacagccatcgagctggccgagctgcagccccccatgtttgacctgcaccccatgagggccctcttcctgatgaccaagagcaacttccagccccccaagctgaaggacaagatgaagtggagcaacagcttccaccactttgtgaagatggccctgaccaagaaccccaagaagaggcccacagctgagaagctgctgcagcacccctttgtgacccagcacctgaccaggagcctggccatcgagctgctggacaaggtgaacaacccagaccacagcacctaccatgactttgatgatgatgatcctgagcccctggtggccgtgccccaccgcatccacagcaccagcagaaatgtgcgggaggagaagaccaggtctgagatcaccttcggccaggtgaagtttgacccccccctgaggaaggagacagagccccaccacgagctggacctgcagctggagtatggccagggccaccagggcggctacttcctgggcgccaacaagagcctgctgaagtctgtggaggaggagctgcaccagaggggccacgtggcccacctggaggatgatgaaggagatgatgatgagagcaagcacagcaccctgaaggccaagatccccccacccctgccccccaagcccaagagcatcttcatcccccaggagatgcacagcacagaagatgagaaccagggcaccatcaagcgctgccccatgagcggcagccctgccaagcccagccaggtgccccccaggcctcctccaccccggctgcccccccacaagcctgtggccctgggcaatggcatgagcagcttccagctgaatggagagagagatggcagcctgtgccagcagcagaatgagcaccggggcaccaacctgagcaggaaggagaagaaggatgtgcccaagcccatcagcaatggcctgccccccacccccaaggtgcacatgggcgcctgcttcagcaaggtgttcaacggctgccccctgaagatccactgtgccagctcctggatcaacccagacacccgggaccagtacctgatctttggagctgaggagggcatctacaccctgaacctgaatgagctgcacgagacctccatggagcagctgttcccccggcgctgcacctggctgtatgtgatgaacaactgcctgctgagcatcagcggcaaggccagccagctgtacagccacaacctgcccggcctgtttgattatgcccggcagatgcagaagctgcctgtggccatcccagcccacaagctgcctgaccgcatcctgcccaggaagttctctgtgtctgccaagatccctgagaccaagtggtgccagaagtgctgcgtggtgaggaacccctacacaggccacaagtacctgtgtggggccctgcagaccagcatcgtgctgctggagtgggtggagcccatgcagaagttcatgctgatcaagcacatcgacttccccatcccctgccccctgaggatgtttgagatgctggtggtgcctgagcaggagtaccccctggtgtgtgtgggcgtgtcccggggccgggacttcaaccaggtggtgcgctttgaaacagtgaaccccaacagcaccagctcctggttcacagaaagtgacaccccccagaccaacgtgacccacgtgacccagctggagcgggacaccatcctggtgtgcctggactgctgcatcaagatcgtgaacctgcagggccgcctgaagagcagcaggaagctgagcagcgagctgacctttgacttccagatcgagagcatcgtgtgcctgcaggacagcgtgctggccttctggaagcacggcatgcagggccgctccttccgcagcaatgaggtgacccaggagatcagtgacagcacccgcatcttccggctgctgggcagtgacagagtggtggtgctggagagccggcccacagacaaccccacagccaacagcaacctgtacatcctggccggccacgagaacagctactag

SEQ ID NO: 95245 - DNA, 1344 bp, Artificial Sequence
  derived and/or modified sequence
atgcacagcacagaagatgagaaccagggcaccatcaagcgctgccccatgagcggcagccctgccaagcccagccaggtgccccccaggcctcctccaccccggctgcccccccacaagcctgtggccctgggcaatggcatgagcagcttccagctgaatggagagagagatggcagcctgtgccagcagcagaatgagcaccggggcaccaacctgagcaggaaggagaagaaggatgtgcccaagcccatcagcaatggcctgccccccacccccaaggtgcacatgggcgcctgcttcagcaaggtgttcaacggctgccccctgaagatccactgtgccagctcctggatcaacccagacacccgggaccagtacctgatctttggagctgaggagggcatctacaccctgaacctgaatgagctgcacgagacctccatggagcagctgttcccccggcgctgcacctggctgtatgtgatgaacaactgcctgctgagcatcagcggcaaggccagccagctgtacagccacaacctgcccggcctgtttgattatgcccggcagatgcagaagctgcctgtggccatcccagcccacaagctgcctgaccgcatcctgcccaggaagttctctgtgtctgccaagatccctgagaccaagtggtgccagaagtgctgcgtggtgaggaacccctacacaggccacaagtacctgtgtggggccctgcagaccagcatcgtgctgctggagtgggtggagcccatgcagaagttcatgctgatcaagcacatcgacttccccatcccctgccccctgaggatgtttgagatgctggtggtgcctgagcaggagtaccccctggtgtgtgtgggcgtgtcccggggccgggacttcaaccaggtggtgcgctttgaaacagtgaaccccaacagcaccagctcctggttcacagaaagtgacaccccccagaccaacgtgacccacgtgacccagctggagcgggacaccatcctggtgtgcctggactgctgcatcaagatcgtgaacctgcagggccgcctgaagagcagcaggaagctgagcagcgagctgacctttgacttccagatcgagagcatcgtgtgcctgcaggacagcgtgctggccttctggaagcacggcatgcagggccgctccttccgcagcaatgaggtgacccaggagatcagtgacagcacccgcatcttccggctgctgggcagtgacagagtggtggtgctggagagccggcccacagacaaccccacagccaacagcaacctgtacatcctggccggccacgagaacagctactag

SEQ ID NO: 95246 - DNA, 480 bp, Artificial Sequence
  derived and/or modified sequence
atgcagaagttcatgctgatcaagcacatcgacttccccatcccctgccccctgaggatgtttgagatgctggtggtgcctgagcaggagtaccccctggtgtgtgtgggcgtgtcccggggccgggacttcaaccaggtggtgcgctttgagaccgtgaaccccaacagcaccagctcctggttcacagaaagtgacaccccccagaccaacgtgacccacgtgacccagctggagcgggacaccatcctggtgtgcctggactgctgcatcaagatcgtgaacctgcagggccgcctgaagagcagcaggaagctgagcagcgagctgacctttgacttccagatcgagagcatcgtgtgcctgcaggacagcgtgctggccttctggaagcacggcatgcagggccgctccttccgcagcaatgaggtgacccaggagatcagtgacagcaagaacttccaggccgcctggatctag

SEQ ID NO: 95247 - DNA, 2622 bp, Artificial Sequence
  derived and/or modified sequence
atgaaccccggcttcgacctgagccggcggaacccccaggaggacttcgagctgatccagcgcattggcagcggtacctatggagatgtctataaggcccgcaacgtcaataccggagagctggcagcgatcaaggtgattaagttggaaccgggagaagattttgccgtggttcagcaagaaataatcatgatgaaggattgcaaacatcctaacatcgtcgcttattttggctcctaccttaggcgtgacaagctatggatctgcatggagttctgcggggggggctccttgcaagatatctaccatgttactgggcccctcagcgagctgcagatcgcttatgtgtcccgggagaccctgcagggcctttattatctgcatagtaaaggcaagatgcatagagacattaaaggtgctaacatattgctcacagacaacgggcacgtgaaactggccgattttggcgtgtccgcacagattactgccacaatcgccaagagaaaatcatttattggcactccctactggatggccccggaagtcgccgctgttgagcggaagggtggttacaatcagttgtgcgacctctgggctgtgggcatcacggccatcgagcttgcagagttacagcctccgatgttcgatctgcaccccatgagagctctgttcctgatgaccaaatcaaacttccaacctccaaagctcaaggacaaaatgaagtggagtaactctttccatcacttcgtcaagatggcactcacgaagaaccctaaaaagcggccgacagccgagaagttgctgcagcacccttttgtcacacagcatctcaccagatcgctcgcaattgaactcctggacaaggtgaataaccccgaccatagtacctaccacgacttcgatgatgatgatcctgagcccttggtggccgtcccacacagaatacacagtacctccagaaacgtgcgagaggagaagacaagatctgagatcacgttcggccaggtgaagtttgacccccctctgcggaaggaaacggagcctcatcatgaattagacctacagctggaatacggacagggacaccaaggagggtactttctgggagcgaataagtccctgctgaaaagcgttgaggaggagcttcatcagcgaggtcatgtagcccacttagaggatgatgagggagacgatgacgaatccaagcattcgaccctcaaggccaaaatcccccctcctctgccaccaaaaccaaaaagtatatttatccctcaggagatgcatagcaccgaggatgagaaccagggaaccataaaacgctgtcctatgagcggttctccagccaagccatcccaggtcccgccgaggcctcctcctcccagacttcctccacacaaacctgtcgcgctgggcaacgggatgtccagttttcaactcaacggcgaaagagacgggagtctttgtcaacaacagaatgaacatcggggaacaaatctgagcagaaaggagaaaaaggacgtgcctaaaccaatatctaatggcttgccgcctactcccaaggtgcatatgggggcctgtttctccaaggtgttcaatggctgcccccttaaaattcactgtgcatcgagctggattaatccagatacgagagatcagtacctgatatttggcgctgaggaagggatatacaccctgaatttaaacgaacttcatgagaccagcatggagcagctatttcctagacgatgtacatggttgtacgttatgaataactgcctgctgtccatctctggaaaggcctctcagctgtactcccacaatctgccaggcctgtttgactatgcacgtcagatgcagaagctgcccgtagctattccagctcacaagctgcctgataggattcttccacggaaattcagcgtctctgcaaaaattcccgagactaagtggtgccagaagtgctgtgtcgtccggaacccatacacgggccacaaatatctgtgtggggcactgcagaccagtatcgtgctgcttgagtgggttgaaccgatgcagaagtttatgttgatcaagcacatagattttccgattccctgccccctccggatgtttgagatgttggtcgtccctgagcaagagtaccccctggtatgcgtgggggtctcaagaggcagagacttcaatcaggttgtacggtttgaaacggtcaaccccaactccacatcatcttggtttaccgaatccgacacaccacagaccaacgtcactcatgtaacgcagttggaacgcgatacaatcctggtgtgccttgactgctgcattaagatcgtcaatcttcagggccggcttaagtcctccagaaaactgtcgtccgagctgacgtttgactttcagatcgaaagtatagtttgcttgcaggactctgtgcttgccttctggaaacatgggatgcaagggagatcctttcgctcaaatgaagtgactcaggaaattagcgattccactcgtatctttcgcctgctgggaagcgaccgcgtagtggtgttggaaagtcggccaaccgacaatcctacagccaactccaatctttatattctagctggtcatgaaaactcttactag

SEQ ID NO: 95248 - DNA, 1344 bp, Artificial Sequence
  derived and/or modified sequence
atgcacagcaccgaggacgagaaccagggcaccatcaagcggtgccctatgtctggctcccccgccaaaccgagccaggttcccccaagaccccctcctcctcggcttccacctcacaagcctgtcgcactcggcaacggtatgagtagttttcagctgaacggtgagagggatggctcactgtgccagcagcaaaacgaacataggggtaccaatctctccaggaaggaaaaaaaagacgtgccgaagccaatttccaacggtctgcctccaacccctaaagtgcacatgggggcatgtttctctaaggtgttcaatggctgtcccctgaaaatccactgtgcgtctagttggattaatcccgacacaagggatcagtacctcatctttggcgctgaggaaggtatatacaccctcaatctcaacgagctgcacgaaactagcatggaacagctctttccacggcgctgtacatggttgtatgtgatgaataactgtttactctcaatctcagggaaggcctcccagctgtacagtcacaatctgccaggcctctttgactatgcccggcagatgcagaaactgcctgtcgccatacccgcacacaagttgcctgatagaatcctgccacgtaagtttagcgtgtccgctaagatcccggaaacgaaatggtgccagaagtgctgcgtggtgaggaacccatacactgggcacaagtacctttgcggagccctgcaaacctccattgtactgctggaatgggttgagcctatgcagaaatttatgctgattaagcatatcgactttcctattccgtgcccactcaggatgttcgagatgctcgtcgtgccagagcaggagtatccactggtgtgtgtaggcgtgagtcgaggcagagactttaatcaagtggttcgatttgaaacagtgaatcccaactccacttccagttggttcaccgaatctgatacccctcagaccaacgtgacccatgttactcagctcgaaagggacaccatcctggtctgtctagattgttgtatcaaaattgtaaacctgcaggggcgcctgaagtctagtcggaagctcagctctgaactgacctttgatttccagatagagtcaattgtgtgtcttcaggattctgtgctggcattttggaaacacggcatgcagggccggagcttcagatctaatgaggttacccaggaaattagcgacagcacccgaatttttcggctgctggggagcgacagagtggttgttctggagtctagaccgacggacaatccgaccgcaaacagtaacctttacatcctggccgggcacgaaaacagctactag

SEQ ID NO: 95249 - DNA, 480 bp, Artificial Sequence
  derived and/or modified sequence
atgcagaagttcatgctgatcaagcacatcgacttccccatcccctgtcctttgcgaatgttcgaaatgcttgtcgtgccggagcaggagtatccgctggtctgcgtgggcgtgagcaggggtcgcgatttcaatcaggtagttcgtttcgaaaccgttaatcccaattccacatctagctggtttacggaatcagatacccctcagacgaatgtgactcatgtcactcagttggagagagataccatcttggtctgcctcgactgctgcataaagattgtgaatcttcagggccgactgaagtcgtcccggaagctgtcctccgagctgacattcgactttcagattgagtccattgtttgcctgcaagattccgtgttagccttttggaaacacggtatgcagggccgcagctttcgatctaacgaggtcacgcaggaaatttcggactccaagaattttcaggctgcatggatctag

SEQ ID NO: 95250 - DNA, 4271 bp, Artificial Sequence
  derived and/or modified sequence
gaggagcggcgaaagcggaagccatgttggagtttcaccccgagcgaggggctgcgagggttctcctctccttgtgggtgtgaccaggttcggcgcggcggcgggccgcggggggcggggacgattggccgcttgtcgtcgtccgcagcggcgtgaggggagcggcggcggcggcggcggccgcagcgtggagccgggtgattgtgaccgccgggggagccgggagccggccgcggcgccctctctccgtgtggccccctgagcggcccccctcccctgcccgggagggaggcggggggcacctggggcccgccatgaaccccggcttcgatttgtcccgccggaacccgcaggaggacttcgagctgattcagcgcatcggcagcggcacctacggcgacgtctacaaggcacggaatgttaacactggtgaattagcagcaattaaagtaataaaattggaaccaggagaagactttgcagttgtgcagcaagaaattattatgatgaaagactgtaaacacccaaatattgttgcttattttggaagctatctcaggcgagataagctttggatttgcatggagttttgtggaggtggttctttacaggatatttatcacgtaactggacctctgtcagaactgcaaattgcatatgttagcagagaaacactgcagggattatattatcttcacagtaaaggaaaaatgcacagagatataaagggagctaacattctattaacggataatggtcatgtgaaattggctgattttggagtatctgcacagataacagctacaattgccaaacggaagtctttcattggcacaccatattggatggctccagaagttgcagctgttgagaggaaggggggttacaatcaactctgtgatctctgggcagtgggaatcactgccatagaacttgcagagcttcagcctcctatgtttgacttacacccaatgagagcattatttctaatgacaaaaagcaattttcagcctcctaaactaaaggataaaatgaaatggtcaaatagttttcatcactttgtgaaaatggcacttaccaaaaatccgaaaaaaagacctactgctgaaaaattattacagcatccttttgtaacacaacatttgacacggtctttggcaatcgagctgttggataaagtaaataatccagatcattccacttaccatgatttcgatgatgatgatcctgagcctcttgttgctgtaccacatagaattcactcaacaagtagaaacgtgagagaagaaaaaacacgctcagagataacctttggccaagtgaaatttgatccacccttaagaaaggagacagaaccacatcatgaacttgatctgcaactggaatatggacaaggacaccaaggtggttactttttaggtgcaaacaagagtcttctcaagtctgttgaagaagaattgcatcagcgaggacacgtcgcacatttagaagatgatgaaggagatgatgatgaatctaaacactcaactctgaaagcaaaaattccacctcctttgccaccaaagcctaagtctatcttcataccacaggaaatgcattctactgaggatgaaaatcaaggaacaatcaagagatgtcccatgtcagggagcccagcaaagccatcccaagttccacctagaccaccacctcccagattacccccacacaaacctgttgccttaggaaatggaatgagctccttccagttaaatggtgaacgagatggctcattatgtcaacaacagaatgaacatagaggcacaaacctttcaagaaaagaaaagaaagatgtaccaaagcctattagtaatggtcttcctccaacacctaaagtgcatatgggtgcatgtttttcaaaagtttttaatgggtgtcccttgaaaattcactgtgcatcatcatggataaacccagatacaagagatcagtacttgatatttggtgccgaagaagggatttataccctcaatcttaatgaacttcatgaaacatcaatggaacagctattccctcgaaggtgtacatggttgtatgtaatgaacaattgcttgctatcaatatctggtaaagcttctcagctttattcccataatttaccagggctttttgattatgcaagacaaatgcaaaagttacctgttgctattccagcacacaaactccctgacagaatactgccaaggaaattttctgtatcagcaaaaatccctgaaaccaaatggtgccagaagtgttgtgttgtaagaaatccttacacgggccataaatacctatgtggagcacttcagactagcattgttctattagaatgggttgaaccaatgcagaaatttatgttaattaagcacatagattttcctataccatgtccacttagaatgtttgaaatgctggtagttcctgaacaggagtaccctttagtttgtgttggtgtcagtagaggtagagacttcaaccaagtggttcgatttgagacggtcaatccaaattctacctcttcatggtttacagaatcagataccccacagacaaatgttactcatgtaacccaactggagagagataccatccttgtatgcttggactgttgtataaaaatagtaaatctccaaggaagattaaaatctagcaggaaattgtcatcagaactcacctttgatttccagattgaatcaatagtgtgcctacaagacagtgtgctagctttctggaaacatggaatgcaaggtagaagttttagatctaatgaggtaacacaagaaatttcagatagcacaagaattttcaggctgcttggatctgacagggtcgtggttttggaaagtaggccaactgataaccccacagcaaatagcaatttgtacatcctggcgggtcatgaaaacagttactgagaattgttgtgctttgacagttaactctagaaagaaagaacactaccactgcaacattaatggatgcttgaagctgtacaaaagctgcagtaacctgtcttcagttactttgtaatttattgtggcatgagataagatggggaaaattttgttttaagtggtatggatatatttagcatattgaaccacacaagtgcttaattcattgttatgtaatctttgtacatataggcagtattttttctgtgaaacttcatattgctgaagacatacactaagaatttatgtagataatgtacttttatgagatgtacaagtaagtgtcttatctgtacagatgtaaatgttgatgaaaatgcaattggggttaatattttaagaattctttagtatattcttgggtgtggctatattacaaaatgggatgctggcaatgaaacaatacatttaacactattgtatttttattatatgtaatttagtaatatgaatataaatcttgtaacttttaaaattgtaatggaggctgtaatcattttataatctttttaattttaatgcaagtacactggtgtttatatttgcacaaagtattgatatgtgatgtattaagtcacaaaagtaagctgtgacattgtctataagcatttggctccacaaatgtatttggattgttttctatgtgaagcaaaccaattataattaaccacatgttgtagtaactggtctttttatatttaagcagaatcctgtaagattgcttgtctttgcttaaaaacaatacctttgaacatttttgaatcacagaatagcggtaccatgatagaatactgcaattgtggtcagaattacagtatgcacaaagaattaattagcattattaaagagtcctcactaaacatttcatatgatcacactgaagaactgtaacattccatagagtgaagtggttcaaatttctcttggaatttttacttttgttggccttattttatgatccttttcatatttcttttgacttagagtattaatacatggccaaaataatttagttactacctcatacaaacaatataatggttactacacatcacaggaacttagttttggtttaagtcatttttgattgcttttttccaatggaatatgtatataccaggttttagcaaaatgcacacttttggctctttttggtatatgttctttatattttaatgtgagtatatacactaagaacaaactaaattgtgatttatgatcttcatttattttaatgataatggttttaaaatatgttcctgattgtacatattgtaaaataaacatgttttttaa

SEQ ID NO: 95251 - DNA, 2622 bp, Artificial Sequence
  derived and/or modified sequence
atgaacccaggctttgacctgagtcgacggaatcctcaggaggactttgagctgatccagcggataggctccggtacctacggggacgtctacaaagcacggaatgtaaacacgggagaattggccgctatcaaagtcatcaagctcgagccgggagaggatttcgctgttgtacagcaagaaatcattatgatgaaagactgcaaacatcccaatattgtggcctactttggatcctacttgaggcgagacaagttatggatctgcatggagttttgcggcggaggctctttacaggacatctaccatgtcactggtcctctgagtgaactccaaattgcttacgtctcccgcgaaacccttcagggtctctattacctccacagtaagggaaaaatgcaccgggatattaagggggctaatatcctgctgaccgacaacgggcatgtcaagctcgcagactttggagtgagcgcccagattacagccactatcgccaaacgtaaaagtttcattgggacaccctattggatggctccggaagtcgccgcagtggaaaggaagggcggttataaccagctttgcgatctctgggctgtcggcatcacagctattgagctggctgaacttcagcctcccatgtttgacctccacccaatgagggccctgtttctcatgaccaaaagtaatttccagcccccaaaactcaaggacaagatgaagtggagtaactcgtttcaccattttgtgaaaatggctctgactaaaaatcctaagaaaagaccaaccgccgagaaattgttgcagcaccccttcgtgacacagcacctgacgagaagcctcgccatcgagctgctcgacaaagtgaacaacccagatcacagcacctaccatgacttcgatgatgatgacccagagcccctcgtcgcagtcccacatagaatccactccacgtctcggaatgtgcgtgaggagaagacacgctctgaaataacttttggacaggtaaagtttgatcccccactaagaaaagagactgaacctcatcacgaattggatctccagctggagtacggacagggccaccaaggaggatattttctgggcgcaaacaagtctctgctcaagagtgtggaagaagagttacatcagcgtggtcacgtcgcccacctagaagatgacgagggcgacgatgacgagtctaagcactccaccctgaaggctaaaatcccgcctcccttgcctcctaaacctaagtcaattttcattcctcaggagatgcactccaccgaagacgaaaatcagggcaccatcaaacggtgccccatgagcggaagccctgccaagcccagtcaagtgccacctagaccccctccacccagactccctccccataaacccgtggcactgggtaacggtatgagttctttccagctcaatggagagcgcgatggcagtctgtgccagcaacagaacgaacacaggggtaccaacctgtctagaaaagagaagaaggacgtgcccaagcccattagcaatggtctgcctcccaccccaaaggttcacatgggagcctgcttcagcaaagtcttcaacggatgtccccttaagatccactgcgccagttcatggattaacccagacacaagggaccaataccttatttttggagccgaagaaggaatttatactcttaacctaaacgaattacatgagacctcgatggaacagttgttccctcggaggtgcacctggctctatgtcatgaataattgcctgctttcaattagcgggaaggcttcgcagctgtacagccataatctgcccggactgtttgactatgcgcgtcagatgcagaagctcccagtggctatcccagcccacaagttgccggacagaattcttcctagaaaattctcggtgagtgctaagattccagaaacgaagtggtgtcaaaagtgctgtgttgtgcgaaacccctacacgggccacaagtatctgtgtggagccctgcagacatccatcgttcttctcgagtgggtggaaccaatgcaaaagtttatgttaattaaacacatcgatttccccataccctgtcctctccgcatgttcgaaatgctcgtggtacctgagcaggaatatcccctggtctgcgttggcgtatcccgtggtcgcgactttaaccaggttgtgcgcttcgagaccgtgaatcccaactcaacctcctcctggttcactgaatccgatacaccacagaccaacgtaacacatgttacacaattggagcgagacacgatcctggtctgcctggattgttgtattaagattgtcaatttacaaggtcggttaaagtccagtcgcaaactgagtagcgagctgacgttcgatttccaaatcgaaagcattgtctgtttgcaggatagcgtgctggcattctggaagcacggtatgcaaggcaggtctttcagatctaatgaggtaactcaagagatttccgatagcacaaggatcttccgactgttggggagcgatcgcgtagtcgtcctggagtcgcgtcctacagacaatccgaccgctaatagtaacctatacattcttgctggccacgagaattcttactag

SEQ ID NO: 95252 - DNA, 1344 bp, Artificial Sequence
  derived and/or modified sequence
atgcacagtaccgaagacgagaatcaggggaccataaaaaggtgccccatgtccggcagtcccgctaaaccatcacaagtacctcctcgtcccccaccacctcggctgcctccccataagcccgttgcgcttggaaacggcatgtcatccttccagctcaacggggagagggacggaagcctgtgccaacagcaaaatgagcaccgcggaactaacctgtctagaaaagaaaaaaaggacgtgcccaagcctataagtaatggactcccacccacaccgaaggtgcatatgggggcttgcttttctaaggtcttcaacggatgtcctttgaaaattcactgtgcttcctcttggattaaccccgatacccgagaccaatatttgatattcggggcagaggagggcatatatactcttaatcttaacgagttgcatgagacatctatggagcagctttttccgcgaaggtgcacctggctgtacgtgatgaataactgccttttgtccatcagcggtaaggcctcccagctctattctcacaatctgccaggcctgtttgattatgcacgtcagatgcagaagcttcccgtcgccattcccgctcacaagctgccggaccgaattttgccgcgaaaattcagtgtgagcgctaaaatccccgagacaaagtggtgccagaagtgttgtgtggtccggaatccttataccggacataagtacctgtgcggcgcactccagacttccatcgtcttgttagagtgggtggagcctatgcagaaatttatgctgattaagcatatcgactttccaatcccctgtcccctgcgcatgttcgaaatgctcgtcgtacctgagcaggaataccctttggtttgtgtgggcgtctcacgcggtagagactttaatcaggtggttcggttcgagactgtaaaccccaactcaactagttcgtggtttaccgaatccgacactcctcagacaaatgtgactcacgtgactcagctcgagagagacaccatcctagtgtgtctcgattgctgcataaaaatcgtgaacctccagggtagactcaagagctcgcgcaaactgagctccgagcttactttcgacttccagatcgagtctatcgtgtgtctgcaggacagtgtgctcgctttctggaagcatggcatgcagggtaggagctttcgatctaacgaagttacccaggaaattagcgactcaacccgtatctttcgcctgctgggcagcgacagggtggtggtcctagagagccgccctactgacaatccgacagctaactccaatctttacattctggccggtcacgagaattcatactag

SEQ ID NO: 95253 - DNA, 480 bp, Artificial Sequence
  derived and/or modified sequence
atgcagaagtttatgttgatcaagcacatagacttcccaattccatgccccctgcgcatgtttgaaatgcttgtggtgcccgagcaggagtatcctctcgtgtgtgttggcgtcagtaggggcagagattttaaccaggttgtcagatttgaaaccgtgaacccaaactccaccagtagctggtttactgaatcagatactccccagacaaacgtcacgcacgtgacccagctagaacgcgatacgattctggtctgcctggactgctgcatcaagatcgtaaacctacagggtagactgaaaagcagcagaaagctcagctccgagttaacttttgacttccagattgaatcgattgtgtgcctgcaggattcagtgctggccttttggaaacacgggatgcaggggaggtctttccgctccaatgaggttacccaggagatttcagacagtaaaaattttcaagctgcttggatctag

SEQ ID NO: 95254 - protein, 155 aa, Artificial Sequence
  derived and/or modified sequence
MVLDQEDGVPMLSVQPKGKQKGCAGCNRKIKDRYLLKALDKYWHEDCLKCACCDCRLGEVGSTLYTKANLILCRRDYLRLFGTTGNCAACSKLIPAFEMVMRARDNVYHLDCFACQLCNQRFCVGDKFFLKNNMILCQMDYEEGQLNGTFESQVQ

SEQ ID NO: 95255 - DNA, 468 bp, Artificial Sequence
  derived and/or modified sequence
atggtgctggaccaggaggacggcgtgcccatgctgagcgtgcagcccaagggcaagcagaagggctgcgccggctgcaacagaaagatcaaggacagatacctgctgaaggccctggacaagtactggcacgaggactgcctgaagtgcgcctgctgcgactgcagactgggcgaggtgggcagcaccctgtacaccaaggccaacctgatcctgtgcagaagagactacctgagactgttcggcaccaccggcaactgcgccgcctgcagcaagctgatccccgccttcgagatggtgatgagagccagagacaacgtgtaccacctggactgcttcgcctgccagctgtgcaaccagagattctgcgtgggcgacaagttcttcctgaagaacaacatgatcctgtgccagatggactacgaggagggccagctgaacggcaccttcgagagccaggtgcagtag

SEQ ID NO: 95256 - DNA, 468 bp, Artificial Sequence
  derived and/or modified sequence
atggtgctggaccaggaagacggagtccctatgttgtcagtccagcccaagggcaaacaaaagggctgtgcaggttgtaataggaagatcaaggaccggtatcttctgaaggccttagacaagtattggcacgaagattgcctgaaatgcgcttgttgcgattgccgcctgggggaggtagggtctactctgtacacaaaggctaatctgattctgtgccgtcgagattatctcaggctgtttggaaccactgggaactgcgccgcgtgttctaagttgattcccgcgtttgagatggtaatgagggccagagataatgtttaccatctggattgctttgcgtgccagctgtgtaaccagagattttgcgtgggagataaattcttcctgaagaacaatatgattttgtgccagatggactacgaagaaggtcagctgaacgggacttttgagtcccaggtgcagtag

SEQ ID NO: 95257 - DNA, 468 bp, Artificial Sequence
  derived and/or modified sequence
atggtgctggaccaggaggatggagtgcccatgctgtctgtgcagcccaagggcaagcagaagggctgtgccggctgcaacaggaagatcaaggaccgctacctgctgaaggccctggacaagtactggcatgaggactgcctgaagtgtgcctgctgtgactgccgcctgggggaggtgggcagcaccctgtacaccaaggccaacctgatcctgtgccggcgggactacctgcggctgtttggcaccaccggcaactgtgccgcctgcagcaagctgatcccagcctttgagatggtgatgagggcccgggacaacgtgtaccacctggactgctttgcctgccagctgtgcaaccagcgcttctgtgtgggggacaagttcttcctgaagaacaacatgatcctgtgccagatggactatgaggagggccagctgaatggcacctttgagagccaggtgcagtag

SEQ ID NO: 95258 - DNA, 1038 bp, Artificial Sequence
  derived and/or modified sequence
gcccgggcagctgctgctcgcgaggctcccgcgatcccggcctggccgtctcgcccccgcgccttccccccagtccctcctcctgcgctccctgcccgcggggctgcgctccggactccggtccgtctgcccccgtcggcggtcgcggctctccggactcggcgcccgcgcggggccggcgggagcagcgcaggcggccggcggcgggagtcggagccacgcgcccctccgtatcctcggcgctagtccggctggagccgtcgggaccatggtgttggaccaggaggacggcgtgccgatgctctccgtccagcccaaagggaagcagaagggctgtgcgggctgtaaccgcaagatcaaggaccgctatctgctgaaggcattggacaagtactggcacgaagactgcctcaagtgtgcctgctgtgactgccgcctgggcgaggtgggctccaccctctacaccaaggccaacctcatcctgtgccgacgcgactacctgaggctctttggcaccacagggaactgtgctgcttgcagcaagctgatcccagccttcgagatggtgatgcgggcccgggacaacgtgtatcacctcgactgcttcgcctgccagctctgcaaccagagattttgtgtgggagacaaattcttcctgaagaacaacatgatcttgtgtcagatggactatgaggaagggcagctcaatggcacctttgaatcccaagttcagtaacgcccggcgcctggcctccaggcccgtctgtccatctgcccgcctgcccacctgcctggccggccagccagccactctaccagtgcaggctggccagccgctctcctgccacattagaacttctccgtcctcgatgggagggatggcccttcctcctccaccaccgcccgtctgtgtgtgacccctcctggggccaggccgggcctgtacagtctgtcttctgtatataaatgggaacatttattttatgagaaatgtaatgcgattttattactggcgtggattaaacttatgaatgtttc

SEQ ID NO: 95259 - DNA, 468 bp, Artificial Sequence
  derived and/or modified sequence
atggtgctggaccaggaggacggcgtgcccatgctgagcgtgcagccaaaaggaaagcagaaggggtgtgctggttgtaatcgcaagataaaagaccgctatctcctcaaagccctggataaatattggcatgaggattgtttaaagtgcgcctgttgtgattgcaggctcggcgaagtcggatctactctctatacaaaagctaatctgattctgtgcagacgagattaccttagactgttcggcacgaccggcaactgcgcagcttgcagcaagcttatccccgcgttcgagatggtgatgcgtgcccgcgacaacgtgtaccacctcgattgttttgcctgtcaactctgcaaccagagattctgcgtgggtgataagttttttttgaaaaacaacatgatactttgccagatggactacgaagaaggccaactgaacggaacttttgagtcgcaagtgcagtag

SEQ ID NO: 95260 - DNA, 468 bp, Artificial Sequence
  derived and/or modified sequence
atggtcctcgaccaggaagatggcgttcctatgctgagcgtccagcctaagggcaaacaaaaggggtgcgcgggatgcaacaggaagattaaggatcggtaccttctgaaggctctcgataaatattggcacgaagattgtctgaagtgcgcctgttgtgattgtaggctcggagaagttggctccacactatataccaaggctaatctcatactgtgtagacgggactaccttaggctgtttgggactacagggaactgtgctgcttgcagtaagcttataccagcattcgagatggtgatgcgagccagggacaacgtctatcatctggactgtttcgcctgccagttgtgtaatcaacgattctgtgtcggcgacaaattttttttgaagaacaatatgatactgtgccagatggactatgaagaaggccagctgaatggcactttcgagtcccaggtgcagtag

SEQ ID NO: 95261 - protein, 154 aa, Artificial Sequence
  derived and/or modified sequence
MSKNTVSSARFRKVDVDEYDENKFVDEEDGGDGQAGPDEGEVDSCLRHSITGNMTAALQAALKNPPINTKSQAVKDRAGSIVLKVLISFKANDIEKAVQSLDKNGVDLLMKYIYKGFESPSDNSSAMLLQWHEKALAAGGVGSIVRVLTARKTV

SEQ ID NO: 95262 - DNA, 465 bp, Artificial Sequence
  derived and/or modified sequence
atgtccaagaacacagtgagcagtgctcggttcagaaaggtagatgtggacgagtatgatgagaataaattcgtcgatgaggaggatggcggcgacggacaggccggacctgatgaaggtgaggtcgattcttgcctacgacattcaatcactgggaatatgacagccgctctgcaggctgctctgaaaaacccacctatcaacacgaaatcacaggcggtgaaggaccgcgccggcagtatcgtgctgaaggttttgatttcgttcaaggccaacgacatagagaaggccgtgcaatccctggacaagaatggcgtggacttactgatgaaatatatctacaagggatttgaaagcccttccgataactctagcgccatgctgctccagtggcacgagaaagccttggcggcgggcggagtgggttcgattgtccgcgtgcttacggcccgcaagactgtctag

SEQ ID NO: 95263 - DNA, 465 bp, Artificial Sequence
  derived and/or modified sequence
atgagcaagaacacagtgagcagcgcccgcttcaggaaggtggatgtggatgaatatgatgagaacaagtttgtggatgaggaggatggaggagatggccaggccggcccagatgaaggagaggtggacagctgcctgcggcacagcatcactggaaacatgacagctgccctgcaggccgccctgaagaacccccccatcaacaccaagagccaggccgtgaaggaccgggccggcagcatcgtgctgaaggtgctgatctccttcaaggccaatgacatcgagaaggctgtgcagagcctggacaagaatggagtggacctgctgatgaagtacatctacaagggctttgagagccccagcgacaacagcagcgccatgctgctgcagtggcatgagaaggccctggccgccggcggcgtgggcagcatcgtgcgggtgctgacagccaggaagacagtgtag

SEQ ID NO: 95264 - DNA, 465 bp, Artificial Sequence
  derived and/or modified sequence
atgagcaagaacaccgtgagcagcgcccggttccggaaggtggacgtcgacgaatatgatgaaaacaagtttgtcgatgaagaggacgggggggatggacaggcaggtcccgatgagggagaggtcgattcgtgtctgcggcactcaataaccggcaacatgacggccgcgctgcaggctgctctgaagaacccacccattaataccaaaagccaggcagtcaaggaccgcgctggcagcatcgtactgaaggttcttataagctttaaagccaatgatatagagaaggccgtccagtcgctagataagaacggtgttgacttgctgatgaagtatatctacaagggattcgagagcccatccgataattcttccgctatgctcttgcagtggcacgaaaaagctctggctgccggaggggtcgggagcatagttagggtcctcacagcacgcaagacggtctag

SEQ ID NO: 95265 - DNA, 465 bp, Artificial Sequence
  derived and/or modified sequence
atgtctaaaaacacggtgtcctccgctcggtttaggaaagtcgacgtagacgagtacgacgagaacaaattcgtggacgaggaggacggcggtgatgggcaggccggaccggacgaaggcgaggttgatagctgcttgcggcactcaattacaggcaacatgactgcagcgcttcaagctgctctgaaaaaccctcccatcaacacaaagtcccaggccgtcaaagaccgggcaggatccatagtgctgaaagtcctgatctccttcaaggccaacgacatcgaaaaggctgtgcaaagcttggacaagaacggcgttgacctactgatgaaatacatttacaaaggcttcgagtctccgagcgataacagcagtgctatgttactgcaatggcacgaaaaggccctcgctgccggaggggtcggaagcatcgtccgagtgctcaccgccaggaaaacggtgtag

SEQ ID NO: 95266 - DNA, 1637 bp, Artificial Sequence
  derived and/or modified sequence
gggaagtgaatcaggcgccgggtagtgggttgctgggctgggcttgctgaggtagaggcagcgccaagaagaggcctttgccgctggtcgggattgggatgtcgaagaacacagtgtcgtcggcccgcttccggaaggtggacgtggatgaatatgacgagaacaagttcgtggacgaagaagatgggggcgacggccaggccgggcccgacgagggcgaggtggactcctgcctgcggcattccatcacaggaaacatgacagctgccctacaggcagctctgaagaacccccctatcaacaccaagagtcaggcagtgaaggaccgggcaggcagcattgtcttgaaggtgctcatctcttttaaagctaatgatatagaaaaggcagttcaatctctggacaagaatggtgtggatctcctaatgaagtatatttataaaggatttgagagcccgtctgacaatagcagtgctatgttactgcaatggcatgaaaaggcacttgctgctggaggagtagggtccattgttcgtgtcttgactgcaagaaaaactgtgtagtctggcaggaagtggattatctgcctcgggagtgggaattgctggtacaaagaccaaaacaaccaaatgccaccgctgccctgtgggtagcatctgtttctctcagctttgccttcttgctttttcatatctgtaaagaaaaaaattacatatcagttgtcctttaatgaaaattgggataatatagaagaaattgtgttaaaatagaagtgtttcatcctttcaaaaccatttcagtgatgtttataccaatctgtatatagtataatttacattcaagtttaattgtgcaacttttaacccctgttggctggttttttgttctgttttgttttgtattatttttaactaatactgagagatttggtcagaatttgaggccagtttcctagctcattgctagtcaggaaatgatatttataaaaaatatgagagactggcagctattaacattgcaaaactggaccatatttcccttatttaataagcaaaatatgtttttggaataagtggtgggtgaataccactgctaagttatagctttgtttttgcttgcctcctgattatctgtactgtgggtttaagtatgctactttctctcagcatccaataatcatggcccctcaatttatttgtggtcacccagggttcagagcaagaagtcttgctttatacaaatgtatccataaaatatcagagcttgttgggcatgaacatcaaacttttgttccactaatatggctctgtttggaaaaaactgcaaatcagaaagaatgatttgcagaaagaaagaaaaactatggtgtaatttaaactctgggcagcctctgaatgaaatgctactttctttagaaatataatagctgccttagacattatgaggtatacaactagtatttaagataccatttaatatgccccgtaaatgtcttcagtgttcttcagggtagttgggatctcaaaagatttggttcagatccaaacaaatacacattctgtgttttagctcagtgttttctaaaaaaagaaactgccacacagcaaaaaattgtttactttgttggacaaaccaaa

SEQ ID NO: 95267 - DNA, 465 bp, Artificial Sequence
  derived and/or modified sequence
atgagcaagaacaccgtgagcagcgccagattcagaaaggtggacgtggacgagtacgacgagaacaagttcgtggacgaggaggacggcggcgacggccaggccggccccgacgagggcgaggtggacagctgcctgagacacagcatcaccggcaacatgaccgccgccctgcaggccgccctgaagaacccccccatcaacaccaagagccaggccgtgaaggacagagccggcagcatcgtgctgaaggtgctgatcagcttcaaggccaacgacatcgagaaggccgtgcagagcctggacaagaacggcgtggacctgctgatgaagtacatctacaagggcttcgagagccccagcgacaacagcagcgccatgctgctgcagtggcacgagaaggccctggccgccggcggcgtgggcagcatcgtgagagtgctgaccgccagaaagaccgtgtag

SEQ ID NO: 95268 - protein, 678 aa, Artificial Sequence
  derived and/or modified sequence
MLGGLAAAAGTRIMGKEIEAEAQRPLRQTWRPGQPPAMTAKTMSSRLTALLGQPRPGPARRPYAGGAAQLALDKSDSHPSDALTRKKPAKAESKSFAVGMFKGQLTTDQVFPYPSVLNEEQTQFLKELVEPVSRFFEEVNDPAKNDALEMVEETTWQGLKELGAFGLQVPSELGGVGLCNTQYARLVEIVGMHDLGVGITLGAHQSIGFKGILLFGTKAQKEKYLPKLASGETVAAFCLTEPSSGSDAASIRTSAVPSPCGKYYTLNGSKLWISNGGLADIFTVFAKTPVTDPATGAVKEKITAFVVERGFGGITHGPPEKKMGIKASNTAEVFFDGVRVPSENVLGEVGSGFKVAMHILNNGRFGMAAALAGTMRGIIAKAVDHATNRTQFGEKIHNFGLIQEKLARMVMLQYVTESMAYMVSANMDQGATDFQIEAAISKIFGSEAAWKVTDECIQIMGGMGFMKEPGVERVLRDLRIFRIFEGTNDILRLFVALQGCMDKGKELSGLGSALKNPFGNAGLLLGEAGKQLRRRAGLGSGLSLSGLVHPELSRSGELAVRALEQFATVVEAKLIKHKKGIVNEQFLLQRLADGAIDLYAMVVVLSRASRSLSEGHPTAQHEKMLCDTWCIEAAARIREGMAALQSDPWQQELYRNFKSISKALVERGGVVTSNPLGF

SEQ ID NO: 95269 - DNA, 2037 bp, Artificial Sequence
  derived and/or modified sequence
atgttggggggtcttgccgcggccgctgggacccgcataatgggaaaagagatagaagccgaagcacaaaggcccctgcgacaaacatggcggccaggccagccccctgccatgaccgctaagaccatgtcctctagactgactgctctcctcggtcagcctcgtcccggccccgcacgcaggccctacgctggcggagcagctcaactggctctcgacaagtccgactctcacccgtctgatgccctgactcggaaaaaacctgccaaagctgagagcaagagttttgccgtcgggatgttcaagggtcagctgacaactgatcaagtgtttccataccccagcgtcttgaatgaggagcaaacccaattcctgaaagaactggtggaacccgtgtctcggttctttgaggaagtaaatgaccccgccaagaatgacgcactggagatggtcgaggaaaccacttggcaagggctgaaggaactcggagccttcgggctccaggtgcctagcgaactgggcggcgtggggctctgtaatactcaatacgcgcgattggtggaaattgtcggtatgcacgatttaggggtaggcatcaccctgggagcacaccaaagtattgggttcaaagggatcctgctgttcggcactaaggcgcaaaaggagaaatacctccccaaactagcaagtggggagacagtggccgccttttgtcttacagagccatctagcggaagtgacgccgctagcatcaggacatccgcagttccatccccttgtggcaagtattacaccctgaatgggagtaaactgtggatttctaatggaggcctggctgatatcttcaccgtgttcgctaagacacctgtcactgatcctgccaccggcgctgtcaaagagaaaatcacagcattcgtggtggaaaggggttttggcggcattacccatggcccccccgagaagaaaatgggaatcaaggcaagcaataccgcagaagttttctttgatggtgtcagggttccatccgaaaatgtgctgggcgaggtgggctccggctttaaggtggccatgcatatcctgaataacggccggttcgggatggccgcagctttagcagggacaatgcgggggatcattgcaaaagccgtagaccacgctactaacagaacacagttcggtgaaaagatccacaactttggcctgattcaggagaaactggcccggatggttatgctgcagtatgtcaccgagtcaatggcctacatggtgtcagcaaacatggaccagggcgctaccgacttccagatcgaggccgctattagcaaaatcttcggaagtgaagcggcctggaaagtcacagacgaatgcattcagattatgggaggtatgggctttatgaaggagcccggagtggaacgcgtgttaagagacctgcgaatcttccgtatcttcgaggggaccaacgatatcctgcgcctgttcgtggccttgcaaggatgcatggacaagggcaaagagctgtcgggactgggcagtgcgctgaagaaccccttcgggaacgcggggctgctactcggcgaggccggaaaacagcttcgcagacgtgccggcctcggcagcgggctgagtttatcaggcctggtgcacccggagctgagccgctcaggtgaattggcagtgcgagctctggagcagtttgcaacggtcgtcgaggccaagctcatcaaacacaaaaaagggattgtgaatgaacaattcctactccagcgactggctgatggcgctatcgatctctatgctatggtggttgttctttccagagcttccagatccttgtccgaggggcaccccaccgcccagcacgagaaaatgttgtgtgacacttggtgtatcgaagccgctgcccgtattcgagagggtatggccgcgctgcagtctgacccctggcaacaagaactgtatcgaaactttaaaagcatctccaaggccttggtagagcggggaggcgtagtcacatcaaacccgttgggcttttag

SEQ ID NO: 95270 - DNA, 2037 bp, Artificial Sequence
  derived and/or modified sequence
atgctgggcggcctggccgctgctgctggcacccgcatcatgggcaaggagattgaggccgaggcccagaggcccctgcggcagacctggaggcctggccagcccccagccatgacagccaagaccatgagcagccggctgacagccctgctgggccagccccggcccggccctgcccggcggccctatgctgggggcgccgcccagctggccctggacaagagtgacagccaccccagtgatgccctgaccaggaagaagccagccaaggccgagagcaagagctttgctgtgggcatgttcaagggccagctgaccacagaccaggtgttcccctaccccagcgtgctgaatgaggagcagacccagttcctgaaggagctggtggagcctgtgagccgcttctttgaggaggtgaatgaccctgccaagaatgatgccctggagatggtggaggagaccacctggcagggcctgaaggagctgggcgccttcggcctgcaggtgcccagcgagctgggcggcgtgggcctgtgcaacacccagtatgcccggctggtggagatcgtgggcatgcatgacctgggcgtgggcatcaccctgggcgcccaccagagcatcggcttcaagggcatcctgctgtttggcaccaaggcccagaaggagaagtacctgcccaagctggccagcggggagaccgtggccgccttctgcctgacagagcccagcagcggcagtgatgctgccagcatccgcaccagcgctgtgcccagcccctgtgggaagtactacaccctgaatggcagcaagctgtggatcagcaatggaggcctggccgacatcttcaccgtgtttgccaagacccctgtgacagatcctgccactggagctgtgaaggagaagatcacagcctttgtggtggagcggggctttggaggcatcacccacggccccccagagaagaagatgggcatcaaggccagcaacacagctgaggtgttctttgatggagtgcgggtgcccagtgaaaatgtgctgggggaggtgggcagcggcttcaaggtggccatgcacatcctgaacaacggccgcttcggcatggctgctgccctggccggcaccatgaggggcatcatcgccaaggctgtggaccacgccaccaacagaacccagtttggagagaagatccacaactttggcctcatccaggagaagctggccaggatggtgatgctgcagtatgtgacagagagcatggcctacatggtgtctgccaacatggaccagggcgccacagacttccagatcgaggccgccatcagcaagatcttcggcagcgaggccgcctggaaggtgacagatgagtgcatccagatcatgggcggcatgggcttcatgaaggagcccggggtggagcgggtgctgcgggacctgcgcatcttccgcatctttgagggcaccaatgacatcctgcggctgtttgtggccctgcagggctgcatggacaagggcaaggagctgagcggcctgggcagcgccctgaagaacccctttggaaatgccggcctgctgctgggggaggccggcaagcagctgcggcggcgggccggcctgggcagcggcctgagcctgagcggcctggtgcaccctgagctgagccgctctggagagctggccgtgcgggccctggagcagtttgccaccgtggtggaggccaagctgatcaagcacaagaagggcatcgtgaatgagcagttcctgctgcagaggctggctgatggagccatcgacctgtatgccatggtggtggtgctgagccgggccagccgcagcctgtctgagggccaccccacagcccagcacgagaagatgctgtgtgacacctggtgcattgaagctgctgcccgcatccgggagggcatggccgccctgcagagcgacccctggcagcaggagctgtacagaaacttcaagagcatcagcaaggccctggtggagcggggcggcgtggtgaccagcaaccccctgggcttctag

SEQ ID NO: 95271 - DNA, 2037 bp, Artificial Sequence
  derived and/or modified sequence
atgctgggcggcctggccgccgccgccggcacccggatcatgggcaaggagattgaggccgaggcccagaggcctctccgccagacttggcggccaggccagcccccagcaatgactgcgaaaactatgagttcacggctgacggccttattggggcagcccaggcccggaccagccaggcgaccttacgccgggggggccgcccagcttgcgttagacaagagcgactcgcatccaagcgatgccctgaccagaaagaaacccgccaaggccgaatcaaaaagcttcgcagtgggaatgttcaaagggcaactgactacggaccaggtattcccttacccttccgttctgaacgaggagcaaacccagttcctgaaagagctcgtggaaccagtcagcaggttttttgaggaagtgaacgacccagccaagaatgacgccctcgagatggtcgaggagaccacttggcagggcttaaaggaattgggcgctttcggcctccaagtgccctccgagctaggcggtgtgggtctatgtaacactcaatacgcccggttggtagagatcgttggcatgcacgatctaggcgtcgggattacattgggcgcccaccagtccattggatttaagggaattttgctgtttggaaccaaagcccaaaaagagaaatacctcccgaaactggcctctggggagacagttgccgcgttctgtctgactgaaccatcaagcggctcagatgccgcctccataaggaccagtgcagttcccagcccatgtggaaagtactacactttgaatgggtccaagctgtggatatcgaacggtggcctcgcagacatctttaccgtgtttgcaaaaacacctgtgaccgatccagccaccggcgccgtgaaagaaaagattaccgcttttgtagtggagaggggcttcggcggaatcacacatggaccgccagaaaagaaaatggggataaaggcctccaacactgctgaagtgttctttgatggtgtgcgagtgccaagtgagaatgtccttggagaagtcggctctgggtttaaagtggccatgcacattctgaataatgggaggttcgggatggctgccgctctggctggtactatgaggggcatcatagccaaagcagtggaccacgctacaaatcggacccaattcggggaaaagatacacaattttggacttatacaggaaaagctggctcgcatggttatgctacagtacgtgacagagtccatggcctacatggtgtctgccaacatggaccagggggccacagactttcagattgaagccgccatcagcaagatttttgggagcgaggcggcatggaaggttacagacgaatgtatccagattatgggcggaatgggcttcatgaaggagccaggcgtggagagagttttacgtgacctgagaatcttccgcatcttcgagggcactaatgacatactgcgcctgtttgtcgccctacagggctgtatggacaaggggaaagagctatctggccttggatctgccttgaaaaaccctttcggaaatgctggcctgctcctgggagaggccggcaaacagttgagacgacgagccggactgggctcaggtctatccctgagcggactcgtgcaccccgaattgtcacgcagcggggaactggccgtcagggcattagagcagttcgcgaccgtagtggaggcaaagctcattaagcacaaaaaaggcatcgtaaacgaacagtttctgctccaacgcctggccgatggtgcaatcgatctgtatgcgatggttgtcgtgctgagccgagcatctagatctttgtctgaagggcaccccactgcccagcatgaaaagatgctgtgcgatacatggtgcattgaggctgcggcaagaattagggaggggatggcagcactgcaatcagacccctggcagcaggagctctaccgtaattttaagagtatcagtaaagcactcgtcgagagaggcggggtggtcacctctaacccactcggtttctag

SEQ ID NO: 95272 - DNA, 2037 bp, Artificial Sequence
  derived and/or modified sequence
atgctgggcggtctggcagccgctgctgggacaaggattatgggaaaagagattgaggctgaggcgcaacgccctctgcgacagacctggcggccaggacaacccccagccatgacagccaagaccatgtccagcagactgaccgccttgctaggacaaccgcgacccggacccgctagaagaccttacgccggtggtgccgctcagttggctctggataaatcagattcccacccaagtgacgccctgacccgaaagaaacccgcaaaggccgaaagcaaatccttcgccgtcggaatgtttaaaggacaattgacaaccgatcaggtcttcccttacccctcagtccttaacgaagagcagacccagtttctgaaggaattggttgagcccgtgtcacgatttttcgaggaagttaacgaccccgctaaaaacgacgctcttgagatggttgaagagaccacttggcagggcctcaaagaactgggcgcattcggactgcaggttccgtccgaactaggcggagtggggctgtgtaacacacagtatgcgcgactcgtcgagatagtggggatgcacgacctcggcgtaggaattactcttggcgcacatcaaagtatcgggtttaaagggatcctgctgttcggcacaaaggcccaaaaggaaaaatatcttcctaagctcgcatcaggtgagactgtggccgctttctgtctgaccgaaccaagttccggcagcgatgcggcatctattaggacttctgccgtcccctccccttgtggaaaatattacacattaaacggaagcaagctgtggattagcaacgggggtctcgccgacattttcaccgttttcgctaagacacctgtcacagacccggcaaccggggctgtgaaagagaagataacggccttcgtcgtcgagagaggattcgggggtatcacacatggccctccagagaaaaagatggggatcaaagcatcgaataccgccgaggtattcttcgatggagttcgcgtaccatctgaaaacgtcctcggcgaagtcggcagcggctttaaagtcgccatgcatatactgaacaatggtcggtttgggatggccgcagcacttgcgggtacaatgaggggcatcatcgccaaggcagtcgaccacgcaacaaatcgcacgcaattcggggagaaaattcataatttcggactgatccaggagaaactcgcaaggatggtaatgctacaatacgtcacagagtctatggcatatatggtgagcgctaacatggaccagggtgccacagactttcagattgaggccgcaataagcaaaatatttgggtcagaagctgcttggaaagtgaccgatgaatgcatccagattatgggaggaatgggttttatgaaggaaccaggagtcgaacgcgtactgcgtgatcttagaatttttaggatcttcgagggcactaacgatatcctgcggctttttgtcgccctgcagggctgtatggacaaaggcaaagagcttagtggtctgggctcagcgctcaagaacccttttggtaacgccggtttactacttggcgaagctgggaagcagctgcgcagacgagctggactgggaagtggcctctctcttagtggtctggtgcatccggagctcagccgatctggagagctggctgtgcgtgccttggaacagtttgcaactgttgttgaggccaagctcatcaaacataagaaggggatcgttaatgagcagtttttactgcagcgactcgccgacggggcaatcgacttgtatgcgatggtggttgtcttgagtcgggcaagccgctcactgtcagaaggccatccaaccgctcagcacgagaagatgctctgcgacacatggtgtattgaagctgcagcaagaatcagagaaggcatggccgctctgcagtcagatccttggcaacaggagctgtacagaaactttaaatctatatcaaaagccctggtggagcggggaggcgtggtgacatctaaccctcttggcttctag

SEQ ID NO: 95273 - DNA, 2037 bp, Artificial Sequence
  derived and/or modified sequence
atgctgggcggcctggccgccgccgccggcaccagaatcatgggcaaggagatcgaggccgaggcccagagacccctgagacagacctggagacccggccagccccccgccatgaccgccaagaccatgagcagcagactgaccgccctgctgggccagcccagacccggccccgccagaagaccctacgccggcggcgccgcccagctggccctggacaagagcgacagccaccccagcgacgccctgaccagaaagaagcccgccaaggccgagagcaagagcttcgccgtgggcatgttcaagggccagctgaccaccgaccaggtgttcccctaccccagcgtgctgaacgaggagcagacccagttcctgaaggagctggtggagcccgtgagcagattcttcgaggaggtgaacgaccccgccaagaacgacgccctggagatggtggaggagaccacctggcagggcctgaaggagctgggcgccttcggcctgcaggtgcccagcgagctgggcggcgtgggcctgtgcaacacccagtacgccagactggtggagatcgtgggcatgcacgacctgggcgtgggcatcaccctgggcgcccaccagagcatcggcttcaagggcatcctgctgttcggcaccaaggcccagaaggagaagtacctgcccaagctggccagcggcgagaccgtggccgccttctgcctgaccgagcccagcagcggcagcgacgccgccagcatcagaaccagcgccgtgcccagcccctgcggcaagtactacaccctgaacggcagcaagctgtggatcagcaacggcggcctggccgacatcttcaccgtgttcgccaagacccccgtgaccgaccccgccaccggcgccgtgaaggagaagatcaccgccttcgtggtggagagaggcttcggcggcatcacccacggcccccccgagaagaagatgggcatcaaggccagcaacaccgccgaggtgttcttcgacggcgtgagagtgcccagcgagaacgtgctgggcgaggtgggcagcggcttcaaggtggccatgcacatcctgaacaacggcagattcggcatggccgccgccctggccggcaccatgagaggcatcatcgccaaggccgtggaccacgccaccaacagaacccagttcggcgagaagatccacaacttcggcctgatccaggagaagctggccagaatggtgatgctgcagtacgtgaccgagagcatggcctacatggtgagcgccaacatggaccagggcgccaccgacttccagatcgaggccgccatcagcaagatcttcggcagcgaggccgcctggaaggtgaccgacgagtgcatccagatcatgggcggcatgggcttcatgaaggagcccggcgtggagagagtgctgagagacctgagaatcttcagaatcttcgagggcaccaacgacatcctgagactgttcgtggccctgcagggctgcatggacaagggcaaggagctgagcggcctgggcagcgccctgaagaaccccttcggcaacgccggcctgctgctgggcgaggccggcaagcagctgagaagaagagccggcctgggcagcggcctgagcctgagcggcctggtgcaccccgagctgagcagaagcggcgagctggccgtgagagccctggagcagttcgccaccgtggtggaggccaagctgatcaagcacaagaagggcatcgtgaacgagcagttcctgctgcagagactggccgacggcgccatcgacctgtacgccatggtggtggtgctgagcagagccagcagaagcctgagcgagggccaccccaccgcccagcacgagaagatgctgtgcgacacctggtgcatcgaggccgccgccagaatcagagagggcatggccgccctgcagagcgacccctggcagcaggagctgtacagaaacttcaagagcatcagcaaggccctggtggagagaggcggcgtggtgaccagcaaccccctgggcttctag

SEQ ID NO: 95274 - DNA, 2226 bp, Artificial Sequence
  derived and/or modified sequence
gtcactatacagagacagtccatgttggggggcctggccgcggcggcgggaacccggataatgggaaaggagatagaagcagaagcacagaggcccctgaggcaaacatggagacctggccagccaccagcgatgacagcaaagacgatgagctcgcggctcacggcgctcctggggcagccccggcccggccctgcccggcggccctatgccgggggtgccgctcagctggctctggacaagtcagattcccacccctctgacgctctgaccaggaaaaaaccggccaaggcggaatctaagtcctttgctgtgggaatgttcaaaggccagctcaccacagatcaggtgttcccatacccgtccgtgctcaacgaagagcagacacagtttcttaaagagctggtggagcctgtgtcccgtttcttcgaggaagtgaacgatcccgccaagaatgacgctctggagatggtggaggagaccacttggcagggcctcaaggagctgggggcctttggtctgcaagtgcccagtgagctgggtggtgtgggcctttgcaacacccagtacgcccgtttggtggagatcgtgggcatgcatgaccttggcgtgggcattaccctgggggcccatcagagcatcggtttcaaaggcatcctgctctttggcacaaaggcccagaaagaaaaatacctccccaagctggcatctggggagactgtggccgctttctgtctaaccgagccctcaagcgggtcagatgcagcctccatccgaacctctgctgtgcccagcccctgtggaaaatactataccctcaatggaagcaagctttggatcagtaatgggggcctagcagacatcttcacggtctttgccaagacaccagttacagatccagccacaggagccgtgaaggagaagatcacagcttttgtggtggagaggggcttcgggggcattacccatgggccccctgagaagaagatgggcatcaaggcttcaaacacagcagaggtgttctttgatggagtacgggtgccatcggagaacgtgctgggtgaggttgggagtggcttcaaggttgccatgcacatcctcaacaatggaaggtttggcatggctgcggccctggcaggtaccatgagaggcatcattgctaaggcggtagatcatgccactaatcgtacccagtttggggagaaaattcacaactttgggctgatccaggagaagctggcacggatggttatgctgcagtatgtaactgagtccatggcttacatggtgagtgctaacatggaccagggagccacggacttccagatagaggccgccatcagcaaaatctttggctcggaggcagcctggaaggtgacagatgaatgcatccaaatcatggggggtatgggcttcatgaaggaacctggagtagagcgtgtgctccgagatcttcgcatcttccggatctttgaggggacaaatgacattcttcggctgtttgtggctctgcagggctgtatggacaaaggaaaggagctctctgggcttggcagtgctctaaagaatccctttgggaatgctggcctcctgctaggagaggcaggcaaacagctgaggcggcgggcagggctgggcagcggcctgagtctcagcggacttgtccacccggagttgagtcggagtggcgagctggcagtacgggctctggagcagtttgccactgtggtggaggccaagctgataaaacacaagaaggggattgtcaatgaacagtttctgctgcagcggctggcagacggggccatcgacctctatgccatggtggtggttctctcgagggcctcaagatccctgagtgagggccaccccacggcccagcatgagaaaatgctctgtgacacctggtgtatcgaggctgcagctcggatccgagagggcatggccgccctgcagtctgacccctggcagcaagagctctaccgcaacttcaaaagcatctccaaggccttggtggagcggggtggtgtggtcaccagcaacccacttggcttctgaatactcccggccagggcctgtcccagttatgtgccttccctcaagccaaagccgaagcccctttccttaaggccctggtttgtcccgaaggggcctagtgttcccagcactgtgcctgctctcaagagcacttactgcctcgcaaataataaaaatttctagccagtc

SEQ ID NO: 95275 - protein, 244 aa, Artificial Sequence
  derived and/or modified sequence
MFTLSQTSRAWFIDRARQAREERLVQKERERAAVVIQAHVRSFLCRSRLQRDIRREIDDFFKADDPESTKRSALCIFKIARKLLFLFRIKEDNERFEKLCRSILSSMDAENEPKVWYVSLACSKDLTLLWIQQIKNILWYCCDFLKQLKPEILQDSRLITLYLTMLVTFTDTSTWKILRGKGESLRPAMNHICANIMGHLNQHGFYSVLQCCDGLFPDLVSYAPHNNPVRWSVGRSWYDWQLSR

SEQ ID NO: 95276 - DNA, 735 bp, Artificial Sequence
  derived and/or modified sequence
atgttcaccctgagccagaccagcagagcctggttcatcgacagagccagacaggccagagaggagagactggtgcagaaggagagagagagagccgccgtggtgatccaggcccacgtgagaagcttcctgtgcagaagcagactgcagagagacatcagaagagagatcgacgacttcttcaaggccgacgaccccgagagcaccaagagaagcgccctgtgcatcttcaagatcgccagaaagctgctgttcctgttcagaatcaaggaggacaacgagagattcgagaagctgtgcagaagcatcctgagcagcatggacgccgagaacgagcccaaggtgtggtacgtgagcctggcctgcagcaaggacctgaccctgctgtggatccagcagatcaagaacatcctgtggtactgctgcgacttcctgaagcagctgaagcccgagatcctgcaggacagcagactgatcaccctgtacctgaccatgctggtgaccttcaccgacaccagcacctggaagatcctgagaggcaagggcgagagcctgagacccgccatgaaccacatctgcgccaacatcatgggccacctgaaccagcacggcttctacagcgtgctgcagtgctgcgacggcctgttccccgacctggtgagctacgccccccacaacaaccccgtgagatggagcgtgggcagaagctggtacgactggcagctgagcagatag

SEQ ID NO: 95277 - DNA, 735 bp, Artificial Sequence
  derived and/or modified sequence
atgttcacccttagtcaaacaagtcgggcatggttcatcgaccgggcccggcaggctagggaagaacggctcgtgcaaaaagaacgtgaacgtgcagccgtggtgatccaggcccacgttaggtcctttctatgccgatcccggctgcagcgtgatatccggcgggaaatcgacgacttcttcaaagcggatgacccagagagtacaaaacgctcagccctgtgtatttttaagattgcgagaaagctcttattcctgtttcgaattaaagaagacaacgaaagatttgagaaactgtgccgatctatactgagttctatggatgccgagaacgagccgaaagtgtggtatgttagcctggcctgcagcaaggatttgactctgttgtggattcagcagattaaaaatatcctctggtattgttgcgacttcttaaaacagctgaaaccggagattctgcaggacagccggttaattacactgtatttgaccatgctcgtgacgttcacagacacttcaacgtggaagatcttgcgtggcaaaggtgaatccctcaggcccgcgatgaaccacatatgcgccaatattatgggccatctgaaccagcatggcttctactctgtgttgcaatgctgcgacggtctctttcccgacctcgtgtcttatgcccctcataacaatcccgtgcggtggagcgtagggcgtagctggtacgactggcagctaagtcggtag

SEQ ID NO: 95278 - DNA, 735 bp, Artificial Sequence
  derived and/or modified sequence
atgttcaccctgtcccagacgtctagagcatggtttattgaccgagcacgccaggcccgagaagagaggttggtccagaaggagcgtgaaagggcagcagttgtgattcaggcccacgtcagaagtttcctgtgtcgctctaggctgcagagggatataagacgcgagatagacgatttcttcaaagccgacgatcctgaatccaccaagcgctctgctctgtgtatcttcaaaattgcccgaaagctccttttcctgttcagaattaaagaagataatgagcgattcgaaaaactttgccgaagcatcctgtcctcgatggatgctgaaaacgaaccaaaagtatggtatgtctcgcttgcctgctcaaaggacctgacactgctttggattcaacagattaagaacattttgtggtattgttgtgactttctgaagcagctaaagcctgagattttgcaggattctagattaatcactctttatctcactatgctggtgacattcacagatacctctacctggaagatcttgaggggcaagggagaaagtctgcggcccgccatgaaccatatctgcgccaatatcatggggcacctgaatcaacatggattctactccgtattgcaatgttgcgatggccttttccctgatctggtttcatacgctccgcataacaaccctgtgagatggagtgtgggccgttcttggtatgattggcagctttcccgatag

SEQ ID NO: 95279 - DNA, 735 bp, Artificial Sequence
  derived and/or modified sequence
atgtttacactgagccagacgagtcgagcgtggtttattgacagggctcgacaagctagggaggagaggctggtgcaaaaggagcgggaacgtgcggcggtcgtgattcaggctcatgtacgttcttttctttgcagatcaaggctgcagcgcgatattcgcagagaaatagacgacttttttaaggccgacgacccagagtccaccaagaggagtgcactatgtatttttaagattgccaggaaactgctgttcctcttcagaattaaggaagataacgagcgcttcgagaaattatgccgctccattctatccagtatggatgccgagaacgagccaaaagtctggtatgtgtcactggcctgcagcaaagacctcacgcttttatggatccagcagatcaagaacatcctgtggtactgctgcgactttctcaagcagctcaaacccgagatcctccaagacagtcgcctgatcactttatacctgacaatgctggttaccttcactgacacatctacgtggaagatcctgcgaggcaagggcgaatccctgcggcccgcgatgaatcatatatgcgcaaatatcatggggcaccttaatcaacacggcttctatagtgtgctacagtgctgtgacggactcttcccagacttggtgtcttacgcaccacataataaccccgtgagatggtcggtgggcagatcttggtacgattggcaattgtcacgatag

SEQ ID NO: 95280 - DNA, 735 bp, Artificial Sequence
  derived and/or modified sequence
atgttcaccctgagccagaccagccgggcctggttcatcgaccgggcccggcaggcccgggaggagcggctggtgcagaaggagcgggagagagctgctgtggtgatccaggcccacgtgcgctccttcctgtgccgcagccggctgcagagggacatccggcgggagattgatgacttcttcaaggcagatgatcctgagagcaccaagaggtctgccctgtgcatcttcaagatcgccaggaagctgctcttcctgttccgcatcaaggaggacaatgaaagatttgagaagctgtgccgcagcatcctgagctccatggatgctgaaaatgagcccaaggtgtggtacgtgtccctggcctgcagcaaggacctgaccctgctgtggatccagcagatcaagaacatcctgtggtactgctgtgacttcctgaagcagctgaagccagagatcctgcaggacagccgcctcatcaccctgtacctgaccatgctggtgaccttcacagacaccagcacctggaagatcctgcggggcaaaggagagagcctgcggcctgccatgaaccacatctgtgccaacatcatgggccacctgaaccagcacggcttctacagcgtgctgcagtgctgtgatggcctcttcccagacctggtgtcctatgccccccacaacaaccctgtgcgctggagcgtgggccgctcctggtatgactggcagctgagcaggtag

SEQ ID NO: 95281 - DNA, 735 bp, Artificial Sequence
  derived and/or modified sequence
atgttcaccctgagccagaccagccgggcctggttcatcgaccgggcccggcaggcacgtgaagaacggctcgtgcagaaagagagagaacgggccgctgtggtgatccaagcccatgtgaggagttttttgtgtcgatcgcgcttgcagagagacattaggagggagatcgacgactttttcaaggcagacgatcccgagtctacaaagagaagtgctttgtgtattttcaagatcgcccggaagctccttttcctgtttaggatcaaagaggataatgaacgctttgagaagctctgccgttccattctatctagtatggatgccgagaatgagcctaaagtttggtatgtgtctcttgcctgtagtaaagatctgactctgctatggatacagcaaataaaaaacattctctggtactgttgcgatttccttaaacagctgaaacctgagatcttgcaggatagcagactcatcactttatatctcacgatgcttgtgaccttcacagatacctctacctggaaaatcctaagaggcaaaggcgagagcctgaggccagcaatgaaccacatatgtgctaatataatgggccacctgaaccagcatggattctattcggtgctccagtgttgtgatggcctgttccctgatctggtctcctacgccccgcataataaccctgtcagatggtccgttggcaggtcttggtacgattggcagctgagccgctag

SEQ ID NO: 95282 - DNA, 735 bp, Artificial Sequence
  derived and/or modified sequence
atgttcaccctgagccagaccagccgggcctggttcatcgaccgggcacgacaagcgagagaggagcgtcttgttcagaaggagagagagagagccgctgtggtcatccaagctcacgtccgctccttcctgtgcagatctcgcttgcaaagagacattcgcagagagatcgacgatttctttaaggccgacgatcctgaaagcacaaaacggtcagctctgtgtatttttaagatcgcacgtaaactacttttcctgttcagaattaaggaagacaatgagaggttcgaaaagctgtgccgctccattctcagcagcatggatgctgaaaatgagcccaaggtgtggtacgtttccctggcttgttcaaaagatcttaccttgctgtggattcaacagattaagaatatactctggtactgttgtgacttcctcaagcagctgaaacccgagatcctgcaggattcccgccttataacgttatatcttaccatgctggtcaccttcacagacacctccacttggaaaatccttcggggaaagggcgaatccctgaggccggctatgaatcacatatgtgccaacatcatgggtcacctcaaccagcacgggttctactccgtcctgcagtgctgtgatggcctcttccctgacttagtcagttatgccccacacaataaccctgttcggtggtcagtaggcagatcatggtatgactggcaactatcacggtag

SEQ ID NO: 95283 - DNA, 735 bp, Artificial Sequence
  derived and/or modified sequence
atgttcaccctgagccagaccagccgggcctggttcatcgaccgggctagacaggccagagaggagcggctggtgcaaaaggagagggagcgggcagctgtggtgatccaggcccacgtgcgaagctttttgtgcagaagtcgtctgcagcgggatataaggcgagagatcgacgatttctttaaggcagacgaccctgaaagcaccaaacggagcgctctttgtatcttcaagatcgcaagaaaactcctctttctattccgtatcaaggaagataatgaaagatttgagaagctgtgccgatctattctgtcatccatggacgccgaaaatgagcctaaagtatggtacgtctcattagcctgttccaaggatcttactctgctgtggatccagcagatcaaaaacattctgtggtactgctgtgattttctgaagcagctgaaacctgagattctccaagactcaaggttgatcaccctctatctgaccatgcttgtgacctttaccgatacttccacgtggaagattctccgtgggaagggggagagccttagaccggcaatgaaccatatatgcgctaatatcatgggacacttgaatcagcacggattttatagtgtgctgcagtgttgtgacggcctgttcccagacctcgtgtcttatgcaccccacaataatcccgtccggtggagtgtggggcgatcctggtatgactggcagctttcccgttag

SEQ ID NO: 95284 - DNA, 735 bp, Artificial Sequence
  derived and/or modified sequence
atgttcacactaagccagaccagtcgcgcatggttcatcgatagggctcgccaggcacgagaggagcggctggtgcagaaggagagggagcgggcagcagtcgtgatccaagcccatgtaagatcgtttctatgcagaagcagactgcagcgggacatcagacgggaaatcgatgactttttcaaagcagatgaccccgagtctactaaaaggagtgctttgtgcatcttcaagatcgcacgaaagctgctgtttttgtttcggattaaagaagacaacgagcgattcgagaagttgtgtagatcaattttgtcatccatggacgccgagaatgagcctaaagtgtggtatgtgtctctggcatgtagtaaggatctgacactcctctggattcagcagattaaaaacatcctgtggtattgctgtgacttcctgaaacagctcaagccggagatactgcaagactcccgcctgataacattatacctgactatgctagtgaccttcacagataccagtacgtggaagatcctgaggggtaagggagagtctctccgacccgcaatgaaccacatctgtgccaatattatgggtcacctgaaccagcatggattctacagcgtgttgcagtgttgtgatggtctgttccccgacttggtgagctacgcccctcataacaaccctgtccggtggtctgtaggccgatcgtggtacgattggcagctcagtcggtag

SEQ ID NO: 95285 - DNA, 735 bp, Artificial Sequence
  derived and/or modified sequence
atgttcactttgagccaaacctctagagcctggtttatcgatagggctcgccaggcccgagaggagcggctggtccagaaggagcgtgagcgagcagctgttgtcatccaggctcacgttaggtctttcctgtgcaggagcaggctccaacgtgatattcgacgggagatcgatgactttttcaaagctgacgacccggagtccacgaaaagaagtgcactctgtatctttaaaattgccagaaaacttctgttcctttttaggattaaggaagataacgagcggtttgagaagctgtgccgaagtattctgagcagcatggacgccgagaatgaacccaaagtctggtacgtgtctctcgcctgtagtaaagatctgactctcctctggattcaacaaatcaagaacattctctggtactgttgcgatttcctgaagcagctgaaacctgagattttgcaggactccaggctgatcacgctgtatttgaccatgctcgtgaccttcaccgacacctccacatggaagatcctccggggtaaaggcgagtctttacggcctgccatgaaccacatttgcgccaatatcatgggacacctcaatcagcacggcttctattctgtgcttcagtgttgcgacggcttgttccctgacctggtgagctatgcccctcacaacaaccctgtgagatggagtgtgggcagaagttggtacgactggcaattgtcccgctag

SEQ ID NO: 95286 - DNA, 735 bp, Artificial Sequence
  derived and/or modified sequence
atgttcacactaagccagacctcacgagcctggtttatcgacagggcccgacaggctcgcgaggaacgattggtgcagaaagagagagagcgagcggcagtagtgatacaagcacacgtccggtctttcttgtgccggagtcgactgcagcgggacattcggagggagatcgacgatttcttcaaagctgacgatcctgagtctacgaagcgttccgccctttgcatctttaagattgccaggaaattacttttcctttttaggatcaaagaagataacgaacgctttgagaaactctgtcggtccatcctttccagtatggacgcagagaatgagccgaaggtctggtatgtgagcctcgcttgctctaaggatctgaccctgctgtggattcagcagatcaagaacatcctctggtactgctgtgattttctgaaacaacttaaacccgagatcctgcaggatagtcgcttgatcaccctctacctgactatgttggtgacgtttacggacacctcaacgtggaaaattttgcgcggaaagggggaatcactgcggccagccatgaatcacatatgcgccaatatcatgggtcatttgaaccaacacgggttctattcagtcctccaatgctgcgacggtctcttccccgacttagtctcctatgcgccacataacaacccagtacgttggtccgtaggtcggtcctggtacgactggcaactgtccaggtag

SEQ ID NO: 95287 - DNA, 1448 bp, Artificial Sequence
  derived and/or modified sequence
tggcggtagtgcgtcggctgctgccccgggtctggcagaactcgggtgttttgggctgagacagtggcagctgcggccccgaccccaagtgcggggacctccggcgaataaaggtcggcctgcgggtaggccggtagggcctgcggtccggcctgcgggagaactgggtcgtcagtcctccgagtggtggggctggggactttgagggagttggctctagggcacagtccctgcctggccaggtcggaggaacaagtgctgggatctggcgtgtgtgctccaggggctctttccgcggccctttccacctcttttcactttggggacggtaggcctttataaacggactaatgctgggtgatttgttcctgtggttgttgatgccgaggaaagactctgggccccaggactcacctaaactggagttcgaatactgttcgctcgctgtgtgaccttggaaaaaataacaagcttttctgaagtgagaagctgttctcagccacgagtcctgtgcaagatcactaatgattacctggcatttctgcgacacaggcaggtcctcagggtttgtgcaagtttgcaaacatgttcaccctgtctcagacctcgagagcatggttcatcgatagagcccgtcaggcacgagaagaaaggcttgtgcagaaggaacgggagcgggcagctgttgtgatccaggcccatgtccggagttttctctgtcggagtcgactgcagagagatatcaggagagagattgatgacttttttaaagcagatgaccctgagtccactaaaagaagtgcactttgtattttcaagattgccaggaaactgctgttcctattcagaatcaaagaggataatgagagatttgagaagttgtgtcgcagcatcctgagcagcatggatgctgagaatgagcctaaggtgtggtatgtgtccctggcttgttctaaggacctcaccctcctttggattcaacagatcaagaacattttgtggtactgctgtgattttctcaagcagctcaagcctgaaatcctgcaggactcccgactcatcaccctgtacctcacgatgcttgtcaccttcacagacacttcaacgtggaaaattcttcggggaaaaggtgaaagtcttcgaccagcgatgaaccacatttgtgcaaatataatgggacatctcaaccagcatggattttattctgtgctgcagtgctgtgatgggctgtttcctgatttggtttcatatgctcctcacaacaaccctgtgaggtggtccgttggcagaagctggtatgactggcagttgtctcgctagaggaaccttctacttcataccataattaaacggcttctaaaataatatgatgtctttaaattttaagtctggcattatttgtattagctgtttttttaactttattattaaagaatttctaaccataa

SEQ ID NO: 95288 - DNA, 1120 bp, Artificial Sequence
  derived and/or modified sequence
aacaccgcggggcaagatggcggtagtgcgtcggctgctgccccgggtctggcagaactcgggtgttttgggctgagacagtggcagctgcggccccgaccccaagtgcggggacctccggcgaataaagaaaaaataacaagcttttctgaagtgagaagctgttctcagccacgagtcctgtgcaagatcactaatgattacctggcatttctgcgacacaggcaggtcctcagggtttgtgcaagtttgcaaacatgttcaccctgtctcagacctcgagagcatggttcatcgatagagcccgtcaggcacgagaagaaaggcttgtgcagaaggaacgggagcgggcagctgttgtgatccaggcccatgtccggagttttctctgtcggagtcgactgcagagagatatcaggagagagattgatgacttttttaaagcagatgaccctgagtccactaaaagaagtgcactttgtattttcaagattgccaggaaactgctgttcctattcagaatcaaagaggataatgagagatttgagaagttgtgtcgcagcatcctgagcagcatggatgctgagaatgagcctaaggtgtggtatgtgtccctggcttgttctaaggacctcaccctcctttggattcaacagatcaagaacattttgtggtactgctgtgattttctcaagcagctcaagcctgaaatcctgcaggactcccgactcatcaccctgtacctcacgatgcttgtcaccttcacagacacttcaacgtggaaaattcttcggggaaaaggtgaaagtcttcgaccagcgatgaaccacatttgtgcaaatataatgggacatctcaaccagcatggattttattctgtgctgcagtgctgtgatgggctgtttcctgatttggtttcatatgctcctcacaacaaccctgtgaggtggtccgttggcagaagctggtatgactggcagttgtctcgctagaggaaccttctacttcataccataattaaacggcttctaaaataatatgatgtctttaaattttaagtctggcattatttgtattagctgtttttttaactttattattaaagaatttctaaccataa

SEQ ID NO: 95289 - DNA, 1541 bp, Artificial Sequence
  derived and/or modified sequence
ggcggtagtgcgtcggctgctgccccgggtctggcagaactcgggtgttttgggctgagacagtggcagctgcggccccgaccccaagtgcggggacctccggcgaataaaggtcggcctgcggaaaaaataacaagcttttctgaagtgagaagctgttctcagccacgagtcctgtgcaagatcactaatgattacctggcatttctgcgacacaggcaggtcctcagggtttgtgcaagtttgcaaacatgttcaccctgtctcagacctcgagagcatggttcatcgatagagcccgtcaggcacgagaagaaaggcttgtgcagaaggaacgggagcgggcagctgttgtgatccaggcccatgtccggagttttctctgtcggagtcgactgcagagagatatcaggagagagattgatgacttttttaaagcagatgaccctgagtccactaaaagaagtgcactttgtattttcaagattgccaggaaactgctgttcctattcagaatcaaagaggataatgagagatttgagaagttgtgtcgcagcatcctgagcagcatggatgctgagaatgagcctaaggtgtggtatgtgtccctggcttgttctaaggacctcaccctcctttggattcaacagatcaagaacattttgtggtactgctgtgattttctcaagcagctcaagcctgaaatcctgcaggactcccgactcatcaccctgtacctcacgatgcttgtcaccttcacagacacttcaacgtggaaaattcttcggggaaaaggtgaaagtcttcgaccagcgatgaaccacatttgtgcaaatataatgggacatctcaaccagcatggattttattctgtgctgcagtgctgtgatgggctgtttcctgatttggtttcatatgctcctcacaacaaccctgtgaggtggtccgttggcagaagctggtatgactggcagttgtctcgctagaggaaccttctacttcataccataattaaacggcttctaaaataatatgatgtctttaaattttaagtctggcattatttgtattagctgtttttttaactttattattaaagaatttctaaccataatatttagagaaagagtggtagagttaacctcgttacccaatactttcttccctttccttttataaaaacactgcatacggttttttgtttttttgtttttttgttttttttttaagagacagggttgccctgtcacccaggctggcctcaaggaatcttcctgcctcagcctcctgagctgggactgtaggtacaagccaccatgcctggctcacaatacagtttttttatctgaagcactcagtttacttttttgctcttttatgtacaaatgaatataaagttgatatcatcctctgaccaattaaaacattcttttcagatattgttaacccgtggcctggcaagaccccgtccttgtctatccaaaggcactttaacagcagctttttctctagcgttacggtgagtaagaaaccatagctga

SEQ ID NO: 95290 - protein, 218 aa, Artificial Sequence
  derived and/or modified sequence
  misc_feature (1)..(1): Xaa can be any naturally occurring amino acid
XLALLLARAGLRKPESQEAAPLSGPCGRRVITSRIVGGEDAELGRWPWQGSLRLWDSHVCGVSLLSHRWALTAAHCFETDLSDPSGWMVQFGQLTSMPSFWSLQAYYTRYFVSNIYLSPRYLGNSPYDIALVKLSAPVTYTKHIQPICLQASTFEFENRTDCWVTGWGYIKEDEGSSGRHHKQLYVQPPLPQVQFPQGHLWRHGLCWQCPRREGCLLR

SEQ ID NO: 95291 - DNA, 657 bp, Artificial Sequence
  derived and/or modified sequence
taacttgcactgctactggccagagccggactgaggaagcctgagtcacaggaggccgcccccctgagcggaccatgcgggaggagggtgatcacatctcgaattgtcgggggtgaggacgctgaactgggaagatggccttggcagggttcactgcgtctctgggacagtcacgtctgtggtgtgtctttgttaagtcatcggtgggctctcacagccgcccactgcttcgagaccgacttgagcgacccgtctggatggatggtgcagttcggacaactcaccagcatgccctctttttggagccttcaggcttactacactagatacttcgtgagtaatatctacctgagtcctagataccttggcaattccccttacgacattgcacttgtgaagttgagcgcgcccgtgacctacaccaaacacatccagcctatttgcctgcaggccagcaccttcgaatttgagaatcgaactgattgctgggtgaccggctggggatacatcaaggaagatgaaggaagctccggtaggcatcataagcagctctacgtgcagcccccactgcctcaggtgcagtttcctcagggccacctctggcgtcatggattgtgctggcagtgcccacgcagggagggctgtctgctgcgctag

SEQ ID NO: 95292 - DNA, 657 bp, Artificial Sequence
  derived and/or modified sequence
tgactggccctgctgctggcccgggccggcctgaggaagccagagagccaggaggccgcccccctgagcggcccctgtggccggcgggtcatcaccagcagaattgtgggcggagaagatgctgagctgggccgctggccctggcagggcagcctgcggctgtgggacagccacgtgtgtggggtgtccctgctgagccaccgctgggccctgacagctgcccactgctttgaaacagacctgagtgaccccagcggctggatggtgcagtttggccagctgacctccatgcccagcttctggagcctgcaggcctactacacccgctactttgtgagcaacatctacctgagcccccgctacctgggcaacagcccctatgacatcgccctggtgaagctgagcgcccctgtgacctacaccaagcacatccagcccatctgcctgcaggccagcacctttgaatttgaaaatagaacagactgctgggtgacaggctggggctacatcaaggaggatgagggcagcagcggccgccaccacaagcagctgtatgtgcagccccccctgccccaggtgcagttcccccagggccacctgtggaggcatggcctgtgctggcagtgcccccggcgggagggctgcctgctgaggtag

SEQ ID NO: 95293 - DNA, 657 bp, Artificial Sequence
  derived and/or modified sequence
tgactggccctgctgctggcccgggccggcctgcggaagcccgagtcacaggaggctgcaccattgtctggaccatgtgggaggagggtgattacctcaaggatcgtaggtggagaggatgcggagttaggacgctggccatggcagggctctctccggttgtgggattcccacgtttgcggagtcagcctactgagtcatagatgggccttaactgccgcgcactgtttcgagactgatctttcagacccttccggttggatggtgcaattcggacagctgacctctatgccttccttttggtctttgcaggcctactacacacggtacttcgtatccaacatttacttgtcaccacgctatctagggaactcaccctacgacatcgctctggtgaaactctcggctcccgtaacatatactaagcatatccagccaatctgcttacaagcatctacattcgagtttgagaaccggacagattgttgggtgaccgggtggggctacatcaaggaagacgaaggcagctccggacgccatcacaagcagctttatgtacaaccacccctgccccaagtgcagtttcctcaaggccatttgtggcggcacggactttgctggcagtgccctcgtcgggaagggtgtttgctgcgatag

SEQ ID NO: 95294 - DNA, 657 bp, Artificial Sequence
  derived and/or modified sequence
taattggctctcctgcttgccagggcaggtctgcgcaagcccgagagccaggaggctgcgccactgtccgggccttgcggcaggagagtcattaccagtagaattgtcgggggagaagatgccgaactgggccgttggccttggcaggggagtctgcgtctctgggattcccacgtgtgcggcgtgtcactcctgtcccataggtgggccctgacagccgcacattgctttgaaaccgacctgagtgatccaagcggctggatggtgcaattcggccagctcacgtcaatgccatcattttggagcctgcaggcatactacacaagatattttgtgtctaatatatacctgtccccccgatatctcggtaatagcccttacgacatagcattagtaaaactgtctgcccctgtgacctatacgaaacatatacagccaatctgtttgcaggcgtcaacattcgagttcgagaaccggaccgactgctgggtgactgggtggggctacatcaaagaggacgagggaagctccggacgacatcacaaacagctatatgtccaacctcctcttccccaggtccagttcccccagggacacctctggaggcacgggctgtgctggcagtgcccgagacgggagggttgccttctgcgatag

SEQ ID NO: 95295 - DNA, 657 bp, Artificial Sequence
  derived and/or modified sequence
tgactggccctgctgctggccagagccggcctgagaaagcccgagagccaggaggccgcccccctgagcggcccctgcggcagaagagtgatcaccagcagaatcgtgggcggcgaggacgccgagctgggcagatggccctggcagggcagcctgagactgtgggacagccacgtgtgcggcgtgagcctgctgagccacagatgggccctgaccgccgcccactgcttcgagaccgacctgagcgaccccagcggctggatggtgcagttcggccagctgaccagcatgcccagcttctggagcctgcaggcctactacaccagatacttcgtgagcaacatctacctgagccccagatacctgggcaacagcccctacgacatcgccctggtgaagctgagcgcccccgtgacctacaccaagcacatccagcccatctgcctgcaggccagcaccttcgagttcgagaacagaaccgactgctgggtgaccggctggggctacatcaaggaggacgagggcagcagcggcagacaccacaagcagctgtacgtgcagccccccctgccccaggtgcagttcccccagggccacctgtggagacacggcctgtgctggcagtgccccagaagagagggctgcctgctgagatag

SEQ ID NO: 95296 - DNA, 1008 bp, Artificial Sequence
  derived and/or modified sequence
atggccagcgccagcagcagcagagccggcgtggccctgcccttcgagaagagccagctgaccctgaaggtggtgagcgccaagcccaaggtgcacaacagacagcccagaatcaacagctacgtggaggtggccgtggacggcctgcccagcgagaccaagaagaccggcaagagaatcggcagcagcgagctgctgtggaacgagatcatcatcctgaacgtgaccgcccagagccacctggacctgaaggtgtggagctgccacaccctgagaaacgagctgctgggcaccgccagcgtgaacctgagcaacgtgctgaagaacaacggcggcaagatggagaacatgcagctgaccctgaacctgcagaccgagaacaagggcagcgtggtgagcggcggcgagctgaccatcttcctggacggccccaccgtggacctgggcaacgtgcccaacggcagcgccctgaccgacggcagccagctgcccagcagagacagcagcggcaccgccgtggcccccgagaacagacaccagccccccagcaccaactgcttcggcggcagaagcagaacccacagacacagcggcgccagcgccagaaccacccccgccaccggcgagcagagccccggcgccagaagcagacacagacagcccgtgaagaacagcggccacagcggcctggccaacggcaccgtgaacgacgagcccaccaccgccaccgaccccgaggagcccagcgtggtgggcgtgaccagcccccccgccgcccccctgagcgtgacccccaaccccaacaccaccagcctgcccgcccccgccacccccgccgagggcgaggagcccagcaccagcggcacccagcagctgcccgccgccgcccaggcccccgacgccctgcccgccggctgggagcagagagagctgcccaacggcagagtgtactacgtggaccacaacaccaagaccaccacctgggagagacccctgccccccggctag

SEQ ID NO: 95297 - DNA, 1008 bp, Artificial Sequence
  derived and/or modified sequence
atggcgagcgcaagctcgagtcgcgcaggcgttgctctgcccttcgagaagtcccagctaacccttaaggtcgtctcagccaaaccaaaggtgcacaatcggcagcctaggattaactcctatgtcgaagtagccgttgatggactcccatcggagacaaaaaaaaccgggaagcggattggcagtagcgaacttctgtggaacgagataattatcctgaatgtgaccgcccagtcacacttagacctgaaggtttggtcctgccacactttgcgaaacgaactgctcggaaccgcatctgtaaacctttctaacgtgttgaagaataacggaggcaagatggagaatatgcagctcacactgaacctgcaaaccgagaacaagggcagcgtcgtttcaggaggcgaactaacgatctttcttgatgggcccaccgtggaccttggtaatgtgcccaacggatctgctttgacagacggatctcagctcccctcgagagattcctcagggaccgctgtcgcccccgaaaacaggcatcagcctcctagtactaactgcttcgggggaagaagcagaacacaccggcattccggcgcctcagcccgcactacccctgccacgggcgagcagagtcctggggctcgctcccggcacaggcagcccgtcaagaattctggccactcaggcctcgcaaacgggaccgtgaatgatgaacctactacagctacagaccctgaggagccatctgtggtcggcgtgacctcaccacccgccgcccccctgtccgtgactcccaaccccaacaccacatcgctacctgctccagccacgcctgctgaaggcgaggaaccgtctactagcggcacccagcagctccccgcagctgctcaggctcccgatgctctgcccgcaggctgggaacagcgcgaactacccaacgggagggtgtactatgtggaccataacacaaagacgaccacctgggaaaggcctctgccacctgggtag

SEQ ID NO: 95298 - DNA, 1008 bp, Artificial Sequence
  derived and/or modified sequence
atggccagcgccagcagcagcagagctggggtggccctgccctttgagaagagccagctgaccctgaaggtggtgtctgccaagcccaaggtgcacaaccggcagccccgcatcaacagctatgtggaggtggccgtggatggcctgcccagcgagaccaagaagacaggcaagagaattggcagcagcgagctgctgtggaatgagatcatcatcctgaatgtgacagcccagagccacctggacctgaaggtgtggagctgccacaccctgagaaatgagctgctgggcacagcctctgtgaacctgagcaatgtgctgaagaacaacggcggcaagatggagaacatgcagctgaccctgaacctgcagacagagaacaagggctctgtggtgtctggaggagagctgaccatcttcctggatggccccaccgtggacctgggcaatgtgcccaatggaagtgccctgacagatggcagccagctgcccagccgggacagcagcggcacagctgtggcccctgagaacagacaccagccccccagcaccaactgctttggaggccgcagcaggacccaccgccacagcggggccagcgcccggaccaccccagccactggagagcagagccctggggcccggagccgccaccggcagcctgtgaagaacagcggccacagcggcctggccaacggcaccgtgaatgatgagcccaccacagccacagatcctgaggagcccagcgtggtgggcgtgaccagccccccagctgcccccctgtctgtgacccccaaccccaacaccaccagcctgcctgccccagccaccccagctgagggggaggagcccagcaccagcggcacccagcagctgcctgctgctgcccaggccccagatgccctgcctgctggctgggagcagcgggagctgcccaacggccgggtgtactacgtggaccacaacaccaagaccaccacctgggagcggcccctgcccccaggatag

SEQ ID NO: 95299 - DNA, 1008 bp, Artificial Sequence
  derived and/or modified sequence
atggccagcgccagcagcagccgggccggcgtggccctgcccttcgaaaagtcacagctcaccctgaaggtggtgtccgccaagccgaaggttcacaaccgccagccccggatcaattcgtatgtggaagtcgccgtggatgggctaccttctgagacaaaaaagactggaaaaaggattggcagctctgaattactgtggaacgaaatcatcattcttaacgtcacagcccagtcacacttggacctcaaggtgtggtcctgccacaccctacggaatgaattgcttgggaccgcgagtgtcaacctgagcaacgttctgaaaaataatggaggtaaaatggagaacatgcagttgactctcaatcttcagaccgagaataagggctccgtggttagcggaggggaactgactatttttcttgacggacccacagtggacctgggtaacgtccctaatggatctgcattgacagacggctcccaactgccctctagagattctagtgggacagctgtggcgcctgagaaccggcatcaacctccttctactaactgcttcggcggcaggtctagaacccatcgacactctggcgcgtcagccagaactactcccgctaccggagaacagtcccctggggctagatctcgccatcggcagcctgtaaaaaattctggccacagtgggctggcaaacgggacagtcaacgatgagcccaccaccgcgacagatcccgaggagccctcggtggtgggagtaacctccccccccgcagctcctctgagcgtcacccctaacccaaatactactagtctccccgccccagccacgccagctgaaggcgaggagcctagcacctctgggacccaacagctcccggcagccgcccaggcaccagacgccttgccagcggggtgggagcagcgtgagctgccaaacggcagggtctattacgtcgatcacaatacaaagaccaccacctgggaaaggcccctcccgccagggtag

SEQ ID NO: 95300 - DNA, 1008 bp, Artificial Sequence
  derived and/or modified sequence
atggcgagcgccagcagcagtcgcgcaggggtggccctgccctttgagaaatctcagctgacgctaaaggttgtttccgccaaacctaaggttcacaaccggcagcccagaattaacagttacgtcgaggtggcggtagatggattaccgagtgagaccaagaaaacaggcaaacggatcgggtcgagcgagttgctgtggaacgaaatcataatcttgaatgtcacagcccagtcgcatctggaccttaaggtttggtcctgccatactctccggaacgagctgcttgggactgcctccgtgaacctgagtaatgtacttaaaaacaacgggggaaagatggagaacatgcagctaacactgaacctccagactgaaaataaaggtagcgttgtctccggtggcgagcttaccatttttctggatggaccaaccgtcgatctagggaatgttccaaacgggtccgcattgacagacggatcccaattaccttctcgcgatagcagcggcacagccgttgcccctgaaaatcggcatcagccaccctcgaccaactgctttggcggtagatcgcgcacgcacaggcatagcggggcatctgcgaggaccacacctgccactggcgagcagagtccgggagcacggtctcggcacagacaacccgttaagaactccggccactctggcctggccaacggcaccgtgaacgatgagcccacaaccgcgactgatcccgaggaaccttccgttgttggagtcacctctcctcccgcagccccactgtccgtcacgcccaaccctaatacaaccagcctgcctgcccctgctacgcccgcagaaggtgaagagcctagcacatctggtacccagcagttaccagcagccgcacaggctcctgatgcactgcccgctggatgggagcagagggagcttcctaacggaagggtctactatgtggatcataacacaaaaaccacaacctgggagcggcctctaccccctggctag

SEQ ID NO: 95301 - DNA, 2474 bp, Artificial Sequence
  derived and/or modified sequence
agatgaaacagaaaggctaaagagggctggagtcaggggacttctcttccaccagcttcacggtgatgatatggcatctgccagctctagccgggcaggagtggccctgccttttgagaagtctcagctcactttgaaagtggtgtccgcaaagcccaaggtgcataatcgtcaacctcgaattaactcctacgtggaggtggcggtggatggactccccagtgagaccaagaagactgggaagcgcattgggagctctgagcttctctggaatgagatcatcattttgaatgtcacggcacagagtcatttagatttaaaggtctggagctgccataccttgagaaatgaactgctaggcaccgcatctgtcaacctctccaacgtcttgaagaacaatgggggcaaaatggagaacatgcagctgaccctgaacctgcagacggagaacaaaggcagcgttgtctcaggcggagagctgacaattttcctggacgggccaactgttgatctgggaaatgtgcctaatggcagtgccctgacagatggatcacagctgccttcgagagactccagtggaacagcagtagctccagagaaccggcaccagccccccagcacaaactgctttggtggaagatcccggacgcacagacattcgggtgcttcagccagaacaaccccagcaaccggcgagcaaagccccggtgctcggagccggcaccgccagcccgtcaagaactcaggccacagtggcttggccaatggcacagtgaatgatgaacccacaacagccactgatcccgaagaaccttccgttgttggtgtgacgtccccacctgctgcacccttgagtgtgaccccgaatcccaacacgacttctctccctgccccagccacaccggctgaaggagaggaacccagcacttcgggtacacagcagctcccagcggctgcccaggcccccgacgctctgcctgctggatgggaacagcgagagctgcccaacggacgtgtctattatgttgaccacaataccaagaccaccacctgggagcggccccttcctccagggtaggtcatcaactgagaagacctgagactctggaactgacaccatgagtcacccaatggcttcttgaaacggtccctttctgcggaggtagcatagcacagtgacgtttattccgggtcacttgattgcttttcctatccacttaccttaatattgctcccatgtcttaggacatattagaattattagaagatctctgggaaacaaaaggcgcatgggaggccaagatttagagtgttgatgcattccgccgtaccctatgcccagcctgtccctaaaggcagagtgcttcttattcggcagggcttcgtgagaatgccgccaagttatccaaaaccaaaggatgagagaggcttccaagagagggaagactgtccaagttcaaggagaaggggtttggttccctgtctgccagggacagaaagttctttccacatgtgtctcctggtcccgagagctttcaaaaggggatgtattctgctccaagaaagaatcacctcccagtaaagtagccatgaagggctcctgtataaaatatgcacacttcccctgccctgagtttgtggagggaaaggctgtcggaagtagggactcttaggagagcccgtgtgccctgtttggttcagctgtcaggcgtgtgccacacacatcccacctcatcttctggtcccataattctccatggatgggctgcttttagctccagttttccagtagaatgcttgagttttccttttttccgtacctcctggaggatgaaactcataacctgtcatcatcagtactcactgtgttttccactttgacttgaagtcaaatgaagttaccaaagttaaacatggacttctcaaattagaaaaaaacaaacaacaaaaaaacaggttaagtgttttgttatgaaaattatgaaaatgttcttattattatggaaaatttcaaatagatatagagagaataatgttacaaacccccacatactcaacatttagcttcaaaaattatcaactcatggcgggttttgtttcatctgtacaaactagtcggcacactatgatggcctgtggacaaaatccggccctctgactgtttttgtaaataaggttttattggaacacagccacacatatttgttgacttattgtttttggctgtttttgtacttcattggcagagttgagtaattgcagcagactctatggcttgcaaaacctaaaataattactttgtgtagcgctttatagaaaaaatttgctaactcccgatctgtaacccccaacctatccgccgcaccctgatctaggtaattttgaagcaaatcccaaatgtcacatcatctatccatatttcactatgtatttctaaaacatattcttttattcaaaataaaactctaatatca

SEQ ID NO: 95302 - DNA, 1185 bp, Artificial Sequence
  derived and/or modified sequence
atgggaaaagaaatccctaccgacgccccgtgggaagctcagcacgcggacaagtgggataaaatgaccatgaaagaactcatagacaagatctgctggactaaaacggcgcgacgattcgcatatctgttcgttaatataaatgtaacaagcgaaccacatgaggtttctgctttatggttcttatggtatgtcaagcaatgcgggggcaccacccggatcttctccgtaaccaatggcgggcaggagcgaaaattcgtgggtggatcaggtcaggtgtctgaaaggattatggaccttttgggagatcaggtcaaacttaaccatcccgtaactcacgtagaccagtcctccgataatatcatcatcgagacactcaaccacgagcattatgaatgcaagtacgtaattaatgccataccacccacactaaccgcgaagatacatttccggcctgagctgccagccgagcggaaccagctgatacagcgtctcccaatgggagccgtaataaaatgtatgatgtattacaaagaggctttttggaaaaagaaggattactgcggttgtatgatcattgaagatgaggatgcccctatctcaatcacacttgacgatacaaaacctgatggatccctccctgccatcatgggcttcattctggcgaggaaagccgaccggttggcgaagctccataaggaaatccgtaagaaaaagatctgtgaattgtatgctaaagtactgggctcccaagaagccctccatcccgtccactatgaggagaagaattggtgcgaagaacagtacagcggagggtgctatacggcctactttccaccagggattatgactcagtatggccgggtcataaggcaacccgttgggcgaatcttctttgcaggtactgagaccgccaccaagtggtcaggatacatggaaggagcagttgaagctggcgaacgcgcagccagggaagtgctcaacgggctcggtaaggtgaccgagaaggacatctgggtacaggagccggagtctaaggatgtaccggctgtggaaataactcacaccttctgggaacggaacctaccatctgtgagcgggctgttgaagataataggtttcagtacatctgttacagccctgggattcgttctctacaaatataaactgctgccacgctcctag

SEQ ID NO: 95303 - DNA, 1185 bp, Artificial Sequence
  derived and/or modified sequence
atgggcaaggagatccccacagatgccccctgggaggcccagcacgccgacaagtgggacaagatgaccatgaaggagctgattgacaagatctgctggaccaagacagccaggagatttgcctacctgtttgtgaacatcaacgtgaccagcgagccccatgaggtgtctgccctgtggttcctgtggtacgtgaagcagtgtggcggcaccacccgcatcttctctgtgaccaatggaggccaggagaggaagtttgtgggcggcagcggccaggtgtctgagcgcatcatggacctgctgggggaccaggtgaagctgaaccaccctgtgacccacgtggaccagagcagtgacaacatcatcatcgagaccctgaaccacgagcactatgagtgcaagtatgtgatcaatgccatcccccccaccctgacagccaagatccacttccggcctgagctgcctgctgagaggaaccagctgatccagaggctgcccatgggcgctgtgatcaagtgcatgatgtactacaaggaggccttctggaagaagaaggactactgcggctgcatgatcattgaagatgaagatgcccccatcagcatcaccctggatgacaccaagccagatggcagcctgcctgccatcatgggcttcatcctggccaggaaggctgaccggctggccaagctgcacaaggagatcaggaagaagaagatctgtgagctgtatgccaaggtgctgggcagccaggaggccctgcaccctgtgcactatgaggagaagaactggtgtgaggagcagtacagcggcggctgctacacagcctacttccccccaggcatcatgacccagtatggccgggtcatccggcagcctgtgggccgcatcttctttgctggaacagaaacagccaccaagtggagcggctacatggagggcgctgtggaggccggggagcgggccgcccgggaggtgctgaatggcctgggcaaggtgacagagaaggacatctgggtgcaggagcctgagagcaaggatgtgcctgctgtggagatcacccacaccttctgggagaggaacctgcccagcgtgtctggcctgctgaagatcatcggcttcagcacctctgtgacagccctgggctttgtgctgtacaagtacaagctgctgcccaggagctag

SEQ ID NO: 95304 - DNA, 1185 bp, Artificial Sequence
  derived and/or modified sequence
atgggcaaggagatccccaccgacgccccctgggaggcccagcacgcagataagtgggacaaaatgactatgaaagagctgatcgataagatatgctggacaaaaacagccaggcgctttgcttatctttttgttaatatcaacgtgacctccgagccccacgaggtatcagcactttggtttctctggtacgtgaagcagtgcggagggacaacaaggatctttagtgtgacgaacggcggtcaagaaagaaagttcgtgggcggcagcggccaagtatctgagcgcataatggacttgctgggagatcaggtgaaacttaaccaccccgtgacacacgtggatcaatccagtgacaacatcatcatcgaaacccttaatcacgagcactacgagtgcaagtacgttataaacgcgatcccaccaaccctcactgccaagatccactttcgaccagaactccctgccgaaagaaaccagctcattcaaagactgcccatgggggcggtgattaagtgcatgatgtactacaaagaagcattctggaaaaagaaagattactgtggctgtatgataatcgaagacgaagatgctcctatcagcatcaccctggacgacacaaaaccagatggatccttgccggcgattatgggctttattctggcacgcaaggccgacaggctcgccaagctgcacaaggagattcgcaagaagaagatatgcgaattgtacgccaaggtactcggatcacaggaggctctgcatcccgtacactacgaggagaagaattggtgcgaagagcagtacagcggcggctgctacactgcatacttccctcccggaatcatgacccaatacggccgggtaatacggcagccagtcgggaggattttcttcgctggaacagagacagctactaagtggtccgggtacatggagggagccgttgaagccggtgaacgggcagcgcgcgaggtcctcaacggcctggggaaggttaccgagaaggacatctgggtgcaagagcccgagtccaaggatgtccctgctgttgaaatcacccacaccttttgggaaagaaacctgccctcagtctccggactgctgaagatcatcggtttcagcacctctgtgaccgctctcggcttcgtgctgtacaaatataagctgctgcctaggagctag

SEQ ID NO: 95305 - DNA, 1185 bp, Artificial Sequence
  derived and/or modified sequence
atgggtaaggaaatccccactgacgcaccttgggaagcccagcacgcagataagtgggataagatgacaatgaaggaacttattgacaagatctgttggactaaaactgctcgaaggtttgcctacctgttcgtgaatatcaacgtaaccagtgaaccacacgaagttagcgccctgtggttcttgtggtatgtgaaacagtgcggaggtacaactagaatttttagcgtgaccaatggtggacaggaacgtaagtttgtcggaggatcagggcaagtgtctgaaagaataatggatctgcttggggatcaggttaagctgaaccacccggtcacacacgtggaccaatctagtgacaacatcatcatcgagactctgaatcatgagcactacgagtgtaagtatgtcattaacgcgattcctcccacgctgaccgctaaaatacattttaggcctgagctgccggcagagagaaaccaattaattcagcgactgccaatgggggcagtaattaagtgcatgatgtactataaggaggcattctggaaaaagaaagattattgcggatgcatgataattgaagacgaggacgctcccattagcataactttggatgatacaaaacctgacggtagtctccccgcaataatggggttcattctggcccgaaaagctgacaggctggccaagttacataaagagatccgtaaaaaaaagatctgcgagctgtatgcaaaggttctcggctcgcaagaagccttacacccagtgcattacgaagagaagaattggtgcgaagagcaatacagtgggggatgttataccgcctacttccccccaggaatcatgacccaatacggacgagtgattcgccagcccgtcggcaggatattcttcgcgggaaccgaaactgccaccaagtggtctggttacatggagggagcagtggaggctggcgagcgcgcagcccgtgaggtgctgaacggactgggcaaggtaactgaaaaggacatctgggtccaagaacctgaaagcaaagacgtccctgcagttgagattacccatactttttgggagagaaacttgccatcagtctccggtcttctcaaaatcattgggtttagcaccagcgtgacagccttaggctttgtactgtacaaatacaagctgctgccacgaagctag

SEQ ID NO: 95306 - DNA, 1185 bp, Artificial Sequence
  derived and/or modified sequence
atgggcaaggagatccccaccgacgccccctgggaggcccagcacgccgacaagtgggacaagatgaccatgaaggagctgatcgacaagatctgctggaccaagaccgccagaagattcgcctacctgttcgtgaacatcaacgtgaccagcgagccccacgaggtgagcgccctgtggttcctgtggtacgtgaagcagtgcggcggcaccaccagaatcttcagcgtgaccaacggcggccaggagagaaagttcgtgggcggcagcggccaggtgagcgagagaatcatggacctgctgggcgaccaggtgaagctgaaccaccccgtgacccacgtggaccagagcagcgacaacatcatcatcgagaccctgaaccacgagcactacgagtgcaagtacgtgatcaacgccatcccccccaccctgaccgccaagatccacttcagacccgagctgcccgccgagagaaaccagctgatccagagactgcccatgggcgccgtgatcaagtgcatgatgtactacaaggaggccttctggaagaagaaggactactgcggctgcatgatcatcgaggacgaggacgcccccatcagcatcaccctggacgacaccaagcccgacggcagcctgcccgccatcatgggcttcatcctggccagaaaggccgacagactggccaagctgcacaaggagatcagaaagaagaagatctgcgagctgtacgccaaggtgctgggcagccaggaggccctgcaccccgtgcactacgaggagaagaactggtgcgaggagcagtacagcggcggctgctacaccgcctacttcccccccggcatcatgacccagtacggcagagtgatcagacagcccgtgggcagaatcttcttcgccggcaccgagaccgccaccaagtggagcggctacatggagggcgccgtggaggccggcgagagagccgccagagaggtgctgaacggcctgggcaaggtgaccgagaaggacatctgggtgcaggagcccgagagcaaggacgtgcccgccgtggagatcacccacaccttctgggagagaaacctgcccagcgtgagcggcctgctgaagatcatcggcttcagcaccagcgtgaccgccctgggcttcgtgctgtacaagtacaagctgctgcccagaagctag

SEQ ID NO: 95307 - protein, 198 aa, Artificial Sequence
  derived and/or modified sequence
MTLRCLEPSGNGGEGTRSQWGTAGSAEEPSPQAARLAKALRELGQTGWYWGSMTVNEAKEKLKEAPEGTFLIRDSSHSDYLLTISVKTSAGPTNLRIEYQDGKFRLDSIICVKSKLKQFDSVVHLIDYYVQMCKDKRTGPEAPRNGTVHLYLTKPLYTSAPSLQHLCRLTINKCTGAIWGLPLPTRLKDYLEEYKFQV

SEQ ID NO: 95308 - protein, 146 aa, Artificial Sequence
  derived and/or modified sequence
MTVNEAKEKLKEAPEGTFLIRDSSHSDYLLTISVKTSAGPTNLRIEYQDGKFRLDSIICVKSKLKQFDSVVHLIDYYVQMCKDKRTGPEAPRNGTVHLYLTKPLYTSAPSLQHLCRLTINKCTGAIWGLPLPTRLKDYLEEYKFQV

SEQ ID NO: 95309 - DNA, 597 bp, Artificial Sequence
  derived and/or modified sequence
atgaccctgagatgcctggagcccagcggcaacggcggcgagggcaccagaagccagtggggcaccgccggcagcgccgaggagcccagcccccaggccgccagactggccaaggccctgagagagctgggccagaccggctggtactggggcagcatgaccgtgaacgaggccaaggagaagctgaaggaggcccccgagggcaccttcctgatcagagacagcagccacagcgactacctgctgaccatcagcgtgaagaccagcgccggccccaccaacctgagaatcgagtaccaggacggcaagttcagactggacagcatcatctgcgtgaagagcaagctgaagcagttcgacagcgtggtgcacctgatcgactactacgtgcagatgtgcaaggacaagagaaccggccccgaggcccccagaaacggcaccgtgcacctgtacctgaccaagcccctgtacaccagcgcccccagcctgcagcacctgtgcagactgaccatcaacaagtgcaccggcgccatctggggcctgcccctgcccaccagactgaaggactacctggaggagtacaagttccaggtgtag

SEQ ID NO: 95310 - DNA, 441 bp, Artificial Sequence
  derived and/or modified sequence
atgaccgtgaacgaggccaaggagaagctgaaggaggcccccgagggcaccttcctgatcagagacagcagccacagcgactacctgctgaccatcagcgtgaagaccagcgccggccccaccaacctgagaatcgagtaccaggacggcaagttcagactggacagcatcatctgcgtgaagagcaagctgaagcagttcgacagcgtggtgcacctgatcgactactacgtgcagatgtgcaaggacaagagaaccggccccgaggcccccagaaacggcaccgtgcacctgtacctgaccaagcccctgtacaccagcgcccccagcctgcagcacctgtgcagactgaccatcaacaagtgcaccggcgccatctggggcctgcccctgcccaccagactgaaggactacctggaggagtacaagttccaggtgtag

SEQ ID NO: 95311 - DNA, 432 bp, Artificial Sequence
  derived and/or modified sequence
atgaccctgagatgcctggagcccagcggcaacggcggcgagggcaccagaagccagtggggcaccgccggcagcgccgaggagcccagcccccaggccgccagactggccaaggccctgagagagctgggccagaccggctggtactggggcagcatgaccgtgaacgaggccaaggagaagctgaaggaggcccccgagggcaccttcctgatcagagacagcagccacagcgactacctgctgaccatcagcgtgaagaccagcgccggccccaccaacctgagaatcgagtaccaggacggcaagttcagactggacagcatcatctgcgtgaagagcaagctgaagcagttcgacagcgtggtgcacctgatcgactactacgtgcagatgtgcaaggacaagagaaccggccccgaggccccctag

SEQ ID NO: 95312 - DNA, 486 bp, Artificial Sequence
  derived and/or modified sequence
atgaccctgagatgcctggagcccagcggcaacggcggcgagggcaccagaagccagtggggcaccgccggcagcgccgaggagcccagcccccaggccgccagactggccaaggccctgagagagctgggccagaccggctggtactggggcagcatgaccgtgaacgaggccaaggagaagctgaaggaggcccccgagggcaccttcctgatcagagacagcagccacagcgactacctgctgaccatcagcgtgaagaccagcgccggccccaccaacctgagaatcgagtaccaggacggcaagttcagactggacagcatcatctgcgtgaagagcaagctgaagcagttcgacagcgtggtgcacctgatcgactactacgtgcagatgtgcaaggacaagagaaccggccccgaggcccccagaaacggcaccgtgcacctgtacctgaccaagcccctgtacaccagcgccccctag

SEQ ID NO: 95313 - DNA, 597 bp, Artificial Sequence
  derived and/or modified sequence
atgactctacgatgtctggagcccagcggaaatgggggcgagggcacacgctcccagtggggcactgctggaagcgcggaggaaccttccccccaggcggccagacttgccaaagccctccgggagctcggacagaccggctggtattggggaagtatgaccgtcaatgaggcaaaggagaaactgaaggaggctcctgaaggcactttcctgatccgggattctagccattccgattatctgctgacaatctccgtgaagaccagtgccggcccaaccaatttacgtatcgaataccaagacggcaaatttcgtctcgactcaatcatctgtgtcaagagcaagctcaaacagtttgactctgttgttcacttaatcgactattacgtacagatgtgcaaagataaacggacaggaccggaggcccctcgaaacgggaccgtgcatctatacttaacaaaacctctgtacacctctgcccctagtctccaacacctgtgtagactgacgataaacaaatgtacgggggccatttggggactcccactgcccacccgtctcaaagattacctcgaagagtataagttccaggtctag

SEQ ID NO: 95314 - DNA, 597 bp, Artificial Sequence
  derived and/or modified sequence
atgacactgcgttgcctcgagcccagtggcaatggcggggagggtacccgatcccagtggggtaccgccggctcagcagaagagccttctccccaggccgcgagacttgctaaggctctccgagagctgggtcagacaggctggtactggggttcaatgacagttaacgaggctaaagagaagttaaaagaagctcctgagggaacgtttttaatcagagacagttcacactcggattatctgttaacgattagcgtgaagacttctgccggaccaacaaatctgagaatcgagtaccaagatgggaagttccgtcttgatagtattatttgtgtgaaatccaagctgaagcagtttgactccgtggttcatctgattgactactatgtgcagatgtgcaaggacaagcgaacaggccccgaagccccccgtaatggtacggtccacttgtatttgaccaagccactctatacctccgctccatcattacagcacctgtgtcggctcacgatcaataagtgcacgggggctatttggggccttccattgcctactcgactgaaagactacctcgaagagtacaagtttcaggtctag

SEQ ID NO: 95315 - DNA, 441 bp, Artificial Sequence
  derived and/or modified sequence
atgactgtcaatgaggccaaggaaaagcttaaagaggcacctgaaggtacgttcctgatccgagattcttctcatagtgattacctgttaaccatttccgtcaagacaagcgctggacctacaaatctccgcattgagtaccaggacggaaaattccgactcgacagcatcatctgtgtcaaatccaaattaaagcagtttgactcagtcgttcatttaattgactattacgtccaaatgtgtaaagacaagagaaccggacccgaggcaccacgaaacgggaccgtgcatttgtatctgacaaaacctttatatacatctgcaccctcactgcagcacttatgtcgcctgaccatcaacaaatgtaccggagccatctgggggctgccactgcccacccgattaaaagactacttagaggagtataaattccaagtgtag

SEQ ID NO: 95316 - DNA, 432 bp, Artificial Sequence
  derived and/or modified sequence
atgacgctgcgttgtctggagccgtctggaaacggcggcgagggcacacgctcccaatggggcactgccgggagcgccgaagaaccttccccccaggcagctcgcttagctaaagcactgagggagctgggccaaaccggctggtattggggctcgatgaccgtaaatgaggcaaaggagaagcttaaggaagccccggagggaacgtttctgatccgggactcgtcccacagcgactatctgttaacaatttccgtcaagacatccgcaggaccaactaatctccgtattgagtaccaggacgggaaattccgactggacagcattatctgtgtcaagagtaaacttaagcagtttgactctgtggtccacctcattgactactacgttcaaatgtgcaaagataaaaggacggggcccgaggccccgtag

SEQ ID NO: 95317 - DNA, 597 bp, Artificial Sequence
  derived and/or modified sequence
atgaccctgcgatgcctggagccatctggaaatggaggggaggggacccggagccaatgggggaccgccggttccgccgaggagccgagtccccaggccgcccgacttgctaaggctctgcgtgaactggggcagaccgggtggtattggggatccatgactgtgaacgaagctaaagaaaaactgaaagaggccccagagggaacattcctgattcgggacagcagtcatagcgactacctgctcacaatctccgtcaaaacgtctgcaggtcccacaaatcttagaatagagtatcaagatggcaaattcagactcgatagcatcatctgcgttaaaagcaagctgaaacagtttgactccgtggtccacctgattgactactacgtgcagatgtgcaaagacaagcgcacaggtcccgaagccccaaggaatggaaccgtgcatctctatctgacaaaacctctgtatacctctgcaccaagtctccagcacctctgtcgcctgaccattaacaagtgcactggtgccatatggggcctgcccctgccgacccggttgaaagattatctcgaagaatacaagttccaggtatag

SEQ ID NO: 95318 - DNA, 597 bp, Artificial Sequence
  derived and/or modified sequence
atgacactccgctgcctcgaaccttctgggaatgggggcgaaggcactagaagtcagtggggcacggcaggatcagccgaagagccttcaccacaggccgccagactggcaaaggccctgcgtgagctaggccagactgggtggtattggggatctatgactgtgaatgaggccaaggaaaagctgaaggaagcccccgaggggaccttcttgattagggacagctcccattccgactacctcctgaccatctctgttaaaacaagcgcagggccaaccaacctgagaatcgagtaccaggatggcaagttccgtttagactcgatcatatgtgtgaaatccaagcttaagcagtttgattctgtcgtccatttgatcgattattacgtccagatgtgcaaggataagcgaaccggacccgaggccccccgcaatggtacggttcacctttatcttacaaaacctctgtacacttctgccccatccttacaacacctgtgtaggctgacgattaataaatgcaccggagcgatttggggtcttcccctccccacaaggctcaaagactacttagaagagtataagtttcaggtatag

SEQ ID NO: 95319 - DNA, 486 bp, Artificial Sequence
  derived and/or modified sequence
atgacattacggtgcctggagcctagcgggaatgggggcgaaggtacccgtagtcagtgggggacggctggatcggccgaggaacccagtccccaggccgcacgcctggccaaggcattgagggaattgggccagactgggtggtattggggaagcatgacggtaaacgaagcgaaagagaagttaaaagaggcccccgaagggacattcctcatccgagatagttcgcactctgattatcttctgactattagcgtgaaaacttcagccgggcctaccaatctgaggatagaatatcaagacggcaaattccggctggactctatcatctgcgtgaaatccaagcttaaacagtttgactctgttgttcatcttatcgattactacgtgcagatgtgcaaggacaaaagaacaggtcccgaggccccgagaaatggaaccgtacatctgtaccttacaaaacccctatacactagcgccccatag

SEQ ID NO: 95320 - DNA, 597 bp, Artificial Sequence
  derived and/or modified sequence
atgacgctgaggtgtttagaacctagtggtaacggaggcgaaggcacccgctcccaatgggggacagcgggaagtgccgaggaaccatcgccacaggccgcccggcttgctaaggctttacgtgagttagggcagactgggtggtattggggtagcatgacggttaacgaggccaaggagaagcttaaagaagccccagagggtaccttccttatccgtgatagttcacactctgattacctacttacaatttctgtgaaaacaagcgcagggcctaccaacctacgtatcgaataccaagacgggaagttcagattggactctattatatgcgtgaagtctaagctgaagcaatttgattcagttgtgcacctgatcgattattacgtgcagatgtgcaaggataagcgtactggcccagaggcgcccaggaatgggacagtgcatctgtatctgaccaagccgctgtatacttccgctccatctctccagcacctgtgccggctgaccattaataaatgtacaggtgcaatttggggccttcccctcccaactaggcttaaagactatctggaagagtacaagtttcaggtgtag

SEQ ID NO: 95321 - DNA, 597 bp, Artificial Sequence
  derived and/or modified sequence
atgaccctgcgctgcctggagcccagcggaaatggaggagagggcaccaggagccagtggggcacagctggcagcgctgaggagcccagcccccaggccgcccggctggccaaggccctgcgggagctgggccagacaggctggtactggggctccatgacagtgaatgaggccaaggagaagctgaaggaggcccctgagggcaccttcctgatccgggacagcagccacagcgactacctgctgaccatctctgtgaagaccagcgctggccccaccaacctgagaattgagtaccaggacggcaagttccggctggacagcatcatctgtgtgaagagcaagctgaagcagtttgattctgtggtgcacctgattgactactacgtgcagatgtgcaaggacaagaggacaggccctgaggcccccagaaatggaacagtgcacctgtacctgaccaagcccctgtacaccagcgcccccagcctgcagcacctgtgccgcctgaccatcaacaagtgcacaggagccatctggggcctgcccctgcccacccggctgaaggactacctggaggagtacaagttccaggtgtag

SEQ ID NO: 95322 - DNA, 441 bp, Artificial Sequence
  derived and/or modified sequence
atgacagtgaatgaggccaaggagaagctgaaggaggcccctgagggcaccttcctgatccgggacagcagccacagcgactacctgctgaccatctctgtgaagaccagcgctggccccaccaacctgagaattgagtaccaggacggcaagttccggctggacagcatcatctgtgtgaagagcaagctgaagcagtttgattctgtggtgcacctgattgactactacgtgcagatgtgcaaggacaagaggacaggccctgaggcccccagaaatggaacagtgcacctgtacctgaccaagcccctgtacaccagcgcccccagcctgcagcacctgtgccgcctgaccatcaacaagtgcacaggagccatctggggcctgcccctgcccacccggctgaaggactacctggaggagtacaagttccaggtgtag

SEQ ID NO: 95323 - DNA, 432 bp, Artificial Sequence
  derived and/or modified sequence
atgaccctgcgctgcctggagcccagcggaaatggaggagagggcaccaggagccagtggggcacagctggcagcgctgaggagcccagcccccaggccgcccggctggccaaggccctgcgggagctgggccagacaggctggtactggggctccatgacagtgaatgaggccaaggagaagctgaaggaggcccctgagggcaccttcctgatccgggacagcagccacagcgactacctgctgaccatctctgtgaagaccagcgctggccccaccaacctgagaattgagtaccaggacggcaagttccggctggacagcatcatctgtgtgaagagcaagctgaagcagtttgattctgtggtgcacctgattgactactacgtgcagatgtgcaaggacaagaggacaggccctgaggccccctag

SEQ ID NO: 95324 - DNA, 486 bp, Artificial Sequence
  derived and/or modified sequence
atgaccctgcgctgcctggagcccagcggaaatggaggagagggcaccaggagccagtggggcacagctggcagcgctgaggagcccagcccccaggccgcccggctggccaaggccctgcgggagctgggccagacaggctggtactggggctccatgacagtgaatgaggccaaggagaagctgaaggaggcccctgagggcaccttcctgatccgggacagcagccacagcgactacctgctgaccatctctgtgaagaccagcgctggccccaccaacctgagaattgagtaccaggacggcaagttccggctggacagcatcatctgtgtgaagagcaagctgaagcagtttgattctgtggtgcacctgattgactactacgtgcagatgtgcaaggacaagaggacaggccctgaggcccccagaaatggaacagtgcacctgtacctgaccaagcccctgtacaccagcgccccctag

SEQ ID NO: 95325 - DNA, 597 bp, Artificial Sequence
  derived and/or modified sequence
atgaccctgcggtgcctggagcccagcggcaacggcggcgagggcaccagatcgcagtggggcactgctggcagcgccgaggaaccctcccctcaggcagcgagactggcaaaggcattgcgcgagctcgggcaaacaggctggtactggggctcaatgacagtcaacgaggctaaagagaagctcaaggaagccccagaggggacctttttgatcagggactcctcacattctgattacctgttgactataagtgtgaagacatctgcaggcccgacaaacctgcgcatcgagtatcaagatggcaagtttagactcgattctattatttgtgtaaagtccaaactgaagcagttcgatagcgtggtccacctgattgactactacgtccaaatgtgcaaggataagcggactggccccgaggcaccacgcaatggcaccgtccatctttacctgaccaagcctctctatacttctgcgccatcactgcagcatctttgccgcctcacaataaataaatgcacaggagccatatggggactgcccctgcccacccggctgaaggattatcttgaagagtataagttccaggtgtag

SEQ ID NO: 95326 - DNA, 597 bp, Artificial Sequence
  derived and/or modified sequence
atgaccctgcggtgcctggagcccagcggcaacggcggcgagggcaccagatctcagtggggcactgccggttctgctgaggagccgtctccccaggctgccaggctcgcaaaggctctgcgagagttgggccaaacaggatggtattgggggtccatgacagtcaatgaagcaaaggagaaactgaaagaggcccctgagggaacttttcttatacgggattcttctcacagcgattacctcttgacaatttccgtgaagacttcagcaggtccaactaacctgcgaatcgaatatcaggatggtaagtttagactcgattctatcatttgcgtgaagtctaaactcaaacagttcgatagcgtggtgcatctaatcgattattacgtacaaatgtgcaaagataaaaggacaggcccagaggcccctaggaatggcactgttcacctgtacctcacaaagcccctgtacacctccgccccctccctccagcacctgtgccgcctgaccatcaataagtgtaccggtgccatctggggtctccccctgcctaccagattaaaggattatctcgaagagtacaaattccaagtgtag

SEQ ID NO: 95327 - DNA, 441 bp, Artificial Sequence
  derived and/or modified sequence
atgaccgtgaacgaggccaaggagaagctgaaggaggcccccgagggaacttttcttatacgcgactcgagccactctgactatctccttaccatctctgtgaagacatccgccggtccgactaatctgcggatcgagtatcaggacggaaagtttaggttagatagtattatttgtgtcaaatctaaactgaagcagttcgactccgtggtgcacttgatcgattattacgtgcagatgtgtaaggataagaggaccggtccagaagctccgagaaacgggactgtccacttgtatctgactaaacctttgtacacctctgctccaagcctccagcacctctgccgcctgactatcaacaaatgcaccggagccatctggggtctcccacttcctacacgtcttaaagactacctggaagaatataaatttcaggtgtag

SEQ ID NO: 95328 - DNA, 432 bp, Artificial Sequence
  derived and/or modified sequence
atgaccctgcggtgcctggagcccagcggcaacggcggcgagggcactcgttctcagtggggcacagcagggagcgccgaggagccatccccccaggcagccagactcgctaaagcgcttagagagctcgggcagaccggctggtattggggctcaatgactgtgaatgaggctaaggagaagttgaaggaggccccggagggtaccttcctgatccgggattcgtcccatagtgactaccttctcacaatctccgttaagaccagcgcagggcccactaatttgagaattgaataccaggatggcaaatttcgtctggactctatcatctgtgtgaaatccaagttaaaacagtttgatagcgtggtacacctcattgactactatgtgcagatgtgcaaagacaaaagaaccgggcccgaagccccctag

SEQ ID NO: 95329 - DNA, 597 bp, Artificial Sequence
  derived and/or modified sequence
atgaccctgcggtgcctggagcccagcggcaacggcggcgagggcaccaggtctcaatggggaacagcaggctctgccgaggaaccctccccccaggccgcccgcttggccaaagcattaagagaactgggccaaacaggatggtattggggaagtatgaccgtgaacgaggccaaggaaaagcttaaagaggcacccgagggtaccttcttgatacgggattcctcccactcagattacttactgacaatatcagtcaaaactagcgcaggacctaccaacctcaggattgagtatcaggacggcaaattcaggttggatagcatcatatgtgtgaagtccaagcttaagcaattcgacagcgtggtacacttgattgactattacgttcagatgtgtaaagacaagcggacggggcccgaggccccccggaacggcacagtgcacttatatctcacaaagcctctttacacctctgctccatctcttcagcacctttgtagacttacaatcaataagtgtacgggggccatctggggtctgcctctgcccaccaggttaaaggactatctcgaggagtacaaattccaagtctag

SEQ ID NO: 95330 - DNA, 597 bp, Artificial Sequence
  derived and/or modified sequence
atgaccctgcggtgcctggagcccagcggcaacggcggcgagggcacacgatcacagtggggcactgctgggtctgcagaagagccaagcccccaggccgccagactcgctaaggctttgcgggagctggggcagacggggtggtactggggatctatgaccgtcaacgaagcgaaggaaaaactgaaagaagcgcccgagggaacgttcctaattcgcgactctagccatagtgattatttgctgacaatttctgtgaagacttccgcaggcccgaccaacctccgcattgagtaccaggacggtaagtttcggctggactccatcatttgtgtgaaatctaaattgaagcaattcgatagtgtggtccacttgattgattactatgtacagatgtgcaaagataagcggactggccccgaggccccacggaacgggacagtgcacttgtacctcactaagcctctgtacacctctgctccatccctccaacacttgtgccgattgacgattaataagtgtactggagctatatggggactgcctctgcctactcgcctaaaggattacctcgaggaatataaattccaggtgtag

SEQ ID NO: 95331 - DNA, 486 bp, Artificial Sequence
  derived and/or modified sequence
atgaccctgcggtgcctggagcccagcggcaacggcggcgagggcaccaggtcacagtgggggactgctgggtcagctgaggagccgtctccacaagctgcccgtctggctaaagcactgcgggagctggggcagacaggatggtactggggatccatgaccgtcaacgaagccaaggaaaagctgaaggaggcccccgagggcacgttcctgattcgcgactcaagccattcagactacttgctgaccatctccgtgaagacgtccgctggcccaactaatctgcgcatagagtaccaggatgggaaattccgcctcgatagcatcatatgcgtgaagagtaagctgaagcagtttgatagcgtcgtccacttgatcgattattacgtccagatgtgcaaagacaagcgtactgggcccgaggctccgaggaacggtaccgttcacttgtacctaacaaagcccctatacactagcgcaccatag

SEQ ID NO: 95332 - DNA, 597 bp, Artificial Sequence
  derived and/or modified sequence
atgaccctgcggtgcctggagcccagcggcaacggcggcgagggcacccggtctcaatgggggactgcaggcagcgcagaggagccttctccacaggcagcacgactcgcaaaggccctacgtgagctcggacagacaggctggtactgggggagcatgacagtcaatgaggctaaagagaaactcaaagaagccccagaaggaacattccttatacgtgattccagccacagtgattatctgctgaccattagtgtgaagacaagcgccggaccaaccaacctacggatagagtaccaagacggaaaattcagacttgactcgataatctgcgttaagagcaagcttaagcaatttgattccgtggttcatcttatcgattattatgtacagatgtgtaaagataagagaactggccctgaggctcctcggaatggtacggtccatctgtacctgactaaaccgctgtataccagcgcaccttctctacagcacctgtgccgcctgacaatcaacaaatgtactggcgctatttggggcctgccactgcccacacggctgaaggactatctcgaagagtataaattccaggtgtag

SEQ ID NO: 95333 - DNA, 597 bp, Artificial Sequence
  derived and/or modified sequence
atgacactgaggtgtctcgagccatctgggaacggtggggaggggacccgtagtcagtggggtacagcaggcagcgcagaagagccttctccccaggcggcacgccttgcgaaagcactgagggaattaggtcagaccggatggtattggggatccatgacagtcaatgaggctaaggaaaagttgaaggaagcccctgaaggaacgtttttaatccgagacagtagtcacagcgactacttgctgacaatttccgtcaaaacttccgccggaccaacgaatctgcggatcgagtatcaagacggcaaattccggcttgatagcatcatttgcgtcaagagcaagctgaaacagtttgactccgtggtgcacctgatcgattactacgtccagatgtgtaaagacaaaagaactggacctgaagctccgaggaacggcaccgttcatctttacctgactaaaccactgtataccagtgcgccatccctgcagcacctctgcagattgactattaataagtgtacaggcgcaatctggggtttgccgctgccaacacgtctgaaggactatcttgaggagtataaattccaggtatag

SEQ ID NO: 95334 - DNA, 597 bp, Artificial Sequence
  derived and/or modified sequence
atgactcttagatgcttggaaccctccggtaatggcggagaggggacccgcagccagtggggaacagcgggatctgctgaagagccttcgcctcaggccgctagactcgcaaaagcccttagggagctcgggcagaccggctggtactgggggagcatgaccgttaacgaagccaaggagaagctcaaagaagcgccagaggggactttccttatccgcgatagtagtcacagtgactaccttctgaccatctccgtgaagaccagtgcagggccaaccaaccttcggatcgagtaccaagatggtaagttccgcctcgattcgatcatttgtgtcaaatctaaactgaagcaattcgattcagtagtccacctgattgattactatgtgcagatgtgtaaggacaagcgcacgggccctgaagcgcctcgaaacggcacggtgcacctgtatttgacaaaaccactatataccagtgcccctagcttgcagcatctgtgccgactgactatcaacaaatgtactggcgcaatttggggtcttcctctgcccactaggctgaaggattatttagaagaatataagtttcaagtgtag

SEQ ID NO: 95335 - DNA, 441 bp, Artificial Sequence
  derived and/or modified sequence
atgacagtgaacgaggccaaggaaaagctgaaggaggcccctgagggaacgttcttaatccgtgattcctcacactcagactacctcctgacaatctccgtgaagaccagtgccggacccaccaatctaagaatcgagtaccaagatgggaagtttaggttagactcaatcatttgtgtgaaatctaagctcaaacaattcgattccgtggtccacctgattgactattatgtacagatgtgcaaagataagcgtaccggacctgaggctcctcgcaacggaaccgtccacctgtacctcactaaaccgctttatacctcagcaccctccctccagcacttgtgtaggctgaccatcaacaagtgcacaggcgcaatatggggattacctcttccaactaggctgaaagattatctggaagagtataaattccaggtctag

SEQ ID NO: 95336 - DNA, 432 bp, Artificial Sequence
  derived and/or modified sequence
atgacgctccggtgtttggagccatcaggcaatggcggagagggtacccgctctcagtggggaactgcaggctcggctgaggagccatctccccaggcagcacgactcgcgaaagctcttcgggagcttggccagaccggatggtattggggatccatgaccgttaatgaagccaaagagaagctcaaggaggcacccgagggtacattcttgatccgggattctagccatagcgactaccttcttacaatttctgtgaagacgtctgcaggccctactaacttacgaatcgaataccaggatggcaagttcagactggatagcattatctgtgtgaagtcaaaacttaaacagttcgatagcgtcgtccaccttatcgattactatgtccagatgtgcaaagataagaggacagggccagaagccccttag

SEQ ID NO: 95337 - DNA, 597 bp, Artificial Sequence
  derived and/or modified sequence
atgacattgcgatgcctggaaccaagcggtaatggaggggaagggacccgaagccaatggggcacagctgggtctgccgaggagccatccccacaggctgcacgtcttgccaaggcactcagagagttgggccaaacggggtggtactggggttccatgaccgtaaatgaggctaaggaaaagctgaaagaagccccagaaggtacattccttatcagagacagcagtcatagtgactacttgctgacaatctccgtaaaaacttccgctgggcctaccaacctgcggatagaatatcaggacggcaagtttcgtcttgactcaatcatctgcgtcaagagcaaactaaagcagtttgattctgtcgttcacctcattgactactatgtccagatgtgcaaggacaagagaactgggcctgaagctcctcgaaacgggaccgtccacctctatcttaccaagccactttacacatcagcccctagcctgcagcatctttgcagactcacaatcaataagtgtacaggtgctatctgggggctcccgctcccgacccggctcaaggactatcttgaggaatacaagtttcaggtttag

SEQ ID NO: 95338 - DNA, 597 bp, Artificial Sequence
  derived and/or modified sequence
atgacattgaggtgtctagagccatccgggaacgggggagaggggacgcggagtcagtgggggactgccggtagtgccgaagagcccagcccccaggcggcacggctggcaaaggcactcagggaactggggcagaccggttggtactggggcagcatgacagttaacgaggccaaggagaaactgaaagaggccccagaaggtacctttttaatcagggactcatcccactctgattatctgctgacaatcagcgtgaaaactagcgccggaccaaccaatctgagaattgaatatcaggacggaaagttccgtctagacagtataatttgcgtgaaatccaagctgaagcagtttgattcagtggtccatctgattgattactatgtccagatgtgtaaggataagcggaccgggccagaagcacctcgcaatggtactgtgcatctgtatttaacaaaaccactgtataccagcgcgccatccctgcaacacctgtgtaggttgaccatcaataaatgcactggagcaatatggggcctccctttacccacacggctgaaggattatctcgaggagtacaaatttcaggtctag

SEQ ID NO: 95339 - DNA, 486 bp, Artificial Sequence
  derived and/or modified sequence
atgacactccggtgcttggaacctagcggcaacggcggtgaaggcacacgtagccagtggggcactgcgggaagtgccgaggagccttccccccaagcagcacgcttggcaaaggccttaagagaactgggtcagactggctggtactggggttccatgacggtgaatgaggcaaaggagaagctaaaggaagcacccgaagggacctttctgattagggacagtagtcactccgactacctgctgaccatcagcgtcaagactagcgccggacccacgaatcttcgcatcgagtaccaggacggaaagttccgcctggactcaattatctgtgtgaagtccaaacttaagcagttcgactcagtcgtccacttgatcgattattacgtgcaaatgtgtaaggacaaacgcaccggccctgaggccccacggaacggcacggtccacctgtacctgaccaaacccctttatacctccgctccctag

SEQ ID NO: 95340 - DNA, 597 bp, Artificial Sequence
  derived and/or modified sequence
atgactttgcggtgcttagagccctccggaaacgggggtgaaggcaccaggtcccagtggggaaccgctggttcagcagaggagccctccccacaggccgctcggctagcaaaagctttgagggaactaggccagaccgggtggtactggggttcaatgaccgtcaatgaggctaaggaaaaacttaaagaggcgcctgaaggaacttttttgatacgagattcctcgcactccgattatctgttgacaatttctgtgaagaccagcgcagggccaacgaacctgaggattgaatatcaggatggcaagtttcggttggatagcatcatttgcgtgaagtcaaaactgaagcagttcgacagcgtggttcaccttattgattattacgttcagatgtgcaaagacaagcgaactggtcccgaggcccctcgcaacggtacggtgcatctgtatcttacaaagcctttatacacatcggcaccttctctgcagcatttatgtcgcctcacaataaacaaatgtaccggtgccatttggggactgcccctgccaacaaggctgaaagattatctcgaagagtacaaattccaggtgtag

SEQ ID NO: 95341 - DNA, 1065 bp, Artificial Sequence
  derived and/or modified sequence
caagggaggcgcgtcggtctgggaagtcgcgcgcactcgctgctcctgggaccgacgtttaactcttgccaagtctcgtcgcagccgccgcggctggcgggccttgggcttcccctgaagcatgagccctctcgcccgcagccaccctcaccgcgtggcccgcggacagtgcgcgccggggtcccgggtgcacagcctcaggataccccgtgcccgcagctcgggcgcccgcggcaggcgatcagtgggtgaccgcggctgcgagggactttgtcatccgtcctccaggatctggggagaaagagccccatcccttctctctctgccaccatttcggacaccccgcagggactcgttttgggattcgcactgacttcaaggaaggacgcgaacccttctctgaccccagctcgggcggccacctgtctttgccgcggtgacccttctctcatgaccctgcggtgccttgagccctccgggaatggcggggaagggacgcggagccagtgggggaccgcggggtcggcggaggagccatccccgcaggcggcgcgtctggcgaaggccctgcgggagctcggtcagacaggatggtactggggaagtatgactgttaatgaagccaaagagaaattaaaagaggcaccagaaggaactttcttgattagagatagctcgcattcagactacctactaacaatatctgttaaaacatcagctggaccaactaatcttcgaatcgaataccaagacggaaaattcagattggactctatcatatgtgtcaaatccaagcttaaacaatttgacagtgtggttcatctgatcgactactatgttcagatgtgcaaggataagcggacaggtccagaagccccccggaacggcactgttcacctttatctgaccaaaccgctctacacgtcagcaccatctctgcagcatctctgtaggctcaccattaacaaatgtaccggtgccatctggggactgcctttaccaacaagactaaaagattacttggaagaatataaattccaggtataaatgtttctctttttttaa

SEQ ID NO: 95342 - DNA, 744 bp, Artificial Sequence
  derived and/or modified sequence
cgcagctcggagcgccggggaagagagagtccgaaccgcggctctgccccgcggcctagcgttgctgcctgctttctccagccccttctcggcgtctggaagtgcgatcagtgggtgaccgcggctgcgagggactttgtcatccgtcctccaggatctggggagaaagagccccatcccttctctctctgccaccatttcggacaccccgcagggactcgttttgggattcgcactgacttcaaggaaggacgcgaacccttctctgaccccagctcgggcggccacctgtctttgccgcggtgacccttctctcatgaccctgcggtgccttgagccctccgggaatggcggggaagggacgcggagccagtgggggaccgcggggtcggcggaggagccatccccgcaggcggcgcgtctggcgaaggccctgcgggagctcggtcagacaggatggtactggggaagtatgactgttaatgaagccaaagagaaattaaaagaggcaccagaaggaactttcttgattagagatagctcgcattcagactacctactaacaatatctgttaaaacatcagctggaccaactaatcttcgaatcgaataccaagacggaaaattcagattggactctatcatatgtgtcaaatccaagcttaaacaatttgacagtgtggttcatctgatcgactactatgttcagatgtgcaaggataagcggacaggtccagaagcccc

SEQ ID NO: 95343 - DNA, 984 bp, Artificial Sequence
  derived and/or modified sequence
gcggccgaggtcgaggtaagagcgcggcgttggtggtttgcattttccgcagcgctcgcgaccgcccgctcggccccggcctcgcctcggagccccgcgagggctgcgcgctcgggccgattcctcgacagcgcccgcggcggcgagaaccaccgcagccatcctggtccgggagcgaccgccgcggcacccccaaccccgccagagcgggcaccaggaagcggggggaggggagcgaggagcctcccgggcggagatgcggcagctcccgcacctccgcaccccgggcgatcagtgggtgaccgcggctgcgagggactttgtcatccgtcctccaggatctggggagaaagagccccatcccttctctctctgccaccatttcggacaccccgcagggactcgttttgggattcgcactgacttcaaggaaggacgcgaacccttctctgaccccagctcgggcggccacctgtctttgccgcggtgacccttctctcatgaccctgcggtgccttgagccctccgggaatggcggggaagggacgcggagccagtgggggaccgcggggtcggcggaggagccatccccgcaggcggcgcgtctggcgaaggccctgcgggagctcggtcagacaggatggtactggggaagtatgactgttaatgaagccaaagagaaattaaaagaggcaccagaaggaactttcttgattagagatagctcgcattcagactacctactaacaatatctgttaaaacatcagctggaccaactaatcttcgaatcgaataccaagacggaaaattcagattggactctatcatatgtgtcaaatccaagcttaaacaatttgacagtgtggttcatctgatcgactactatgttcagatgtgcaaggataagcggacaggtccagaagccccccggaacggcactgttcacctttatctgaccaaaccgctctacacgtcagcaccat

SEQ ID NO: 95344 - protein, 762 aa, Artificial Sequence
  derived and/or modified sequence
MWSCGRLREITWTSWTTRLLNNAFEELVAFQRALKDFVASIDATYAKQYEEFYVGLEGSFGSKHVSPRTLTSCFLSCVVCVEGIVTKCSLVRPKVVRSVHYCPATKKTIERRYSDLTTLVAFPSSSVYPTKDEENNPLETEYGLSVYKDHQTITIQEMPEKAPAGQLPRSVDVILDDDLVDKAKPGDRVQVVGTYRCLPGKKGGYTSGTFRTVLIACNVKQMSKDAQPSFSAEDIAKIKKFSKTRSKDIFDQLAKSLAPSIHGHDYVKKAILCLLLGGVERDLENGSHIRGDINILLIGDPSVAKSQLLRYVLCTAPRAIPTTGRGSSGVGLTAAVTTDQETGERRLEAGAMVLADRGVVCIDEFDKMSDMDRTAIHEVMEQGRVTIAKAGIHARLNARCSVLAAANPVYGRYDQYKTPMENIGLQDSLLSRFDLLFIMLDQMDPEQDREISDHVLRMHRYRAPGEQDGDAMPLGSAVDILATDDPNFSQEDQQDTQIYEKHDNLLHGTKKKKEKMVSAAFMKKYIHVAKIIKPVLTQESATYIAEEYSRLRSQDSMSSDTARTSPVTARTLETLIRLATAHAKARMSKTVDLQDAEEAVELVQYAYFKKVLEKEKKRKKRSEDESETEDEEEKSQEDQEQKRKRRKTRQPDAKDGDSYDPYDFSDTEEEMPQVHTPKTADSQETKESQKVELSESRLKAFKVALLDVFREAHAQSIGMNRLTESINRDSEEPFSSVEIQAALSKMQDDNQVMVSEGIIFLI

SEQ ID NO: 95345 - DNA, 993 bp, Artificial Sequence
  derived and/or modified sequence
atgcacagatacagagcccccggcgagcaggacggcgacgccatgcccctgggcagcgccgtggacatcctggccaccgacgaccccaacttcagccaggaggaccagcaggacacccagatctacgagaagcacgacaacctgctgcacggcaccaagaagaagaaggagaagatggtgagcgccgccttcatgaagaagtacatccacgtggccaagatcatcaagcccgtgctgacccaggagagcgccacctacatcgccgaggagtacagcagactgagaagccaggacagcatgagcagcgacaccgccagaaccagccccgtgaccgccagaaccctggagaccctgatcagactggccaccgcccacgccaaggccagaatgagcaagaccgtggacctgcaggacgccgaggaggccgtggagctggtgcagtacgcctacttcaagaaggtgctggagaaggagaagaagagaaagaagagaagcgaggacgagagcgagaccgaggacgaggaggagaagagccaggaggaccaggagcagaagagaaagagaagaaagaccagacagcccgacgccaaggacggcgacagctacgacccctacgacttcagcgacaccgaggaggagatgccccaggtgcacacccccaagaccgccgacagccaggagaccaaggagagccagaaggtggagctgagcgagagcagagacggcatcagcccctgctgccccggctggagctggacccccggcctgaagcagagcttctacctgagcctgcccaagggctgggactacagacacaagcccctgtgcctgttcgacctgatcctgttcaacgactgcagagtgagcatggtggagggcatccagggcggccccctgggctgcgtgcccggcagcagctgcgccgtgaacagacacgagagcccccacagaatccaccagcccggccagagaagagccctgctgttcagctag

SEQ ID NO: 95346 - DNA, 2289 bp, Artificial Sequence
  derived and/or modified sequence
atgtggagctgcggcagactgagagagatcacctggaccagctggaccaccagactgctgaacaacgccttcgaggagctggtggccttccagagagccctgaaggacttcgtggccagcatcgacgccacctacgccaagcagtacgaggagttctacgtgggcctggagggcagcttcggcagcaagcacgtgagccccagaaccctgaccagctgcttcctgagctgcgtggtgtgcgtggagggcatcgtgaccaagtgcagcctggtgagacccaaggtggtgagaagcgtgcactactgccccgccaccaagaagaccatcgagagaagatacagcgacctgaccaccctggtggccttccccagcagcagcgtgtaccccaccaaggacgaggagaacaaccccctggagaccgagtacggcctgagcgtgtacaaggaccaccagaccatcaccatccaggagatgcccgagaaggcccccgccggccagctgcccagaagcgtggacgtgatcctggacgacgacctggtggacaaggccaagcccggcgacagagtgcaggtggtgggcacctacagatgcctgcccggcaagaagggcggctacaccagcggcaccttcagaaccgtgctgatcgcctgcaacgtgaagcagatgagcaaggacgcccagcccagcttcagcgccgaggacatcgccaagatcaagaagttcagcaagaccagaagcaaggacatcttcgaccagctggccaagagcctggcccccagcatccacggccacgactacgtgaagaaggccatcctgtgcctgctgctgggcggcgtggagagagacctggagaacggcagccacatcagaggcgacatcaacatcctgctgatcggcgaccccagcgtggccaagagccagctgctgagatacgtgctgtgcaccgcccccagagccatccccaccaccggcagaggcagcagcggcgtgggcctgaccgccgccgtgaccaccgaccaggagaccggcgagagaagactggaggccggcgccatggtgctggccgacagaggcgtggtgtgcatcgacgagttcgacaagatgagcgacatggacagaaccgccatccacgaggtgatggagcagggcagagtgaccatcgccaaggccggcatccacgccagactgaacgccagatgcagcgtgctggccgccgccaaccccgtgtacggcagatacgaccagtacaagacccccatggagaacatcggcctgcaggacagcctgctgagcagattcgacctgctgttcatcatgctggaccagatggaccccgagcaggacagagagatcagcgaccacgtgctgagaatgcacagatacagagcccccggcgagcaggacggcgacgccatgcccctgggcagcgccgtggacatcctggccaccgacgaccccaacttcagccaggaggaccagcaggacacccagatctacgagaagcacgacaacctgctgcacggcaccaagaagaagaaggagaagatggtgagcgccgccttcatgaagaagtacatccacgtggccaagatcatcaagcccgtgctgacccaggagagcgccacctacatcgccgaggagtacagcagactgagaagccaggacagcatgagcagcgacaccgccagaaccagccccgtgaccgccagaaccctggagaccctgatcagactggccaccgcccacgccaaggccagaatgagcaagaccgtggacctgcaggacgccgaggaggccgtggagctggtgcagtacgcctacttcaagaaggtgctggagaaggagaagaagagaaagaagagaagcgaggacgagagcgagaccgaggacgaggaggagaagagccaggaggaccaggagcagaagagaaagagaagaaagaccagacagcccgacgccaaggacggcgacagctacgacccctacgacttcagcgacaccgaggaggagatgccccaggtgcacacccccaagaccgccgacagccaggagaccaaggagagccagaaggtggagctgagcgagagcagactgaaggccttcaaggtggccctgctggacgtgttcagagaggcccacgcccagagcatcggcatgaacagactgaccgagagcatcaacagagacagcgaggagcccttcagcagcgtggagatccaggccgccctgagcaagatgcaggacgacaaccaggtgatggtgagcgagggcatcatcttcctgatctag

SEQ ID NO: 95347 - DNA, 987 bp, Artificial Sequence
  derived and/or modified sequence
agatacagagcccccggcgagcaggacggcgacgccatgcccctgggcagcgccgtggacatcctggccaccgacgaccccaacttcagccaggaggaccagcaggacacccagatctacgagaagcacgacaacctgctgcacggcaccaagaagaagaaggagaagatggtgagcgccgccttcatgaagaagtacatccacgtggccaagatcatcaagcccgtgctgacccaggagagcgccacctacatcgccgaggagtacagcagactgagaagccaggacagcatgagcagcgacaccgccagaaccagccccgtgaccgccagaaccctggagaccctgatcagactggccaccgcccacgccaaggccagaatgagcaagaccgtggacctgcaggacgccgaggaggccgtggagctggtgcagtacgcctacttcaagaaggtgctggagaaggagaagaagagaaagaagagaagcgaggacgagagcgagaccgaggacgaggaggagaagagccaggaggaccaggagcagaagagaaagagaagaaagaccagacagcccgacgccaaggacggcgacagctacgacccctacgacttcagcgacaccgaggaggagatgccccaggtgcacacccccaagaccgccgacagccaggagaccaaggagagccagaaggtggagctgagcgagagcagagacggcatcagcccctgctgccccggctggagctggacccccggcctgaagcagagcttctacctgagcctgcccaagggctgggactacagacacaagcccctgtgcctgttcgacctgatcctgttcaacgactgcagagtgagcatggtggagggcatccagggcggccccctgggctgcgtgcccggcagcagctgcgccgtgaacagacacgagagcccccacagaatccaccagcccggccagagaagagccctgctgttcagctag

SEQ ID NO: 95348 - DNA, 993 bp, Artificial Sequence
  derived and/or modified sequence
atgcatcgttatcgtgcgcccggggagcaagacggtgatgccatgcccctaggctctgcggttgatatccttgcaacggacgatcccaacttcagccaagaagaccagcaggatacacagatctatgaaaaacatgacaatctactgcacggaaccaagaagaaaaaggagaagatggttagcgccgcatttatgaagaagtatatacacgtggccaagattattaagcctgtgctcactcaggaaagcgccacatatatagccgaggagtactcaagactgcgaagccaagattctatgtcttctgacactgccaggacttctcccgtgaccgcacgaaccctggagacactcattagactggcgaccgcgcatgccaaggcccgtatgagcaagactgtggacctgcaggatgcagaggaggccgtcgaacttgtacagtacgcctacttcaagaaggtcctggagaaagagaaaaaacgtaaaaaacgatccgaggacgagagtgagactgaggacgaagaggagaagagccaggaagaccaggagcaaaaacgtaagcgaaggaaaacacgacaaccagatgcgaaggacggggacagctatgacccatatgacttctcagacactgaagaggagatgcctcaagtccacaccccaaagaccgccgacagccaagagacgaaagaatcccagaaggttgaattaagcgagagccgtgacgggattagcccttgctgtcccggatggtcgtggaccccagggctcaagcagtctttctacttaagtctgcccaagggatgggattatagacacaagcccctctgtctctttgatctgattctgtttaacgactgtcgcgtttccatggttgagggaatccagggcggcccactgggatgtgttcccggaagcagctgtgccgttaaccgccacgagtctccccatcgcatacaccagcctgggcagagaagggccctcctcttctcatag

SEQ ID NO: 95349 - DNA, 2289 bp, Artificial Sequence
  derived and/or modified sequence
atgtggtcatgcggtcggctgcgggaaatcacttggacttcatggaccacccgtctcctcaacaatgccttcgaggaactggttgcttttcagcgcgctctgaaagattttgtggccagcatcgacgctacatatgctaagcagtacgaggaattttacgtggggcttgagggatccttcggctccaaacacgtgagtcctcgcaccttaacatcctgtttccttagttgcgttgtttgtgttgagggaattgttacgaagtgcagcctggtgcgcccaaaagtggtaagatcggtacattattgcccagcaaccaagaagaccatcgagcgacggtacagtgatctcaccaccctggtcgcctttcccagttcatcagtctatcctactaaggatgaagaaaacaatcctctggaaactgagtacggcctgtccgtttacaaggaccaccaaacaataaccatacaggaaatgcccgaaaaggctcccgcagggcagctaccacgatctgtggatgtcattcttgacgacgacctcgtggacaaggctaagcccggcgatcgggtgcaggtcgtggggacatatcgctgtcttcctggaaaaaaaggcggatacactagtggcacattcaggacagtgctgattgcttgcaatgtgaagcagatgagcaaggacgcccagccatctttttccgcggaggatatagcgaagatcaaaaagttttcaaaaaccagaagcaaggacatattcgatcagctagctaaatccctggccccatctatacacggacacgattatgtcaagaaagccatactgtgcctacttctgggcggagtggaaagggatttggagaatgggtcacacattcggggggatatcaacatcctgctgattggagaccccagcgtggcaaagagccaactgttgaggtatgtgctttgcaccgcacctcgcgctatccctacaaccggacggggcagcagcggcgtcggtcttacagctgccgtcacaaccgaccaggaaacgggcgagagacgtctggaggctggggccatggtgctcgctgaccggggggtcgtgtgtatagacgaatttgacaaaatgtctgatatggacagaactgccatccatgaagtcatggaacaggggagagtgacaatcgcaaaggcgggtatacatgcccggctcaacgcacggtgttctgtgttagctgccgcaaaccccgtttacggacgctacgatcagtacaagacgcccatggaaaacatcgggttgcaggatagcctgctgagccgcttcgatcttttgtttattatgttggaccagatggatccagagcaggaccgggaaatctcagaccacgtgcttcgaatgcacagataccgagcacctggggagcaggacggagacgctatgccgctagggagtgccgtggacatcttggcgaccgatgatccaaacttttcgcaggaggatcagcaggatacccagatttatgagaaacacgacaacttactgcacggcaccaagaagaagaaagaaaaaatggttagtgccgcattcatgaagaaatacatccatgtggccaagatcattaaaccagtccttacccaagagagcgctacgtacatcgctgaagagtattcccggctgagaagccaagattccatgagctcagacaccgctagaacaagcccggtcaccgcacgcacactggagaccctcatcagattggctactgcacacgcaaaagctaggatgtccaagactgtggacttacaggatgccgaggaagccgtggagcttgtccaatacgcctacttcaagaaggttctagagaaagaaaaaaagcggaagaaacggtccgaggacgagtctgagactgaggacgaggaggagaaatcgcaggaagatcaggaacaaaagcggaaaaggcggaagacgcggcagcctgatgctaaggacggcgacagctatgacccatacgacttttccgatacggaggaggaaatgccacaggtacacacccctaagacagccgatagtcaggagactaaggaatctcaaaaagtggaactctccgagtctagactgaaggctttcaaggtcgcattgctggacgttttccgggaagcgcacgcccagtccattgggatgaatcgccttaccgaaagtatcaaccgggattctgaagaaccttttagtagtgtggagatacaagctgccctatccaaaatgcaggatgacaaccaggtgatggtctcagaaggcattattttcttaatttag

SEQ ID NO: 95350 - DNA, 987 bp, Artificial Sequence
  derived and/or modified sequence
cggtaccgggcccctggcgagcaagacggggatgccatgcctttaggctccgctgttgatattctggccactgacgatccaaatttcagccaggaggatcagcaagatacacagatctatgaaaaacacgataatcttctacacggcaccaaaaaaaaaaaggagaagatggtgtctgctgcctttatgaagaagtatattcatgtggccaagattatcaagccagtgcttacgcaggaatctgcaacttacatcgccgaagagtattcacgactaagatcccaggattccatgagcagtgatacagcccgaacctcccccgttacagcacggaccttagagacgctgatcagattagccacggcacatgccaaggctcgaatgagtaagacagtggatctgcaggacgctgaggaagccgtggagctggtacagtacgcatacttcaagaaagtgcttgagaaggagaagaagcggaagaagcggagcgaggacgagagcgagacagaagatgaggaagagaagtcccaggaagaccaggagcagaaacggaaacggaggaagaccagacagcccgacgctaaggatggtgactcgtacgacccatacgatttctccgataccgaagaggagatgccccaggtgcacacccctaagacggccgattctcaggagaccaaagaaagccagaaggtggaactgtcagaaagccgtgatggcattagcccctgctgcccaggctggtcctggactcccgggttaaagcagtccttttatttatctctcccgaaaggctgggactaccgccataaacctctgtgtctgttcgacttgatacttttcaacgattgcagagtttccatggtggaaggcattcagggaggacctttgggatgcgtacctggatccagttgtgctgttaataggcatgaaagccctcatcgtatacaccagcctggtcagcggcgcgctcttctcttctcatag

SEQ ID NO: 95351 - DNA, 993 bp, Artificial Sequence
  derived and/or modified sequence
atgcaccgctaccgggcccctggagagcaggatggagatgccatgcccctgggcagcgctgtggacatcctggccacagatgaccccaacttcagccaggaggaccagcaggacacccagatctatgagaagcatgacaacctgctgcacggcaccaagaagaagaaggagaagatggtgtctgctgccttcatgaagaagtacatccacgtggccaagatcatcaagcctgtgctgacccaggagagcgccacctacatcgccgaggagtacagccggctgcggagccaggacagcatgagcagtgacacagcccggaccagccctgtgacagcccggaccctggagaccctcatccggctggccacagcccacgccaaggccaggatgagcaagacagtggacctgcaggatgctgaggaggccgtggagctggtgcagtatgcctacttcaagaaggtgctggagaaggagaagaagaggaagaagagaagtgaagatgaaagtgaaacagaagatgaggaggagaagagccaggaggaccaggagcagaagaggaagaggaggaagacccggcagccagatgccaaggatggagacagctatgacccctatgacttcagtgacacagaggaggagatgccccaggtgcacacccccaagacagctgacagccaggagaccaaggagagccagaaggtggagctgtctgagagcagagatggcatcagcccctgctgccccggctggagctggaccccaggcctgaagcagagcttctacctgagcctgcccaagggctgggactaccgccacaagcccctgtgcctgtttgacctgatcctcttcaatgactgccgggtgtccatggtggagggcatccagggcggccccctgggctgtgtgcccggcagcagctgtgctgtgaacagacatgagagcccccaccgcatccaccagcccggccagaggcgggccctgctcttctcctag

SEQ ID NO: 95352 - DNA, 2289 bp, Artificial Sequence
  derived and/or modified sequence
atgtggagctgtggccgcctgcgggagatcacctggacctcctggaccacccggctgctgaacaatgcctttgaggagctggtggccttccagagggccctgaaggactttgtggccagcattgatgccacctacgccaagcagtatgaggagttctacgtgggcctggagggcagctttggcagcaagcacgtgagccccaggaccctgaccagctgcttcctgagctgtgtggtgtgtgtggagggcatcgtgaccaagtgcagcctggtgcggcccaaggtggtgcgctctgtgcactactgcccagccaccaagaagaccattgaaagacgctacagcgacctgaccaccctggtggccttccccagcagctctgtgtaccccaccaaggatgaggagaacaaccccctggagacagaatatggcctgtctgtgtacaaggaccaccagaccatcaccatccaggagatgcctgagaaggccccagctggccagctgcccaggtctgtggatgtgatcctggatgatgacctggtggacaaggccaagccaggggacagagtgcaggtggtgggcacctaccgctgcctgcccgggaagaagggcggctacaccagcggcaccttcagaacagtgctgattgcctgcaatgtgaagcagatgagcaaggatgcccagcccagcttcagcgcagaagatattgccaagatcaagaagttcagcaagaccaggagcaaggacatctttgaccagctggccaagagcctggcccccagcatccacggccatgactatgtgaagaaggccatcctgtgcctgctgctgggcggcgtggagcgggacctggagaatggcagccacatccggggggacatcaacatcctgctgattggagaccccagcgtggccaagagccagctgctgcgctacgtgctgtgcacagccccccgggccatccccaccaccggccggggcagcagcggcgtgggcctgacagctgctgtgaccacagaccaggagaccggggagcggcggctggaggccggggccatggtgctggccgaccggggcgtggtgtgcattgatgaatttgacaagatgtctgacatggacagaacagccatccacgaggtgatggagcagggccgggtgaccatcgccaaggccggcatccacgcccggctgaatgcccgctgcagcgtgctggccgccgccaaccctgtgtatggccgctatgaccagtacaagacccccatggagaacatcggcctgcaggacagcctgctgagcagatttgacctgctcttcatcatgctggaccagatggaccctgagcaggaccgggagatcagtgaccacgtgctgaggatgcaccgctaccgggcccctggagagcaggatggagatgccatgcccctgggcagcgctgtggacatcctggccacagatgaccccaacttcagccaggaggaccagcaggacacccagatctatgagaagcatgacaacctgctgcacggcaccaagaagaagaaggagaagatggtgtctgctgccttcatgaagaagtacatccacgtggccaagatcatcaagcctgtgctgacccaggagagcgccacctacatcgccgaggagtacagccggctgcggagccaggacagcatgagcagtgacacagcccggaccagccctgtgacagcccggaccctggagaccctcatccggctggccacagcccacgccaaggccaggatgagcaagacagtggacctgcaggatgctgaggaggccgtggagctggtgcagtatgcctacttcaagaaggtgctggagaaggagaagaagaggaagaagagaagtgaagatgagagcgagacagaagatgaggaggagaagagccaggaggaccaggagcagaagaggaagaggaggaagacccggcagccagatgccaaggatggagacagctatgacccctatgacttcagtgacacagaggaggagatgccccaggtgcacacccccaagacagctgacagccaggagaccaaggagagccagaaggtggagctgtctgagagccggctgaaggccttcaaggtggccctgctggatgtgttccgggaggcccacgcccagagcatcggcatgaaccggctgacagagagcatcaacagagacagcgaggagcccttcagctctgtggagatccaggccgccctgagcaagatgcaggatgacaaccaggtgatggtgtctgagggcatcatcttcctgatctag

SEQ ID NO: 95353 - DNA, 987 bp, Artificial Sequence
  derived and/or modified sequence
cgctaccgggcccctggagagcaggatggagatgccatgcccctgggcagcgctgtggacatcctggccacagatgaccccaacttcagccaggaggaccagcaggacacccagatctatgagaagcatgacaacctgctgcacggcaccaagaagaagaaggagaagatggtgtctgctgccttcatgaagaagtacatccacgtggccaagatcatcaagcctgtgctgacccaggagagcgccacctacatcgccgaggagtacagccggctgcggagccaggacagcatgagcagtgacacagcccggaccagccctgtgacagcccggaccctggagaccctcatccggctggccacagcccacgccaaggccaggatgagcaagacagtggacctgcaggatgctgaggaggccgtggagctggtgcagtatgcctacttcaagaaggtgctggagaaggagaagaagaggaagaagagaagtgaagatgaaagtgaaacagaagatgaggaggagaagagccaggaggaccaggagcagaagaggaagaggaggaagacccggcagccagatgccaaggatggagacagctatgacccctatgacttcagtgacacagaggaggagatgccccaggtgcacacccccaagacagctgacagccaggagaccaaggagagccagaaggtggagctgtctgagagcagagatggcatcagcccctgctgccccggctggagctggaccccaggcctgaagcagagcttctacctgagcctgcccaagggctgggactaccgccacaagcccctgtgcctgtttgacctgatcctcttcaatgactgccgggtgtccatggtggagggcatccagggcggccccctgggctgtgtgcccggcagcagctgtgctgtgaacagacatgagagcccccaccgcatccaccagcccggccagaggcgggccctgctcttctcctag

SEQ ID NO: 95354 - DNA, 2720 bp, Artificial Sequence
  derived and/or modified sequence
gactttggtggaggtagttctttggcagcgggcatggcgggtaccgtggtgctggacgatgtggagctgcgggaggctcagagagattacctggacttcctggacgacgaggcttctgaacaatgcctttgaggagctggttgccttccagcgggccttaaaggattttgtggcctccattgatgctacctatgccaagcagtatgaggagttctacgtaggactggaaggcagctttggctccaagcacgtctccccgcggactcttacctcctgcttcctcagctgtgtggtctgtgtggagggcattgtcactaaatgttctctagttcgtcccaaagtcgtccgcagtgtccactactgtcctgctactaagaagaccatagagcgacgttattctgatctcaccaccctggtggcctttccctccagctctgtctatcctaccaaggatgaggagaacaatccccttgagacagaatatggcctttctgtctacaaggatcaccagaccatcaccatccaggagatgccggagaaggccccagccggccagctcccccgctctgtggacgtcattctggatgatgacttggtggataaagcgaagcctggtgaccgggttcaggtggtgggaacctaccgttgccttcctggaaagaagggaggctacacctctgggaccttcaggactgtcctgattgcctgtaatgttaagcagatgagcaaggatgctcagccctctttctctgctgaggatatagccaagatcaagaagttcagtaaaacccgatccaaggatatctttgaccagctggccaagtcattggccccaagtatccatgggcatgactatgtcaagaaagcaatcctctgcttgctcttgggaggggtggaacgagacctagaaaatggcagccacatccgtggggacatcaatattcttctaataggagacccatccgttgccaagtctcagcttctgcggtatgtgctttgcactgcaccccgagctatccccaccactggccggggctcctctggagtgggtctgacggctgctgtcaccacagaccaggaaacaggagagcgccgtctggaagcaggggccatggtcctggctgaccgaggcgtggtttgcattgatgaatttgacaaaatgtctgacatggatcgcacagccatccatgaagtgatggagcagggtcgagtgaccattgccaaggctggcatccatgctcggctgaatgcccgctgcagtgttttggcagctgccaaccctgtctacggcaggtatgaccagtataagactccaatggagaacattgggctacaggactcactgctgtcacgatttgacttgctcttcatcatgctggatcagatggatcctgagcaggatcgggagatctcagaccatgtccttcggatgcaccgttacagagcacctggggagcaggatggcgatgctatgcccttgggtagtgctgtggatatcctggccacagatgatcccaactttagccaggaagatcagcaggacacccagatttatgagaagcatgacaaccttctacatgggaccaagaagaaaaaggagaagatggtgagtgcagcattcatgaagaagtacatccatgtggccaaaatcatcaagcctgtcctgacacaggagtcggccacctacattgcagaagagtattcacgcctgcgcagccaggatagcatgagctcagacaccgccaggacatctccagttacagcccgaacactggaaactctgattcgactggccacagcccatgcgaaggcccgcatgagcaagactgtggacctgcaggatgcagaggaagctgtggagttggtccagtatgcttactttaagaaggttctggagaaggagaagaaacgtaagaagcgaagtgaggatgaatcagagacagaagatgaagaggagaaaagccaagaggaccaggagcagaagaggaagagaaggaagactcgccagccagatgccaaagatggggattcatacgacccctatgacttcagtgacacagaggaggaaatgcctcaagtacacactccaaagacggcagactcacaggagaccaaggaatcccagaaagtggagttgagtgaatccaggttgaaggcattcaaggtggccctcttggatgtgttccgggaagctcatgcgcagtcaatcggcatgaatcgcctcacagaatccatcaaccgggacagcgaagagcccttctcttcagttgagatccaggctgctctgagcaagatgcaggatgacaatcaggtcatggtgtctgagggcatcatcttcctcatctgaggaggcctcgtctctgaacttgggttgtgccgagagagtttgttctgtgtttcccaccctctccctgacccaagtctttgcctctactcccttaacagtgttgaattcaactgaaggcgaggaatgttggtgatgaagctgagttcaggactcggtggaccctttgggaatgggtcatgaaagctgccatggggtgaggaaagaggagacagtgggagaggacaatgactattgcatcttcattgcaaaagcactggctcatccgccctacttcccatcccacacaaacccaattgtaaataacatatgacttctgagtacttttgggggcacaactgttttctgtttgctgtttttttgttttgtttttttt

SEQ ID NO: 95355 - DNA, 1030 bp, Artificial Sequence
  derived and/or modified sequence
cgttacagagcacctggggagcaggatggcgatgctatgcccttgggtagtgctgtggatatcctggccacagatgatcccaactttagccaggaagatcagcaggacacccagatttatgagaagcatgacaaccttctacatgggaccaagaagaaaaaggagaagatggtgagtgcagcattcatgaagaagtacatccatgtggccaaaatcatcaagcctgtcctgacacaggagtcggccacctacattgcagaagagtattcacgcctgcgcagccaggatagcatgagctcagacaccgccaggacatctccagttacagcccgaacactggaaactctgattcgactggccacagcccatgcgaaggcccgcatgagcaagactgtggacctgcaggatgcagaggaagctgtggagttggtccagtatgcttactttaagaaggttctggagaaggagaagaaacgtaagaagcgaagtgaggatgaatcagagacagaagatgaagaggagaaaagccaagaggaccaggagcagaagaggaagagaaggaagactcgccagccagatgccaaagatggggattcatacgacccctatgacttcagtgacacagaggaggaaatgcctcaagtacacactccaaagacggcagactcacaggagaccaaggaatcccagaaagtggagttgagtgaatccagagacgggatctcaccatgttgcccaggctggtcttggactcctggcctcaagcagtccttctacctgagcctcccaaaaggctgggattacaggcataagccactgtgcttgtttgatctcattctttttaatgactgcagggtttccatggttgaaggcattcaaggtggccctcttggatgtgttccgggaagctcatgcgcagtcaatcggcatgaatcgcctcacagaatccatcaaccgggacagcgaagagcccttctcttcagttgagatccaggctgctctgagcaagatgcaggatgacaatcaggtc

SEQ ID NO: 95356 - DNA, 993 bp, Artificial Sequence
  derived and/or modified sequence
atgcaccggtaccgggcccccggcgagcaggacggcgacgccatgccactaggcagcgcagttgatatcttggctactgacgatcctaatttttcccaggaagatcaacaggacacccagatatatgaaaaacacgataaccttctgcacggcacaaagaagaaaaaagaaaagatggtgtctgctgctttcatgaagaaatacattcatgtggctaagattatcaaacccgtgctaacccaagagagtgcaacatatatcgcagaggaatattcccgcctcagaagccaggacagcatgtcttctgatacagcacgaactagcccagtgaccgcccgaactctcgaaacactaatcagactggctacggcccatgctaaagctcgcatgtccaaaacagtcgatttacaggacgccgaggaagccgtggaactagtgcaatacgcttactttaaaaaagttctggaaaaagaaaagaagcggaaaaagcggtcagaagacgagtccgagactgaagacgaggaggaaaagagccaggaggatcaggaacagaagcgcaagcgaaggaaaactaggcagcctgacgccaaggatggggactcctacgacccttacgacttctctgacactgaggaggagatgcctcaggttcacacccctaagaccgcagactctcaagagactaaggaatcacaaaaggtggaactcagcgagagtcgggacggcatcagtccatgttgccccggatggtcctggactcctggcctgaaacagtcgttctacctgtctctcccaaagggatgggactataggcataaaccactgtgccttttcgatctgatattgttcaacgactgtagggtgtcaatggttgagggaatacaggggggacccctggggtgcgtcccaggatcttcctgcgcagtgaacagacatgaaagccctcatcgcatccatcagcccggacagagacgcgccctgctcttctcctag

SEQ ID NO: 95357 - DNA, 2289 bp, Artificial Sequence
  derived and/or modified sequence
atgtggagctgcggccggctgcgggagatcacctggaccagctggaccacacgcctgcttaacaacgccttcgaggaactggtagcctttcagcgcgcactaaaagatttcgttgcatctattgacgcgacatatgcaaagcagtacgaagaattttacgttggcctggaagggtcatttggaagcaagcacgtcagcccgcggacgctcacctcctgctttctaagctgcgttgtgtgcgttgaggggatcgtgaccaagtgcagcctggtacgccccaaggtggtccggtctgtgcattactgtcctgcaacaaagaaaacaattgagcgaagatactccgacctgacaaccctcgttgcttttccttccagcagtgtgtaccccaccaaggatgaggaaaacaacccgctagagaccgagtacggactcagcgtgtataaggatcatcagaccattacaatacaggaaatgccagagaaagctcccgcaggccaactgccacggtcagtggatgtcatcctcgatgacgacttagttgacaaagccaagccgggagaccgtgtgcaggtggttgggacttatagatgtctgccgggcaagaagggtggctataccagcggaactttcagaactgtgctcattgcttgtaatgtgaaacaaatgtccaaagacgctcagccttctttctccgccgaggatatcgccaagattaaaaagttctccaaaacgcggtcaaaggatatcttcgaccaactggctaaatccctcgccccctccatccacgggcatgactacgtcaagaaggctattctctgtttgctcctggggggagtggaacgcgacctagaaaacggtagccacattcggggggacattaacattctcctgatcggcgatcctagcgtggccaagagccagctcttgagatacgtgctgtgtacagccccccgtgccatccccactactgggcggggtagtagcggggtcggattgaccgccgcagtgactactgaccaggaaaccggcgaacgccggttagaggctggagccatggtgctcgccgaccggggagtagtgtgcatcgacgagtttgataaaatgagcgatatggatagaaccgctatccatgaagttatggagcaggggcgggtgactattgccaaagccgggatccacgcacggctcaacgcccgttgttcggtgctggctgccgctaacccggtctacgggcgttacgaccaatataaaacaccaatggaaaatatcggcctgcaggattccctgctcagcagattcgacctgctgttcattatgctggatcagatggacccagagcaggatcgcgaaatctctgaccacgtccttcgcatgcaccgctacagagcaccaggcgagcaggacggcgatgccatgcctttaggatctgccgttgatatccttgcgaccgacgaccccaatttcagccaggaggatcagcaggacactcagatctatgaaaaacatgataatcttcttcatgggacaaaaaagaagaaggaaaagatggtcagcgccgcttttatgaagaagtacatacatgtcgccaaaattatcaaacctgtcctgacccaagagagtgcaacctatattgccgaggagtacagtcgacttcgttctcaagacagcatgagctctgacaccgccagaacaagtccggtgacagccagaaccttagaaacactgatcaggctagcgaccgcccacgctaaagctcggatgtccaaaaccgtggacctccaagacgcggaggaagccgtggagctcgtgcagtatgcctatttcaaaaaggtgctcgagaaggaaaagaaaagaaagaagcggagcgaagatgaatcagagactgaggatgaagaggagaagtcccaggaagatcaggagcagaaacgaaaacgaagaaagacacgccaaccggacgccaaagatggagatagctatgacccgtacgatttttcagatacagaagaagagatgcctcaggtgcatactcctaagaccgcagactctcaggaaaccaaggaatcacagaaggtcgagctttctgaatctaggctgaaagcctttaaagtggcacttcttgatgtatttcgagaggcccacgcccagtcaattgggatgaataggttaaccgagagcattaaccgggatagcgaggaacccttcagctccgttgagatccaggccgccctgagcaaaatgcaggacgataaccaggttatggtctccgagggaatcatatttctgatttag

SEQ ID NO: 95358 - DNA, 987 bp, Artificial Sequence
  derived and/or modified sequence
cggtaccgggcccccggcgagcaggacggcgacgccatgcccctgggttccgctgtcgatattctcgctactgacgatcccaacttctcccaggaggatcagcaggatacccagatatatgagaagcatgacaacctccttcacggtacaaaaaaaaagaaagaaaagatggtgagcgccgcatttatgaagaaatacatccatgtagccaagatcataaaacccgttctgacacaagagagcgcaacatacattgcagaggagtatagcagactccgcagccaggacagcatgtcctcggacaccgcgcgaacctcacccgtcactgcacgtacacttgagaccctaatacggttggccacagctcacgccaaggctagaatgtcaaaaactgtggacctgcaggacgccgaggaggcggtggaactagtccaatacgcctatttcaaaaaggttttggaaaaggaaaagaaaagaaaaaaacgcagcgaggatgagtcggaaacggaggacgaagaggagaagtcacaggaggatcaggagcaaaagagaaagcgccgaaagacacgccaaccagatgccaaggatggcgactcttacgacccctacgatttcagcgacacagaggaggagatgcctcaggtacatacacccaagaccgcggactcgcaagaaaccaaggaatcacagaaggttgaattgtcagagtctcgcgatggcatctctccttgctgccccggttggagttggactcctgggctgaagcagtctttttacctgtcactgcctaaggggtgggactacagacacaaaccgctttgcttatttgatctgattctctttaacgactgtcgcgtgtcgatggttgagggaatccagggagggcctcttggctgcgttcccgggagttcttgcgccgtcaaccggcacgaaagtccacaccggattcatcagcccggacagcgaagagcactgctattctcctag

SEQ ID NO: 95359 - DNA, 993 bp, Artificial Sequence
  derived and/or modified sequence
atgcatcggtaccgagcacctggagagcaggacggagatgccatgcctctcgggagcgccgtcgacattctggccacagacgatccaaatttctcccaagaggatcagcaggatacgcaaatttacgaaaagcatgacaacctgctccacggcaccaagaagaaaaaagaaaagatggtcagtgccgcttttatgaagaagtacatacatgtcgccaagatcatcaagccggtattaacccaggagtcagcgacttatatagcagaagaatactcccgcttacggtcacaagatagcatgagctcagatactgctcgcacatccccagtgactgcgaggactctcgaaaccctcattagactggccacggctcacgccaaagcgaggatgtccaaaactgtggacttacaggatgctgaggaggctgtagagctggtgcagtatgcatatttcaaaaaagtcctggaaaaggaaaaaaaacgtaaaaaaagatcagaggacgagagcgaaacggaagacgaagaagaaaagtcccaggaagaccaggagcagaagcgcaagcggcgaaagacccgccagcctgacgcaaaggatggcgactcttacgatccgtacgatttttcagatactgaggaggaaatgccgcaggtgcacactccgaaaaccgccgactctcaggagacaaaagagagccaaaaggttgaattgtcagagtctagagacgggataagcccatgttgcccaggctggagctggacacccggtctgaaacagtctttttatctgtcactgccgaaggggtgggattatcgccataagcccctttgtttatttgatttgatcctgttcaacgactgcagggtctccatggttgaaggcattcagggcggacctctgggctgtgtccctggatcctcctgcgcggtaaatcgtcacgagagtccccatcggatccatcaaccaggccaaagaagagcattactgttttcatag

SEQ ID NO: 95360 - DNA, 2289 bp, Artificial Sequence
  derived and/or modified sequence
atgtggtcgtgcggacggctcagggagatcacttggacctcatggactacacgcttgctcaacaatgcgtttgaggaactcgtcgcttttcagcgggctttgaaggatttcgtagcctcaattgatgctacatatgctaagcagtatgaagaattctacgtcggcctcgaagggtccttcggctccaagcacgtgtcaccgcgaactctcacttcttgtttcctgtcatgcgttgtgtgcgttgagggtattgttacgaagtgctcattggtgcgcccaaaggtggtaagatcagtccactactgcccagctactaagaagaccattgagcgtaggtactcagacctgaccacgcttgtagccttcccatcctcatccgtgtatcctactaaggacgaagagaacaaccccttggaaacagagtacgggctcagcgtttacaaggatcaccagacaattacaatccaggaaatgcccgaaaaggctccagctggacaactgcccaggagcgtggatgtaatcctggacgatgaccttgtggacaaggctaaaccaggcgaccgtgttcaggttgtgggaacttataggtgtctgccagggaagaagggaggctacacaagtggaacgttccgcaccgtcctgatcgcctgtaacgttaaacaaatgagtaaggatgcacagcccagcttctcggcagaggacattgcaaaaataaaaaagtttagcaaaacaaggtcaaaggacatctttgaccagctggcaaaatcgctcgccccatcaatacatgggcacgattatgtgaaaaaagccatcttgtgtctgttgttgggaggagtagagcgggacctggagaatggaagccatattcgaggggacatcaatatcttgctgattggggatccttccgtggccaaatcacaactcctccgatatgtgctgtgtaccgcacctcgggctatacccaccacgggaagagggtccagtggcgtaggactgactgcagctgtgaccaccgatcaggagacgggcgagcgacgcctcgaagcaggtgcgatggtgctcgcggatagaggagtagtctgcattgatgaatttgacaaaatgagcgatatggaccgcacagcaatccatgaggtgatggagcaggggcgagtgaccatcgccaaggccggtatccacgcacgcctgaacgctcgctgctcagttctggccgcagccaatcccgtctatggacgatatgaccagtataagacccccatggaaaacatcggtctgcaggacagcttgctatcgcgatttgacctcctgtttattatgctcgatcagatggacccagagcaggaccgggaaatttctgatcacgtgctgcggatgcaccgctaccgggcacctggcgaacaggacggtgacgccatgcctcttgggagtgctgtggacatcctcgcaactgacgaccccaacttctctcaggaggatcaacaggatactcagatttacgagaagcacgacaaccttcttcacgggaccaagaagaaaaaggagaagatggtgtcagcagcttttatgaagaagtatatccacgtggctaaaattattaaacccgtgctgactcaggaaagcgccacgtatattgctgaagaatattcgagactacgttctcaggactctatgagctccgacacagctcgcactagtcccgtaaccgcacgaacactggagacactgattcgccttgctaccgcgcatgcaaaggccaggatgagcaaaactgtcgatctccaggatgcagaagaggcagtggaactcgtgcagtacgcttactttaagaaggtgctggagaaggagaagaagaggaagaagagaagcgaggatgaatcagagaccgaagatgaggaggagaagagtcaagaggatcaggaacagaagcgcaagaggaggaaaactcgacagcctgacgctaaggacggcgactcatacgatccgtacgatttcagcgataccgaggaggagatgccccaggtgcacacacccaaaaccgctgactcgcaggagaccaaagagagccagaaggtggaattgtcagaaagtaggctgaaggcgttcaaagtggccctactggatgtgtttcgcgaagcccatgcgcaatccattgggatgaacagactcacagaatctataaaccgcgacagcgaagagccattctccagtgtggagattcaggccgcactctctaaaatgcaagacgataaccaggtgatggtgtctgaaggcatcatcttcctgatttag

SEQ ID NO: 95361 - DNA, 987 bp, Artificial Sequence
  derived and/or modified sequence
agatatcgggctcctggggaacaggacggcgatgcaatgcctctgggttctgctgtggatatactggcaacagatgatccaaacttttctcaggaagaccagcaggatactcagatttacgaaaaacatgacaatttgctgcacgggacaaaaaagaaaaaggagaaaatggtttctgccgctttcatgaagaaatacattcacgtcgccaagattatcaagcccgtacttacccaggaaagcgctacatacatcgcagaggaatacagccgcctgcggtctcaagactccatgtcctccgacactgctagaacatctccagtgactgctcgcacgctggaaaccctgattcgactcgctacagcccatgccaaagccaggatgtccaagactgtcgacctgcaggatgccgaagaagccgtcgaactggtgcagtatgcgtattttaagaaagtgctggagaaggagaaaaaaaggaagaagagatcagaggacgaatcggagacagaagatgaagaggagaaatctcaagaagaccaagaacagaagcggaagcgacgcaagaccaggcagccagacgctaaagacggcgactcttatgacccctacgacttctccgacacggaagaagagatgcctcaggtgcacacacccaaaactgcagacagccaggagactaaagagtcgcaaaaggttgaactgtcggaatccagagatggaatctccccttgttgccccggttggagttggacacctgggttgaaacagtctttctatctgagcctgcctaaaggatgggattataggcacaaacccctgtgcctgttcgatctgattcttttcaacgattgtagggtgagcatggtggaaggtattcagggaggccctttaggttgcgtgcccggtagtagttgcgccgttaatcgacacgagagccctcaccgcatccatcagccagggcagcggagggctctattatttagttag

SEQ ID NO: 95362 - protein, 319 aa, Artificial Sequence
  derived and/or modified sequence
MDETVAEFIKRTILKIPMNELTTILKAWDFLSENQLQTVNFRQRKESVVQHLIHLCEEKRASISDAALLDIICEDVDLFDMKQFKNSFKKILQRALKNVTVSFRETEENAVWIRIAWGTQYTKPNQYKPTYVVYYSQTPYAFTSSSMLRRNTPLLGQALTIASKHHQIVKMDLRSRYLDSLKAIVFKQYNQTFETHNSTTPLQERSLGLDINMDSRIIHENIVEKERVQRITQETFGDYPQPQLEFAQYKLETKFKSGLNGSILAEREEPLRCLIKFSSPHLLEALKSLAPAGIADAPLSPLLTCIPNKRMNYFKIRDK

SEQ ID NO: 95363 - DNA, 960 bp, Artificial Sequence
  derived and/or modified sequence
atggacgagactgtcgctgagtttattaagcgcaccattctgaagattcctatgaatgagttgaccacgattctgaaggcttgggatttcctcagtgagaaccagctgcagacggtgaacttccgacagcgtaaagagtcagtggtgcagcatttaatccacctgtgtgaggagaagagggccagtatcagtgatgcggccctgttggacatcatctgtgaggacgtggacttgtttgacatgaagcagtttaagaactcatttaagaaaatactccaaagagcgctgaagaatgtaaccgtaagcttccgagagacagaggagaatgccgtatggatacggatagcctggggcacccagtacactaaacccaaccagtacaagccgacttacgtggtgtactacagtcagacaccatacgcttttacctcttcatctatgctgagacgaaatacacccttgctgggccaggctctgaccatcgcaagtaaacatcaccaaatcgtcaaaatggatctgagatcacgatatctcgacagtctgaaagccatcgtatttaaacagtataatcagactttcgaaactcataattcgaccactccactacaagaaagaagtctggggcttgacatcaatatggattcccggatcatccatgaaaatatcgttgaaaaggagcgcgtgcagagaatcacacaggaaaccttcggggattatccccagccacagctggaatttgcacagtataaactcgaaacaaagttcaaatccggccttaacgggtccatcctcgcagagagagaggagccgctgaggtgtcttatcaagttctcctccccccacctgctagaggctctcaagtctttggcccccgcaggaattgctgatgctcctttgtctccactgctgacatgcattccgaacaaacgcatgaactatttcaaaattagagacaaatag

SEQ ID NO: 95364 - DNA, 960 bp, Artificial Sequence
  derived and/or modified sequence
atggatgagaccgtggccgagttcatcaagaggaccatcctgaagatccccatgaatgagctgaccaccatcctgaaggcctgggacttcctgtctgagaaccagctgcagacagtgaacttccggcagaggaaggagagcgtggtgcagcacctgatccacctgtgtgaggagaagagggccagcatcagtgatgctgccctgctggacatcatctgtgaagatgtggacctgtttgacatgaagcagttcaagaacagcttcaagaagatcctgcagagggccctgaagaatgtgacagtgtccttccgggagacagaggagaatgctgtgtggatcagaattgcctggggcacccagtacaccaagcccaaccagtacaagcccacctacgtggtgtactacagccagaccccctatgccttcaccagcagctccatgctgcggaggaacacccccctgctgggccaggccctgaccatcgccagcaagcaccaccagatcgtgaagatggacctgcggagccgctacctggacagcctgaaggccatcgtgttcaagcagtacaaccagacctttgagacccacaacagcaccacccccctgcaggagaggagcctgggcctggacatcaacatggacagccgcatcatccacgagaacatcgtggagaaggagcgggtgcagaggatcacccaggagaccttcggggactacccccagccccagctggagtttgcccagtacaagctggagaccaagttcaagagcggcctgaatggcagcatcctggccgagcgggaggagcccctgcgctgcctgatcaagttcagcagcccccacctgctggaggccctgaagagcctggccccagctggcattgctgatgcccccctgagccccctgctgacctgcatccccaacaagaggatgaactacttcaagatccgggacaagtag

SEQ ID NO: 95365 - DNA, 960 bp, Artificial Sequence
  derived and/or modified sequence
atggacgagaccgtggccgagttcatcaagcggaccatcctgaagatccccatgaacgagttgaccaccatcctgaaagcctgggattttctgtccgaaaaccagttgcagaccgtgaatttccgccagagaaaagagtccgtggtccagcacttaattcatttgtgcgaagagaaacgggcaagtatttctgatgcagccctgttggatattatctgtgaagacgttgatctgttcgacatgaaacaattcaaaaactcctttaagaagatcctgcagagggcactcaagaacgtgacagtatcttttagggaaacggaagagaatgctgtttggattcgtatagcgtggggcacacagtatacaaaacctaaccagtacaaacctacttatgtagtgtattactctcaaacaccctacgcgtttacatcctcctctatgctgcggcgcaatacccctctgttaggtcaggccctgactattgcttcaaagcatcaccaaatagtgaaaatggacctaagatctaggtacctggatagtttgaaagcaatcgtgttcaagcaatataatcaaacgtttgaaacccacaatagcacgaccccacttcaggagagatctctgggcctggatatcaatatggacagtagaattatccacgaaaatatagttgagaaagaacgtgtccaaagaatcacacaagaaactttcggagattacccacaaccacagcttgagtttgcccagtacaaattagagacaaagtttaagagcggtttgaacggatccattttagccgagagagaggagcctctgagatgcttgataaagttctcgtccccgcacctgctggaagcgctgaaaagccttgctccggccggaattgccgatgctcccctttcacccctgctaacgtgtattccaaataaacgtatgaattattttaagatcagggataaatag

SEQ ID NO: 95366 - DNA, 960 bp, Artificial Sequence
  derived and/or modified sequence
atggatgagaccgtagcagagttcattaagcggacaatcctcaagattccaatgaatgagctgactactatcttgaaagcttgggatttcctttccgagaatcaactccagaccgtgaacttccggcagcgcaaggagtccgtagtgcagcatttaattcatctgtgtgaggagaagagagcctcaatcagcgacgcagccctcctggacattatatgtgaagacgtggatctgttcgatatgaaacaattcaaaaactcttttaaaaagatcctgcagcgtgcactgaagaacgtgaccgtgtcattcagagagactgaggaaaatgctgtgtggatccggatcgcctgggggacccagtacacgaaaccgaatcaatacaagcctacttacgtggtctattatagccagactccgtatgcatttacctcctcaagcatgttacggaggaacacccctctgttggggcaggctctaaccattgcatctaaacatcatcaaatcgttaagatggacctgagatcacggtacctggattcactgaaagcgatcgtcttcaagcagtacaatcagacgttcgaaacccataactctaccactccactccaggagcggagcctcggtctggatattaatatggatagtcgcattattcatgaaaatattgtcgaaaaagaacgggtccagcgtatcactcaagaaacttttggcgattacccccaaccccaacttgaattcgcccagtataagctggaaacaaagttcaagtccggacttaacggtagcatactggccgagcgggaggaacctctgcgctgtctcataaagttctcatcaccacacctacttgaagcactcaaatcactggctcctgccggaattgctgacgcgccactatccccactgctgacctgtatcccaaataaaagaatgaattatttcaagatcagagacaaatag

SEQ ID NO: 95367 - DNA, 1692 bp, Artificial Sequence
  derived and/or modified sequence
aattggtggctttgaaggcgcggcgagcgggaacagctcttgaggagtgagactgcaggagatgtgggccgtgccaaagagatggatgagactgttgctgagttcatcaagaggaccatcttgaaaatccccatgaatgaactgacaacaatcctgaaggcctgggattttttgtctgaaaatcaactgcagactgtaaatttccgacagagaaaggaatctgtagttcagcacttgatccatctgtgtgaggaaaagcgtgcaagtatcagtgatgctgccctgttagacatcatttgtgaagatgttgacctttttgatatgaaacaatttaaaaattcgttcaagaaaattcttcagagagcattaaaaaatgtgacagtcagcttcagagaaactgaggagaatgcagtctggattcgaattgcctggggaacacagtacacaaagccaaaccagtacaaacctacctacgtggtgtactactcccagactccgtacgccttcacgtcctcctccatgctgaggcgcaatacaccgcttctgggtcaggcgctgacaattgctagcaaacaccatcagattgtgaaaatggacctgagaagtcggtatctggactctcttaaggctattgtttttaaacagtataatcagacctttgaaactcacaactctacgacacctctacaggaaagaagccttggactagatataaatatggattcaaggatcattcatgaaaacatagtagaaaaagagagagtccaacgaataactcaagaaacatttggagattatcctcaaccacaactagaatttgcacaatataagcttgaaacgaaattcaaaagtggtttaaatgggagcatcttggctgagagggaagaacccctccgatgcctaataaagttctctagcccacatcttctggaagcattgaaatccttagcaccagcgggtattgcagatgctccactttctccactgctcacttgcatacccaacaagagaatgaattattttaaaattagagataaataagacgtgcgtggtttcttaagcacagctcctccttcttgatattgcacatgcacttcagttcatggctagctgtatagcttccgtctgtaaacttgtattttcaagaatccttggtattgaatttttagaaatgctcacataattgttgggactgattcattcctccacgatatgcctcctctctctgatatcctgctaactgtagccgttgtggcatttgagatgacaggacatatatatatatggccccacacttgaccttgagtgcctgaatgctctgaaatcaagcatatggcacagcgctcaagacttttgggtttgtgtccttttttctatggctgtctcttctcaattctggagaggtctggttccagtggctggtttccagggattgattcttaagctctggatcacagagagaagcaacaaggaactatactcaactcaaaactttttaggagaatcatgaaattggtctattcaaaggatggagttgagtccattctgttattgttgcaagaggttgcatatttggtgagtcagttatataaaatagtgttcttattgtaaatatgatacttctcataatctattttatcatgtgtataacattcaaactgacaaatatattgacttatgaataaaggtgtc

SEQ ID NO: 95368 - DNA, 960 bp, Artificial Sequence
  derived and/or modified sequence
atggacgagaccgtggccgagttcatcaagagaaccatcctgaagatccccatgaacgagctgaccaccatcctgaaggcctgggacttcctgagcgagaaccagctgcagaccgtgaacttcagacagagaaaggagagcgtggtgcagcacctgatccacctgtgcgaggagaagagagccagcatcagcgacgccgccctgctggacatcatctgcgaggacgtggacctgttcgacatgaagcagttcaagaacagcttcaagaagatcctgcagagagccctgaagaacgtgaccgtgagcttcagagagaccgaggagaacgccgtgtggatcagaatcgcctggggcacccagtacaccaagcccaaccagtacaagcccacctacgtggtgtactacagccagaccccctacgccttcaccagcagcagcatgctgagaagaaacacccccctgctgggccaggccctgaccatcgccagcaagcaccaccagatcgtgaagatggacctgagaagcagatacctggacagcctgaaggccatcgtgttcaagcagtacaaccagaccttcgagacccacaacagcaccacccccctgcaggagagaagcctgggcctggacatcaacatggacagcagaatcatccacgagaacatcgtggagaaggagagagtgcagagaatcacccaggagaccttcggcgactacccccagccccagctggagttcgcccagtacaagctggagaccaagttcaagagcggcctgaacggcagcatcctggccgagagagaggagcccctgagatgcctgatcaagttcagcagcccccacctgctggaggccctgaagagcctggcccccgccggcatcgccgacgcccccctgagccccctgctgacctgcatccccaacaagagaatgaactacttcaagatcagagacaagtag

SEQ ID NO: 95369 - protein, 305 aa, Artificial Sequence
  derived and/or modified sequence
MDETVAEFIKRTILKIPMNELTTILKAWDFLSENQLQTVNFRQRKESVVQHLIHLCEEKRASISDAALLDIIYMQFHQHQKVWEVFQMSKGPGEDVDLFDMKQFKNSFKKILQRALKNVTVSFRETEENAVWIRIAWGTQYTKPNQYKPTYVVYYSQTPYAFTSSSMLRRNTPLLGQTFETHNSTTPLQERSLGLDINMDSRIIHENIVEKERVQRITQETFGDYPQPQLEFAQYKLETKFKSGLNGSILAEREEPLRCLIKFSSPHLLEALKSLAPAGIADAPLSPLLTCIPNKRMNYFKIRDK

SEQ ID NO: 95370 - DNA, 918 bp, Artificial Sequence
  derived and/or modified sequence
atggacgagaccgtcgccgaattcattaagcggactattctcaagatccctatgaatgagttaaccactatcttaaaggcttgggacttcttatcagagaaccaattgcaaactgtgaattttcggcaaaggaaggaaagcgtggtgcagcatttgattcacctttgcgaagagaagagggcttcaatatccgacgccgcgctgctcgatataatctatatgcagttccaccaacaccaaaaggtgtgggaggtgtttcagatgagcaaaggccccggcgaggatgtcgatctcttcgatatgaagcaattcaagaacagcttcaagaaaatcctgcagagagcactaaagaatgtaactgtgtctttccgggagacagaggagaatgcagtctggattcggatagcctgggggacgcagtacaccaagccaaaccagtacaaacccacttatgtggtgtactattctcagaccccttacgcatttacatctagctctatgctgcgccgcaatacacccctgctgggacagactttcgaaacccacaattccacaacacctctgcaagaaaggtcccttggactagatattaacatggattctagaatcatccacgagaatatagttgagaaagaacgcgttcagcggattacgcaagagaccttcggcgactacccgcaaccccaactcgagtttgcccagtataagctagagactaaatttaaaagcgggctaaatggtagcatcctggccgaacgggaagagcccctgcggtgtctgattaaatttagctcgccacacctactggaagcactgaagtctctcgctcctgctggcatagccgatgcaccactgtcacccttgctcacctgcattcctaataagcggatgaactattttaagatccgggataaatag

SEQ ID NO: 95371 - DNA, 918 bp, Artificial Sequence
  derived and/or modified sequence
atggatgagaccgtggccgagttcatcaagaggaccatcctgaagatccccatgaatgagctgaccaccatcctgaaggcctgggacttcctgtctgagaaccagctgcagacagtgaacttccggcagaggaaggagagcgtggtgcagcacctgatccacctgtgtgaggagaagagggccagcatcagtgatgctgccctgctggacatcatctacatgcagttccaccagcaccagaaggtgtgggaggtgttccagatgagcaagggccctggagaagatgtggacctgtttgacatgaagcagttcaagaacagcttcaagaagatcctgcagagggccctgaagaatgtgacagtgtccttccgggagacagaggagaatgctgtgtggatcagaattgcctggggcacccagtacaccaagcccaaccagtacaagcccacctacgtggtgtactacagccagaccccctatgccttcaccagcagctccatgctgcggaggaacacccccctgctgggccagacctttgagacccacaacagcaccacccccctgcaggagaggagcctgggcctggacatcaacatggacagccgcatcatccacgagaacatcgtggagaaggagcgggtgcagaggatcacccaggagaccttcggggactacccccagccccagctggagtttgcccagtacaagctggagaccaagttcaagagcggcctgaatggcagcatcctggccgagcgggaggagcccctgcgctgcctgatcaagttcagcagcccccacctgctggaggccctgaagagcctggccccagctggcattgctgatgcccccctgagccccctgctgacctgcatccccaacaagaggatgaactacttcaagatccgggacaagtag

SEQ ID NO: 95372 - DNA, 918 bp, Artificial Sequence
  derived and/or modified sequence
atggacgagaccgtggccgagttcatcaagcggaccatcctgaagatccctatgaacgaactgacaaccatcctgaaggcctgggacttcctgagcgagaaccagttacagaccgtgaactttagacagaggaaggagtctgtcgtccagcacttgatccacctttgtgaggagaagcgcgccagcatctcggacgcagctctgctcgacatcatctacatgcagttccatcaacaccaaaaggtgtgggaggtgtttcagatgagcaaggggcctggagaagacgtggacttgttcgatatgaaacagttcaaaaacagctttaaaaaaatactccagcgagcgttgaaaaatgtgacggtaagtttccgggagaccgaagagaatgcagtctggatccggattgcctggggcacacagtacaccaagcctaaccaatataaacccacatacgtggtgtactatagccagacaccatatgcatttacctcatctagcatgctacgccgcaacactccactgcttggtcagacctttgagacccacaacagtactactccgctccaggagagaagcttgggactcgatatcaatatggacagcagaatcatccatgagaacatcgtcgagaaagaaagggtacagcggattacacaagagactttcggcgactatccacagccccagttggagttcgcccaatataaattggaaacaaaatttaaatctgggctgaatggttcgattctcgccgagcgtgaggagcctctacgctgcctgattaaattctcatcgccccatctgttggaagccctcaagagccttgcccctgccgggattgccgatgctccgctctctcctcttctcacttgcatcccaaacaagcggatgaattatttcaagatccgcgacaaatag

SEQ ID NO: 95373 - DNA, 918 bp, Artificial Sequence
  derived and/or modified sequence
atggacgagactgtagccgagttcatcaagcgaacaattctcaagattccaatgaacgagttgactactatcttaaaggcctgggactttctgagcgagaaccagcttcagacagtcaatttcaggcagcgcaaagaaagtgtggtgcagcacctgatccacctctgtgaggagaagagggcctcgatcagtgatgccgctctgctggatattatctatatgcagttccatcagcatcaaaaggtctgggaggtgttccaaatgagtaaaggcccaggtgaggatgtcgacctctttgacatgaagcagtttaaaaactctttcaagaagatcctgcagcgagccctaaagaacgtcaccgtatcattccgtgagactgaagagaacgccgtttggatccggatagcatggggcactcagtacactaaacccaaccaatacaagcccacctacgtggtgtactattcacagactccttatgccttcacctcaagctctatgcttaggcgcaacacacctcttctgggtcagactttcgagactcataattccacaaccccgctccaggaacgcagcctggggctggatataaacatggattctaggatcattcatgagaacatcgtcgagaaggagagagtccagagaataactcaagagaccttcggagactatccccaaccccagctggagttcgcccagtataagttagaaaccaaatttaagagcggcctcaacggctcaattttagctgaacgagaagagcctcttagatgtctcatcaagttcagcagtcctcatttgcttgaagcgttaaagtctctggccccagcgggaattgctgacgctccactgagccctttgctgacttgcattccaaataagcggatgaattacttcaaaatccgggataagtag

SEQ ID NO: 95374 - DNA, 971 bp, Artificial Sequence
  derived and/or modified sequence
tcttgaggagtgagactgcaggagatgtgggccgtgccaaagagatggatgagactgttgctgagttcatcaagaggaccatcttgaaaatccccatgaatgaactgacaacaatcctgaaggcctgggattttttgtctgaaaatcaactgcagactgtaaatttccgacagagaaaggaatctgtagttcagcacttgatccatctgtgtgaggaaaagcgtgcaagtatcagtgatgctgccctgttagacatcatttatatgcaatttcatcagcaccagaaagtttgggaagtttttcagatgagtaaaggaccaggtgaagatgttgacctttttgatatgaaacaatttaaaaattcgttcaagaaaattcttcagagagcattaaaaaatgtgacagtcagcttcagagaaactgaggagaatgcagtctggattcgaattgcctggggaacacagtacacaaagccaaaccagtacaaacctacctacgtggtgtactactcccagactccgtacgccttcacgtcctcctccatgctgaggcgcaatacaccgcttctgggtcagacctttgaaactcacaactctacgacacctctacaggaaagaagccttggactagatataaatatggattcaaggatcattcatgaaaacatagtagaaaaagagagagtccaacgaataactcaagaaacatttggagattatcctcaaccacaactagaatttgcacaatataagcttgaaacgaaattcaaaagtggtttaaatgggagcatcttggctgagagggaagaacccctccgatgcctaataaagttctctagcccacatcttctggaagcattgaaatccttagcaccagcgggtattgcagatgctccactttctccactgctcacttgcatacccaacaagagaatgaattattttaaaattagagataaataagacgtgcgt

SEQ ID NO: 95375 - DNA, 918 bp, Artificial Sequence
  derived and/or modified sequence
atggacgagaccgtggccgagttcatcaagagaaccatcctgaagatccccatgaacgagctgaccaccatcctgaaggcctgggacttcctgagcgagaaccagctgcagaccgtgaacttcagacagagaaaggagagcgtggtgcagcacctgatccacctgtgcgaggagaagagagccagcatcagcgacgccgccctgctggacatcatctacatgcagttccaccagcaccagaaggtgtgggaggtgttccagatgagcaagggccccggcgaggacgtggacctgttcgacatgaagcagttcaagaacagcttcaagaagatcctgcagagagccctgaagaacgtgaccgtgagcttcagagagaccgaggagaacgccgtgtggatcagaatcgcctggggcacccagtacaccaagcccaaccagtacaagcccacctacgtggtgtactacagccagaccccctacgccttcaccagcagcagcatgctgagaagaaacacccccctgctgggccagaccttcgagacccacaacagcaccacccccctgcaggagagaagcctgggcctggacatcaacatggacagcagaatcatccacgagaacatcgtggagaaggagagagtgcagagaatcacccaggagaccttcggcgactacccccagccccagctggagttcgcccagtacaagctggagaccaagttcaagagcggcctgaacggcagcatcctggccgagagagaggagcccctgagatgcctgatcaagttcagcagcccccacctgctggaggccctgaagagcctggcccccgccggcatcgccgacgcccccctgagccccctgctgacctgcatccccaacaagagaatgaactacttcaagatcagagacaagtag

SEQ ID NO: 95376 - protein, 377 aa, Artificial Sequence
  derived and/or modified sequence
MSSPGTESAGKSLQYRVDHLLSAVENELQAGSEKGDPTERELRVGLEESELWLRFKELTNEMIVTKNGRRMFPVLKVNVSGLDPNAMYSFLLDFVAADNHRWKYVNGEWVPGGKPEPQAPSCVYIHPDSPNFGAHWMKAPVSFSKVKLTNKLNGGGQIMLNSLHKYEPRIHIVRVGGPQRMITSHCFPETQFIAVTAYQNEEITALKIKYNPFAKAFLDAKERSDHKEMMEEPGDSQQPGYSQSYSDNSPACLSMLQSHDNWSSLGMPAHPSMLPVSHNASPPTSSSQYPSLWSVSNGAVTPGSQAAAVSNGLGAQFFRGSPAHYTPLTHPVSAPSSSGSPLYEGAAAATDIVDSQYDAAAQGRLIASWTPVSPPSM

SEQ ID NO: 95377 - protein, 243 aa, Artificial Sequence
  derived and/or modified sequence
MSSPGTESAGKSLQYRVDHLLSAVENELQAGSEKGDPTERELRVGLEESELWLRFKELTNEMIVTKNGRRMFPVLKVNVSGLDPNAMYSFLLDFVAADNHRWKYVNGEWVPGGKPEPQAPSCVYIHPDSPNFGAHWMKAPVSFSKVKLTNKLNGGGQIMLNSLHKYEPRIHIVRVGGPQRMITSHCFPETQFIAVTAYQNEEITALKIKYNPFAKAFLDAKERSDHKEMMEEPGDSQQPGYSQ

SEQ ID NO: 95378 - DNA, 1134 bp, Artificial Sequence
  derived and/or modified sequence
atgagcagccccggcaccgagagcgccggcaagagcctgcagtacagagtggaccacctgctgagcgccgtggagaacgagctgcaggccggcagcgagaagggcgaccccaccgagagagagctgagagtgggcctggaggagagcgagctgtggctgagattcaaggagctgaccaacgagatgatcgtgaccaagaacggcagaagaatgttccccgtgctgaaggtgaacgtgagcggcctggaccccaacgccatgtacagcttcctgctggacttcgtggccgccgacaaccacagatggaagtacgtgaacggcgagtgggtgcccggcggcaagcccgagccccaggcccccagctgcgtgtacatccaccccgacagccccaacttcggcgcccactggatgaaggcccccgtgagcttcagcaaggtgaagctgaccaacaagctgaacggcggcggccagatcatgctgaacagcctgcacaagtacgagcccagaatccacatcgtgagagtgggcggcccccagagaatgatcaccagccactgcttccccgagacccagttcatcgccgtgaccgcctaccagaacgaggagatcaccgccctgaagatcaagtacaaccccttcgccaaggccttcctggacgccaaggagagaagcgaccacaaggagatgatggaggagcccggcgacagccagcagcccggctacagccagagctacagcgacaacagccccgcctgcctgagcatgctgcagagccacgacaactggagcagcctgggcatgcccgcccaccccagcatgctgcccgtgagccacaacgccagcccccccaccagcagcagccagtaccccagcctgtggagcgtgagcaacggcgccgtgacccccggcagccaggccgccgccgtgagcaacggcctgggcgcccagttcttcagaggcagccccgcccactacacccccctgacccaccccgtgagcgcccccagcagcagcggcagccccctgtacgagggcgccgccgccgccaccgacatcgtggacagccagtacgacgccgccgcccagggcagactgatcgccagctggacccccgtgagcccccccagcatgtag

SEQ ID NO: 95379 - DNA, 732 bp, Artificial Sequence
  derived and/or modified sequence
atgagcagccccggcaccgagagcgccggcaagagcctgcagtacagagtggaccacctgctgagcgccgtggagaacgagctgcaggccggcagcgagaagggcgaccccaccgagagagagctgagagtgggcctggaggagagcgagctgtggctgagattcaaggagctgaccaacgagatgatcgtgaccaagaacggcagaagaatgttccccgtgctgaaggtgaacgtgagcggcctggaccccaacgccatgtacagcttcctgctggacttcgtggccgccgacaaccacagatggaagtacgtgaacggcgagtgggtgcccggcggcaagcccgagccccaggcccccagctgcgtgtacatccaccccgacagccccaacttcggcgcccactggatgaaggcccccgtgagcttcagcaaggtgaagctgaccaacaagctgaacggcggcggccagatcatgctgaacagcctgcacaagtacgagcccagaatccacatcgtgagagtgggcggcccccagagaatgatcaccagccactgcttccccgagacccagttcatcgccgtgaccgcctaccagaacgaggagatcaccgccctgaagatcaagtacaaccccttcgccaaggccttcctggacgccaaggagagaagcgaccacaaggagatgatggaggagcccggcgacagccagcagcccggctacagccagtag

SEQ ID NO: 95380 - DNA, 1134 bp, Artificial Sequence
  derived and/or modified sequence
atgagcagccccggaaccgaatccgccggaaaaagcctgcagtatagagtcgaccaccttctctccgccgtggaaaacgagctgcaggccggatctgagaagggcgaccctaccgaacgcgaactgcgcgtcggcttggaagagagcgaattgtggttgaggtttaaggaacttacgaatgaaatgattgtaacaaagaacggccggcgcatgtttcccgtcctcaaggtaaatgtgtcaggattggacccgaatgccatgtattccttcctgttggactttgtcgctgccgataaccatcgttggaaatacgtcaacggcgagtgggttcctggagggaagccagagccccaggctccatcttgtgtttacattcacccagattccccaaacttcggcgcacactggatgaaggcacccgtcagctttagcaaggtcaagctgaccaacaaactgaacgggggaggacagatcatgttaaacagcttacataagtatgagccgaggattcatatcgttcgagtcggaggcccccagcgaatgatcacatctcattgcttcccagaaacccagttcatcgccgtcacagcttaccagaatgaagaaataaccgctctgaagataaaatacaatcccttcgcgaaagccttcttggacgccaaggaacggtccgaccacaaggagatgatggaagagcctggagattcacaacaacccggatattctcagtcttactctgataatagcccggcttgtctgtctatgttacaaagccacgacaactggtcttctctcggtatgcctgctcacccatccatgctgccagtcagtcacaacgctagcccccctacctcgtccagtcaatacccttctctgtggtccgtttccaatggagccgtgacacccggctcacaagccgccgccgtgagcaacgggctgggagcacagtttttcagaggtagtcctgcgcactacacaccgctaacgcatccagtatctgccccctccagttctggttcgcccctgtatgaaggggcagcggcagcaaccgacatcgtcgactctcaatatgacgccgcagcccagggtaggctgattgcatcttggactcctgtcagccccccatccatgtag

SEQ ID NO: 95381 - DNA, 732 bp, Artificial Sequence
  derived and/or modified sequence
atgagttccccagggacagagagcgcaggcaagtcccttcagtaccgtgtggaccacctgttgtcagccgtagaaaacgagctacaggccggcagtgaaaaaggcgaccctaccgaaagagagctgcgtgtcggtctagaggaaagcgaactttggctacgatttaaagaacttaccaacgaaatgatagttaccaaaaatggtagaaggatgttccctgtcctgaaagtgaatgtgtcggggttggaccctaatgcaatgtattctttcttattggatttcgttgccgctgataaccatcgctggaaatatgtaaacggagaatgggttcccggggggaagccagagcctcaggccccgtcgtgtgtgtacatccatccagactctccgaacttcggtgctcattggatgaaggcacctgtgagtttctctaaggtgaaacttacaaataaattgaacggcggcggccaaatcatgctgaattccctccataaatacgagccgcgtatacacattgtcagggtgggtggcccacagcgtatgattacttctcactgcttccctgaaactcagttcattgccgtgaccgcttaccagaacgaagaaatcaccgccttaaagattaagtataatcctttcgcaaaagcttttctggatgcgaaagagcgaagcgaccacaaagagatgatggaggagccgggtgacagtcagcagcccgggtatagccagtag

SEQ ID NO: 95382 - DNA, 1134 bp, Artificial Sequence
  derived and/or modified sequence
atgagcagccctggaacagagagcgctgggaagagcctgcagtacagagtggaccacctgctgtctgctgtggagaatgagctgcaggccggcagcgagaagggggaccccacagagcgggagctgcgggtgggcctggaggagagcgagctgtggctgcgcttcaaggagctgaccaatgagatgattgtgaccaagaatggaagaaggatgtttcctgtgctgaaggtgaatgtgtctggcctggaccccaatgccatgtacagcttcctgctggactttgtggccgctgacaaccaccgctggaagtatgtgaatggagagtgggtgcctgggggcaagccagagccccaggcccccagctgtgtgtacatccacccagacagccccaactttggagcccactggatgaaggcccctgtgtccttcagcaaggtgaagctgaccaacaagctgaatggaggcggccagatcatgctgaacagcctgcacaagtatgagccccgcatccacatcgtgcgggtgggcggcccccagaggatgatcaccagccactgcttccctgagacccagttcatcgctgtgacagcctaccagaatgaggagatcacagccctgaagatcaagtacaacccctttgccaaggccttcctggatgccaaggagaggagtgaccacaaggagatgatggaggagcccggggacagccagcagcccggctacagccagagctacagcgacaacagccctgcctgcctgtccatgctgcagagccatgacaactggagcagcctgggcatgcctgcccaccccagcatgctgcctgtgagccacaatgccagcccccccaccagcagcagccagtaccccagcctgtggagcgtgtccaatggagctgtgaccccaggcagccaggccgctgctgtgtccaatggcctgggcgcccagttcttccggggcagccctgcccactacacccccctgacccaccctgtgtctgcccccagcagcagcggcagccccctgtatgaaggagctgctgctgccacagacatcgtggacagccagtatgatgctgctgcccagggccgcctcatcgcctcctggacccctgtgagcccccccagcatgtag

SEQ ID NO: 95383 - DNA, 732 bp, Artificial Sequence
  derived and/or modified sequence
atgagcagccctggaacagagagcgctgggaagagcctgcagtacagagtggaccacctgctgtctgctgtggagaatgagctgcaggccggcagcgagaagggggaccccacagagcgggagctgcgggtgggcctggaggagagcgagctgtggctgcgcttcaaggagctgaccaatgagatgattgtgaccaagaatggaagaaggatgtttcctgtgctgaaggtgaatgtgtctggcctggaccccaatgccatgtacagcttcctgctggactttgtggccgctgacaaccaccgctggaagtatgtgaatggagagtgggtgcctgggggcaagccagagccccaggcccccagctgtgtgtacatccacccagacagccccaactttggagcccactggatgaaggcccctgtgtccttcagcaaggtgaagctgaccaacaagctgaatggaggcggccagatcatgctgaacagcctgcacaagtatgagccccgcatccacatcgtgcgggtgggcggcccccagaggatgatcaccagccactgcttccctgagacccagttcatcgctgtgacagcctaccagaatgaggagatcacagccctgaagatcaagtacaacccctttgccaaggccttcctggatgccaaggagaggagtgaccacaaggagatgatggaggagcccggggacagccagcagcccggctacagccagtag

SEQ ID NO: 95384 - DNA, 1134 bp, Artificial Sequence
  derived and/or modified sequence
atgagcagccccggcaccgagagcgccggcaagagcctgcagtacagagtggaccacttgttgtcggcagtggagaacgagctgcaggctggttcggaaaagggggaccccaccgagcgcgaattgcgagtgggcctagaagaaagcgaactgtggctgcgctttaaagagctaaccaatgagatgatagttactaagaacggtcggcgaatgttccccgtgctcaaagtgaatgtatcggggctcgatccaaatgccatgtactcctttttgcttgattttgtcgcggccgacaatcaccgatggaagtacgtgaacggggaatgggttccgggaggaaaacccgagccgcaggccccgagctgtgtctatatacatcccgactcacccaactttggagcccattggatgaaggctcctgtgagcttctccaaagttaagctgaccaataaactgaacggagggggccagataatgttgaattccctgcacaagtacgaaccacgcatccacattgttcgagtgggcgggccacagcgcatgattacttctcattgttttccagagacccagttcatcgctgtcaccgcttatcagaacgaggagatcaccgctctgaagattaagtacaaccccttcgccaaggccttcctggatgcaaaggagaggtcagaccacaaggagatgatggaggagccgggcgactcccaacagccagggtactctcagtcgtattccgacaatagccccgcttgtttgtcaatgctccaaagccacgacaattggtcttctctgggcatgccagcacacccatccatgttgcccgtgagtcacaacgcttcaccaccgacttctagttcccagtatccctccctgtggagcgtgtctaatggcgccgtcacaccaggatcccaagccgctgcagtcagtaatggtctgggcgctcagttttttcgagggagcccagcccactacacaccgctgacacatcctgtgagtgcccccagcagctccgggtcccctctgtatgagggtgctgctgccgccactgatatcgtggacagccagtacgatgctgcagctcagggtaggctaattgcctcctggactcctgtgagccccccaagcatgtag

SEQ ID NO: 95385 - DNA, 732 bp, Artificial Sequence
  derived and/or modified sequence
atgagcagccccggcaccgagagcgccggcaagagcctgcagtaccgggtggatcaccttttgtccgccgtcgaaaacgaactgcaagccggaagtgagaaaggcgaccctacagagcgtgagctgcgcgtgggattagaagagtccgaactctggctcaggtttaaggagttaacgaacgagatgattgtaacgaaaaatggtagacggatgttcccagttctgaaagtcaatgtctcaggactggatcccaacgccatgtacagcttcctcttagattttgttgccgctgacaaccacagatggaagtatgttaatggagaatgggttcccggcgggaaaccagagccacaggccccgtcatgcgtgtatattcaccctgattcaccgaatttcggggcccactggatgaaagccccagtatcattttctaaggtaaagctgacaaacaaactcaatggaggtggacaaataatgcttaactccctccacaaatacgagcccaggatacacatagtgcgtgttgggggaccccagcgcatgatcacgagtcactgcttcccggaaacccagttcatcgcggtgactgcttatcagaacgaagagatcaccgccctcaaaataaaatacaatccgtttgctaaggcttttttggacgcgaaggaaaggtctgatcacaaagagatgatggaagaaccgggcgatagccaacagccgggctattcgcagtag

SEQ ID NO: 95386 - DNA, 1134 bp, Artificial Sequence
  derived and/or modified sequence
atgtctagtccagggacagagtcagccggaaaaagcttgcagtaccgtgtggaccatcttctgtctgcggtggaaaacgagctccaagccggatctgagaaaggcgaccccacagagcgagaattacgggtcgggctagaggagtccgaactgtggctacggtttaaagagctgacaaatgaaatgatagtgactaagaatggaaggcgaatgttccccgtcctgaaagtgaatgtctctggacttgatcctaacgccatgtattcttttctcttggactttgtggcagctgacaatcacaggtggaagtacgttaacggagagtgggtaccaggcggtaaacctgaaccgcaggcaccatcctgcgtgtacatccacccagatagccctaatttcggcgctcactggatgaaagcccctgtctcattcagcaaggtgaaattaacaaataaactcaatggtggtggacaaattatgctcaactcccttcacaagtacgaaccaaggattcacatcgtgcgagttggcggaccccagaggatgattactagccattgctttcccgaaacacagtttatagcagttaccgcatatcaaaatgaggaaataactgccctcaagatcaaatacaatccattcgccaaagctttcctggacgcaaaagaacgctctgaccacaaagagatgatggaggagcccggagactcccagcaacccggatacagtcagtcttactccgataatagcccagcctgcctaagtatgctccagtcccatgacaactggtctagtctcgggatgcctgcacacccgagtatgctgccagtttctcataacgccagccctccaacatcctcatcccaataccccagtctgtggagcgtctccaacggagctgtgacacccggatcacaggcagcggcagtttcaaacgggttaggggcacagtttttccgcggatctcccgctcactatacgcctttaacccatcccgtctctgctcctagctcttcaggttctcccttatacgagggagccgcagccgctacagacatagtggattcgcagtacgatgcagctgctcagggtagactcatcgcctcttggacccctgtgtccccaccttccatgtag

SEQ ID NO: 95387 - DNA, 732 bp, Artificial Sequence
  derived and/or modified sequence
atgagttcgccaggaacggaatccgccggaaagagtctgcaatatagagtggaccacctcctgagtgccgttgagaacgagctgcaggcgggttctgagaaaggagatccaaccgagagagaactgcgtgttggacttgaagagtctgagctatggctgcggtttaaagaactgactaatgagatgattgtcaccaagaacgggagacgaatgtttcccgttttaaaggtgaatgtgagtggcctggaccccaacgcaatgtattcctttctcctggatttcgtggccgcagacaaccaccgatggaagtatgtcaatggcgagtgggtgcccggtggaaagcccgagccacaggccccttcatgtgtatatattcatccggatagccctaatttcggcgcacattggatgaaggccccagttagtttctccaaggtgaaactgacaaacaaactcaatgggggtggccagatcatgctgaacagcctgcataaatatgagcccaggatccacatcgtgcgggtgggaggcccacaaagaatgatcacatctcactgcttcccagagacacagttcattgcggttaccgcctatcagaatgaagagattaccgccctcaagattaaatataacccgtttgctaaggctttcttggatgccaaagaaagatctgaccacaaggagatgatggaggagcccggtgattcccagcaacctggctatagccaatag

SEQ ID NO: 95388 - DNA, 2250 bp, Artificial Sequence
  derived and/or modified sequence
ggcaacaagtcctgtttttataagagagcgaggaggacacttctcagaaggggttgttttgcttttgcttatttccgtccatttccctctctgcgcgcggaccttccttttccagatggtgagagccgcggggacacccgacgccggggcaggctgatccacgatcctgggtgtgcgtaacgccgcctggggctccgtgggcgagggacgtgtggggacaggtgcaccggaaactgccagactggagagttgaggcatcggaggcgcgagaacagcactactactgcggcgagacgagcgcggcgcatcccaaagcccggccaaatgcgctcgtccctgggaggggagggaggcgcgcctggagcggggacagggcggcggccaagagcagggaaggtggatctcaggtagcgagtctgggcttcggggacggcggggaggggagccggacgggaggatgagctcccctggcaccgagagcgcgggaaagagcctgcagtaccgagtggaccacctgctgagcgccgtggagaatgagctgcaggcgggcagcgagaagggcgaccccacagagcgcgaactgcgcgtgggcctggaggagagcgagctgtggctgcgcttcaaggagctcaccaatgagatgatcgtgaccaagaacggcaggaggatgtttccggtgctgaaggtgaacgtgtctggcctggaccccaacgccatgtactccttcctgctggacttcgtggcggcggacaaccaccgctggaagtacgtgaacggggaatgggtgccggggggcaagccggagccgcaggcgcccagctgcgtctacatccaccccgactcgcccaacttcggggcccactggatgaaggctcccgtctccttcagcaaagtcaagctcaccaacaagctcaacggagggggccagatcatgctgaactccttgcataagtatgagcctcgaatccacatagtgagagttgggggtccacagcgcatgatcaccagccactgcttccctgagacccagttcatagcggtgactgcttatcagaacgaggagatcacagctcttaaaattaagtacaatccatttgcaaaagctttccttgatgcaaaggaaagaagtgatcacaaagagatgatggaggaacccggagacagccagcaacctgggtactcccaatcctattctgacaactcacctgcatgtttatccatgctgcaatcccatgacaattggtccagccttggaatgcctgcccatcccagcatgctccccgtgagccacaatgccagcccacctaccagctccagtcagtaccccagcctgtggtctgtgagcaacggcgccgtcaccccgggctcccaggcagcagccgtgtccaacgggctgggggcccagttcttccggggctcccccgcgcactacacacccctcacccatccggtctcggcgccctcttcctcgggatccccactgtacgaaggggcggccgcggccacagacatcgtggacagccagtacgacgccgcagcccaaggccgcctcatagcctcatggacacctgtgtcgccaccttccatgtgaagcagcaaggcccaggtcccgaaagatgcagtgactttttgtcgtggcagccagtggtgactggattgacctactaggtacccagtggcagtctcaggttaagaaggaaatgcagcctcagtaacttccttttcaaagcagtggaggagcacacggcacctttccccagagccccagcatcccttgctcacacctgcagtagcggtgctgtcccaggtggcttacagatgaacccaactgtggagatgatgcagttggcccaacctcactgacggtgaaaaaatgtttgccagggtccagaaactttttttggtttatttctcatacagtgtattggcaactttggcacaccagaatttgtaaactccaccagtcctactttagtgagataaaaagcacactcttaatcttcttccttgttgctttcaagtagttagagttgagctgttaaggacagaataaaatcatagttgaggacagcaggttttagttgaattgaaaatttgactgctctgccccctagaatgtgtgtattttaagcatatgtagctaatctcttgtgttgttaaactataactgtttcatatttttcttttgacaaagtagccaaagacaatcagcagaaagcattttctgcaaaataaacgcaatatgcaaaa

SEQ ID NO: 95389 - DNA, 902 bp, Artificial Sequence
  derived and/or modified sequence
gaggaggacacttctcagaaggggttgttttgcttttgcttatttccgtccatttccctctctgcgcgcggaccttccttttccagatgggcggcggccaagagcagggaaggtggatctcaggtagcgagtctgggcttcggggacggcggggaggggagccggacgggaggatgagctcccctggcaccgagagcgcgggaaagagcctgcagtaccgagtggaccacctgctgagcgccgtggagaatgagctgcaggcgggcagcgagaagggcgaccccacagagcgcgaactgcgcgtgggcctggaggagagcgagctgtggctgcgcttcaaggagctcaccaatgagatgatcgtgaccaagaacggcaggaggatgtttccggtgctgaaggtgaacgtgtctggcctggaccccaacgccatgtactccttcctgctggacttcgtggcggcggacaaccaccgctggaagtacgtgaacggggaatgggtgccggggggcaagccggagccgcaggcgcccagctgcgtctacatccaccccgactcgcccaacttcggggcccactggatgaaggctcccgtctccttcagcaaagtcaagctcaccaacaagctcaacggagggggccagatcatgctgaactccttgcataagtatgagcctcgaatccacatagtgagagttgggggtccacagcgcatgatcaccagccactgcttccctgagacccagttcatagcggtgactgcttatcagaacgaggagatcacagctcttaaaattaagtacaatccatttgcaaaagctttccttgatgcaaaggaaagaagtgatcacaaagagatgatggaggaacccggagacagccagcaacctgggtactcccaa

SEQ ID NO: 95390 - protein, 588 aa, Artificial Sequence
  derived and/or modified sequence
MSSCVSSQPSSNRAAPQDELGGRGSSSSESQKPCEALRGLSSLSIHLGMESFIVVTECEPGCAVDLGLARDRPLEADGQEVPLDTSGSQARPHLSGRKLSLQERSQGGLAAGGSLDMNGRCICPSLPYSPVSSPQSSPRLPRRPTVESHHVSITGMQDCVQLNQYTLKDEIGKGSYGVVKLAYNENDNTYYAMKVLSKKKLIRQAGFPRRPPPRGTRPAPGGCIQPRGPIEQVYQEIAILKKLDHPNVVKLVEVLDDPNEDHLYMVFELVNQGPVMEVPTLKPLSEDQARFYFQDLIKGIEYLHYQKIIHRDIKPSNLLVGEDGHIKIADFGVSNEFKGSDALLSNTVGTPAFMAPESLSETRKIFSGKALDVWAMGVTLYCFVFGQCPFMDERIMCLHSKIKSQALEFPDQPDIAEDLKDLITRMLDKNPESRIVVPEIKLHPWVTRHGAEPLPSEDENCTLVEVTEEEVENSVKHIPSLATVILVKTMIRKRSFGNPFEGSRREERSLSAPGNLLTKKPTRECESLSELKEARQRRQPPGHRPAPRGGGGSALVRGSPCVESCWAPAPGSPARMHPLRPEEAMEPE

SEQ ID NO: 95391 - DNA, 1767 bp, Artificial Sequence
  derived and/or modified sequence
atgtcctcttgcgttagctcacagccttctagcaatagagcggcaccacaggatgaactggggggacgaggaagctcaagctccgagtcgcagaagccctgcgaggcactccgcggacttagctctctgagtattcacctgggtatggaatctttcattgtagtgacagagtgtgagcccggatgcgctgtcgacctcgggctggctagagaccgcccgctagaggcagatggtcaggaggttcccctggacacatctgggtcacaggccaggccacatctgtctggtcgaaagctgagtctgcaggagcggagtcaggggggcctcgctgctgggggctccttggatatgaatggccggtgcatttgcccctcactgccctatagccctgtatcctctcctcagagcagccccagactacctagacgccctactgttgagagccaccatgtgagtatcacagggatgcaggattgcgtacagctgaaccagtacaccctgaaagacgaaataggcaagggatcttatggcgtggtgaagcttgcttataatgaaaacgacaatacatattacgcaatgaaggtgctgtccaaaaaaaaactcatccgccaggcgggttttcccaggcggccgccaccaagaggcacaagacctgccccggggggttgcatccaacctagggggcctattgaacaggtataccaggagatcgctatcctcaaaaaactagatcatcctaacgtcgtgaagcttgtcgaggttctcgatgatcctaacgaggaccatctgtatatggtgttcgagctagtgaatcagggacccgttatggaagtgcctacattgaaacccctgtccgaggatcaggcccggttttattttcaagacctgattaagggaattgagtatctccactaccagaagataatccaccgagatatcaaaccttctaacctgctcgtaggcgaagatgggcatataaagatcgctgatttcggggtgtctaacgagtttaagggttccgatgccttactgtccaacactgtgggcacgccagcattcatggccccagagtccttgtccgagacacgcaagatcttcagtgggaaagcattagatgtatgggctatgggagtgacactgtactgcttcgtattcggacaatgtccatttatggacgaaagaatcatgtgcctacactcgaaaattaagagccaggccctagaatttcctgaccaacccgatatcgcggaggacctgaaggatctgatcaccaggatgctggacaaaaatcctgagagccgaatagtagtccccgaaataaagctacacccgtgggttacccggcacggtgcagagccccttcctagtgaggatgagaactgcactctcgtggaagtcaccgaggaggaagtagagaactctgtaaagcatatcccctccttggccactgtaattctggtgaaaaccatgataaggaagcggagtttcggcaatcctttcgagggttcacggcgcgaagagaggtccttgtccgcccccgggaacctactgaccaagaaacctaccagagagtgtgagtctctgtctgagctgaaggaggctcgacagcgacggcagccccctggccacagacctgcccctaggggcgggggagggtccgcactggtccggggctccccctgtgtggagagctgttgggctcctgcccccgggagtcctgcacgaatgcatcccttgcgtcccgaagaggctatggagcctgagtag

SEQ ID NO: 95392 - DNA, 1767 bp, Artificial Sequence
  derived and/or modified sequence
atgtcttcatgtgtgtcatcccaaccctccagcaatagagccgctccccaggacgagttggggggaagggggagctcatccagcgagtcacagaaaccatgcgaggctttgcggggcctctctagcttatccatccatcttgggatggagagcttcattgtggtgaccgaatgtgaacccggatgcgccgtcgacctggggttagcccgggaccgcccgttggaggccgacggacaagaagtacctctggatacatcaggttctcaggcccgcccacatttgtccggacgaaaactgagtctacaggaaagatctcagggcgggctggcagcaggcgggtcactggatatgaatggtcgatgcatctgtccctcactgccatacagccccgtcagcagccctcagtccagcccgagactgccacgcaggcctactgttgaatcacaccacgtcagtattaccggcatgcaggattgcgtgcagctcaatcaatacacattgaaagatgaaatcggaaagggctcgtacggcgtggtgaagttggcgtacaacgaaaatgataatacctactacgctatgaaagttctgagtaaaaaaaaacttattcggcaggctgggtttcccaggcggcctcccccgcgcggaaccagacccgctcctggaggatgcatacaacccagagggccaatcgaacaggtttatcaggaaatcgccatcctcaaaaaattggaccatcctaatgttgtcaaactggtagaggtgctggacgatccaaacgaggatcatctgtatatggtgttcgaactggtgaatcagggtccagtcatggaggtgcctaccttaaaaccactttcagaggatcaggctagattctactttcaggacctcataaagggtattgaatacctccattaccagaagataattcaccgcgacatcaaaccgtctaatctgctcgtcggagaggatggacatattaagatcgcagacttcggggttagtaatgagttcaagggatccgatgccctgttatccaacactgttggcacccctgcattcatggcgcccgagagcctctcggaaactaggaagattttcagtggtaaggctttggacgtgtgggcgatgggcgtgactctatattgcttcgttttcgggcagtgtcctttcatggatgagcgtattatgtgtttacacagtaaaataaaatcacaggccctcgaattccctgaccagcccgacatagcagaggacctcaaagatttgatcaccaggatgttggacaaaaatcccgaaagtcgaattgtagtgcctgaaataaagctacatccttgggtgacgagacatggtgccgaacctctgccctccgaggacgagaactgtacacttgtggaggtgactgaagaggaggtggaaaactctgttaagcacattccatctctggccactgtgattttagttaagacaatgatccggaagcggtctttcggcaacccctttgaaggatctcggagagaagaacggtctctgtcagctcccggtaatctgttgacgaaaaagccaacccgggagtgcgaaagccttagtgagctcaaagaggcaaggcagcgtagacaaccgcctggccatcgccccgcaccacggggcggaggtggcagcgccttggtccgcggatccccctgtgtggaaagctgctgggctcctgcccccggttcacctgctcggatgcatcccttacgcccagaggaagcaatggaaccagaatag

SEQ ID NO: 95393 - DNA, 1767 bp, Artificial Sequence
  derived and/or modified sequence
atgagcagctgtgtgagcagccagcccagcagcaacagagctgccccccaggatgagctgggcggccggggcagcagcagcagcgagagccagaagccctgtgaggccctgcggggcctgagcagcctgagcatccacctgggcatggagagcttcatcgtggtgacagaatgtgagcccggctgtgctgtggacctgggcctggcccgggaccggcccctggaggctgatggccaggaggtgcccctggacaccagcggcagccaggcccggccccacctgagcggcaggaagctgagcctgcaggagaggagccagggcggcctggccgccggcggcagcctggacatgaatggccgctgcatctgccccagcctgccctacagccctgtgagcagcccccagagcagcccccggctgccccggcggcccaccgtggagagccaccacgtgtccatcaccggcatgcaggactgtgtgcagctgaaccagtacaccctgaaggatgaaattggcaagggcagctatggagtggtgaagctggcctacaatgaaaatgacaacacctactatgccatgaaggtgctgagcaagaagaagctgatccggcaggccggcttcccccggcggcccccaccccggggcaccaggcctgcccctgggggctgcatccagccccggggccccatcgagcaggtgtaccaggagatcgccatcctgaagaagctggaccaccccaacgtggtgaagctggtggaggtgctggatgaccccaatgaagaccacctgtacatggtgtttgagctggtgaaccagggccctgtgatggaggtgcccaccctgaagcccctgtctgaggaccaggcccgcttctacttccaggacctgatcaagggcatcgagtacctgcactaccagaagatcatccaccgggacatcaagcccagcaacctgctggtgggggaggatggccacatcaagattgctgactttggagtgtccaatgagttcaagggcagtgatgccctgctgagcaacacagtgggcaccccagccttcatggcccctgagagcctgtctgagaccaggaagatcttcagcggcaaggccctggatgtgtgggccatgggcgtgaccctgtactgctttgtgtttggccagtgccccttcatggatgagcgcatcatgtgcctgcacagcaagatcaagagccaggccctggagttcccagaccagcctgacattgctgaggacctgaaggacctgatcaccaggatgctggacaagaaccctgagagcagaattgtggtgcctgagatcaagctgcacccctgggtgaccaggcatggagctgagcccctgcccagtgaagatgagaactgcaccctggtggaggtgacagaggaggaggtggagaacagcgtgaagcacatccccagcctggccaccgtcatcctggtgaagaccatgatcaggaagaggagctttggaaacccctttgagggcagccggcgggaggagaggagcctgagcgcccctggcaacctgctgaccaagaagcccacccgggagtgtgagagcctgtctgagctgaaggaggcccggcagaggcggcagcccccaggccacaggcctgccccccggggcggcggcggcagcgccctggtgcggggcagcccctgtgtggagagctgctgggccccagcccctggcagccctgccaggatgcaccccctgcggcctgaggaggccatggagcctgagtag

SEQ ID NO: 95394 - DNA, 1767 bp, Artificial Sequence
  derived and/or modified sequence
atgagcagctgcgtgagcagccagcccagcagcaaccgggccgccccacaagatgaactgggcggacggggcagctcttctagcgaatcccaaaaaccctgtgaagctcttaggggactcagttccttaagtatacaccttgggatggaatcctttatcgtggtcactgagtgtgagccggggtgcgcagtcgatctcgggctggcacgggatcggcctctggaagctgacggtcaggaagtacctctagacaccagcgggagtcaggccaggccccacttatcgggtaggaaactatcactgcaggagagaagtcagggcggactcgccgcaggcggcagtctggacatgaatggtcgatgtatttgtccatccctcccttattcaccagtttcctcgccacagtcttccccccgcctccctcgacgccctacagtggaatcccatcatgtatctatcaccgggatgcaggattgcgtgcaactgaatcagtacacactcaaagatgagatcggcaagggtagctatggagtggttaagctggcctataacgagaatgataatacttattatgcaatgaaggttctgagcaagaagaagctgatcaggcaggccgggttcccgagacggccaccacctcgaggcaccagacctgctcctgggggatgtattcaaccacgcgggcccatagagcaggtttaccaggagatcgcgattctgaaaaaactcgatcatcctaatgtggtgaaattagtggaggtcctggatgacccgaacgaagaccacttgtacatggtcttcgaactcgtgaatcaagggccagtgatggaagttccaacactaaagccattgtcagaagaccaggcccggttttacttccaggatctgataaaggggattgaatacctccattaccagaagatcattcatcgcgatattaaaccttctaatctgcttgtgggggaggatgggcatattaagatagccgattttggcgtgagtaatgaattcaaaggctcggatgccctgttaagcaatactgttggaacaccggcattcatggctccagaaagcctgtccgagaccagaaagattttctcgggcaaagccttagacgtgtgggccatgggagtgacgctctattgcttcgtgttcggtcagtgcccctttatggacgaaagaatcatgtgcctccactctaagatcaagagccaggcactggaattccctgaccagccagatatagccgaagaccttaaggatctcattacccggatgcttgataaaaatccagaaagccgcatagtggttcccgagattaagttacatccctgggttactagacacggcgccgagccactccctagcgaggatgagaactgtaccctggtagaggtcacggaggaagaggttgagaattcggtcaagcacatcccatctctggccacagtaattctggtaaaaaccatgataagaaagagaagtttcggcaaccctttcgagggatctaggcgcgaggagcgcagtctctcggctccaggcaatctcttaactaagaagcccactagagagtgtgaatcactctccgagctgaaagaggccaggcaacgtaggcagccaccagggcaccggccagcgccaagaggcggcggagggagtgccctcgtgcgcggctccccgtgcgtggagtcgtgttgggccccagcccccggaagccctgcacgaatgcaccccctccgtccggaagaggctatggaacctgagtag

SEQ ID NO: 95395 - DNA, 1767 bp, Artificial Sequence
  derived and/or modified sequence
atgagcagctgcgtgagcagccagcccagcagcaaccgggccgccccacaggacgaactggggggcagaggctctagttcctccgaatctcagaagccatgcgaggctctgcggggcctaagctcgctgagtatccaccttggtatggaatcgttcatagtggtgaccgagtgcgagccgggttgtgccgtcgatctaggcctggcacgagatcgacccctcgaggctgacggtcaggaagtgccactggacacgtccggatcccaagcacgaccccacctctcaggccgcaagctgtcacttcaggagcggtcacagggaggtctggcagccggaggttccctggacatgaacggtcgctgtatttgcccatctttgccttacagtcctgtgagctcaccgcagtcaagcccaaggctgccccgcagaccaaccgttgaatcacaccacgtctccattacgggtatgcaggattgcgtgcagctgaatcaatacactttaaaggacgagatcggcaagggcagctatggcgtggtaaaacttgcttataatgagaacgacaacacttactacgctatgaaggtcctcagtaaaaagaaacttattcgacaggctggtttcccacgcagaccaccacctcgggggactcgacccgcacctggcggatgcatccaaccccgtggtcccatagaacaggtctatcaggaaatagctatcctcaaaaaacttgaccaccccaacgtggtgaaacttgtggaggtgttagacgatcccaatgaagatcatttgtatatggtttttgagctggtcaaccagggccctgtgatggaggttccgactcttaagcccctgagcgaagaccaggcgaggttctatttccaagacttaatcaagggtatcgaataccttcactaccagaaaattatacatcgggatattaagcctagcaaccttctcgtgggagaggacggtcatattaagatcgcagacttcggcgtgagtaacgagtttaagggttcagatgccctcctttccaacacagtaggtactcctgccttcatggcacctgaaagtctctccgagacccgaaagatttttagcgggaaagccctggacgtgtgggccatgggcgtgaccctgtattgctttgtttttggacaatgtccctttatggacgagcgtattatgtgtctgcacagcaagataaaatctcaagccctagagttccccgatcaacctgatattgcagaagatctgaaggacttaattaccaggatgctcgataaaaatccggaatctcgaatagtggttccagaaatcaagcttcatccatgggtgacccgccacggggctgagcctctgccatcagaggacgagaactgtaccctggtcgaggtgaccgaagaagaagttgagaactcggtgaagcacatcccttctctggcgaccgtcattttggtgaagacaatgatccgtaaacggtcattcgggaatcccttcgaaggatcccgcagagaggaacggagcctaagcgcaccgggcaacttgcttaccaaaaaacccaccagggagtgcgagtcactttccgagctcaaagaggctaggcagcggcgacaacctcctggccaccgccccgcaccccggggcggaggtggatctgcactagttagaggttcaccctgcgtggaatcttgttgggcgcccgcacctgggagcccagctcgtatgcaccccctgagaccggaagaagctatggagcccgagtag

SEQ ID NO: 95396 - DNA, 2116 bp, Artificial Sequence
  derived and/or modified sequence
gcgcgcccgccgcccgggcggaggagaggagcgcgcggccgcgcagagcaagctgagccgagccgagccgagctgggggcgcagagcgcgggaggcggcggcggcgcggagcccaggtggctccgctgccggatgggagtgccccagtgtgctggatgaagctggcgcatgcaccatgtcatcatgtgtctctagccagcccagcagcaaccgggccgccccccaggatgagctggggggcaggggcagcagcagcagcgaaagccagaagccctgtgaggccctgcggggcctctcatccttgagcatccacctgggcatggagtccttcattgtggtcaccgagtgtgagccgggctgtgctgtggacctcggcttggcgcgggaccggcccctggaggccgatggccaagaggtcccccttgacacctccgggtcccaggcccggccccacctctccggtcgcaagctgtctctgcaagagcggtcccagggtgggctggcagccggtggcagcctggacatgaacggacgctgcatctgcccgtccctgccctactcacccgtcagctccccgcagtcctcgcctcggctgccccggcggccgacagtggagtctcaccacgtctccatcacgggtatgcaggactgtgtgcagctgaatcagtataccctgaaggatgaaattggaaagggctcctatggtgtcgtcaagttggcctacaatgaaaatgacaatacctactatgcaatgaaggtgctgtccaaaaagaagctgatccggcaggccggctttccacgtcgccctccaccccgaggcacccggccagctcctggaggctgcatccagcccaggggccccattgagcaggtgtaccaggaaattgccatcctcaagaagctggaccaccccaatgtggtgaagctggtggaggtcctggatgaccccaatgaggaccatctgtacatggtgttcgaactggtcaaccaagggcccgtgatggaagtgcccaccctcaaaccactctctgaagaccaggcccgtttctacttccaggatctgatcaaaggcatcgagtacttacactaccagaagatcatccaccgtgacatcaaaccttccaacctcctggtcggagaagatgggcacatcaagatcgctgactttggtgtgagcaatgaattcaagggcagtgacgcgctcctctccaacaccgtgggcacgcccgccttcatggcacccgagtcgctctctgagacccgcaagatcttctctgggaaggccttggatgtttgggccatgggtgtgacactatactgctttgtctttggccagtgcccattcatggacgagcggatcatgtgtttacacagtaagatcaagagtcaggccctggaatttccagaccagcccgacatagctgaggacttgaaggacctgatcacccgtatgctggacaagaaccccgagtcgaggatcgtggtgccggaaatcaagctgcacccctgggtcacgaggcatggggcggagccgttgccgtcggaggatgagaactgcacgctggtcgaagtgactgaagaggaggtcgagaactcagtcaaacacattcccagcttggcaaccgtgatcctggtgaagaccatgatacgtaaacgctcctttgggaacccattcgagggcagccggcgggaggaacgctcactgtcagcgcctggaaacttgctcaccaaaaaaccaaccagggaatgtgagtccctgtctgagctcaaggaagcaaggcagcgaagacaacctccagggcaccgacccgccccccgtgggggaggaggaagtgctcttgtgagaggcagtccctgcgtggaaagttgctgggcccccgcccccggctcccccgcacgcatgcatccactgcggccggaggaggccatggagcccgagtagctgcctggatcgctcgacctcgcatgcgcgccgcgtcgcctctggggggctgctgcaccgcgtttccatagcagcatgtcctacggaaacccagcacgtgtgtagagcctcgatcgtcatctctggttatttgttttttcctttgttgttttaaaggggacaaaaaaaaaaaaa

SEQ ID NO: 95397 - DNA, 1767 bp, Artificial Sequence
  derived and/or modified sequence
atgagttcctgcgtatcgtcccaacccagtagcaacagggcggcacctcaggacgaattagggggacggggatcctcctcctccgaaagccagaagccatgcgaggcactccgtgggttatcaagcctgtcaatccacctgggcatggagagcttcatagtcgtgactgagtgcgaaccaggatgcgcggtggatcttggacttgctagagacaggcctctcgaagcagacggccaggaggtaccgctggataccagcggatcccaggcccgtccccacctgtccggacgaaagctctcactccaagagaggtctcaggggggactagcagccggagggtcgttagatatgaacggaaggtgcatttgccccagccttccctattctcctgtgtccagtccgcagtccagccctagacttcccagaagaccaacggtggagtcccatcatgtctctattacagggatgcaagattgtgtgcaactgaatcagtataccctcaaggatgaaattgggaagggctcatatggagtggtcaaactggcctataatgaaaatgataatacctattatgcaatgaaggtgttatctaagaagaagctaatcagacaggctggttttccgaggagaccacccccaaggggcaccaggcccgctccaggcggatgcatccagcctcgaggccctattgagcaggtatatcaggaaatagcgatcctgaaaaagttggatcatcccaacgtagtgaaactggtcgaggtgctcgatgatcccaacgaggatcatctgtacatggtttttgagttagtcaaccaggggcctgtgatggaggtgcccaccctgaagcctctcagtgaggatcaggccaggttctactttcaggatttgatcaaaggtattgagtaccttcattaccagaaaataatccaccgagacattaagccatccaacttactggtgggagaggacggccacatcaagatcgcagactttggcgtgagcaatgagtttaagggctcagacgcattgttatccaataccgtcggaacaccagctttcatggcgcctgagtccctttccgagacacggaagatcttctctgggaaagccctcgacgtctgggcaatgggagtgaccctgtattgctttgttttcggtcagtgcccttttatggacgagcgaatcatgtgtttacactccaagatcaaaagtcaggccttggagttccccgatcagcccgacattgctgaggatcttaaggatttgattaccagaatgctggacaagaatcctgagtcccgaattgtggtaccagagatcaagctgcatccttgggttactcgtcacggagcggagcccttgccctcggaggacgagaattgtactctcgttgaagtgactgaagaagaggtcgaaaacagcgtcaagcatatcccttccctggcgacagtcatcctcgtgaagacgatgattcgcaagagatcattcgggaatcccttcgaggggtcccgcagagaggaacgaagcttatcagctcccggtaatctgttaacgaaaaagccaactcgcgagtgtgagagcctttcagagttgaaagaagcgaggcagcgccgtcagccccctgggcatcgccctgctcctcggggtggaggcggtagcgcactggtccgcggtagcccctgtgtcgaaagctgctgggctcccgcaccgggatctccagccagaatgcacccgctgaggccggaggaggcgatggaacctgagtag

SEQ ID NO: 95398 - DNA, 1767 bp, Artificial Sequence
  derived and/or modified sequence
atgagcagttgtgtatcctcacaaccaagctcaaatagagcggctcctcaggatgaactcggcggaaggggatcgtcctcaagcgaatcgcagaagccctgtgaggcgctgcgcggtttgagtagcctgtctattcatctgggcatggaatcatttatagtagtgactgaatgtgagcccggttgtgccgtggacctgggactggcaagagatagacctctggaagccgacggccaagaggtccctttagacacctcgggatcacaggctcggcctcacctgagtgggcgaaagctttcactccaggagcgttcgcaggggggtctcgccgctggaggaagcctggatatgaacggacggtgtatctgtccttcccttccatatagtccagtgtctagtccccagtccagcccaagactgcctcggcgtcctacagtggagagccaccatgtgtccattaccggtatgcaggactgcgtgcagcttaatcaatacacactgaaagacgagatcggcaaagggtcctacggggtggttaagctggcttataatgagaatgataatacttactacgcgatgaaagtgctttcaaaaaagaagcttataaggcaggctggtttccctcggcgaccccctccacgcggtactcggcctgccccaggaggttgtatacagcccaggggccctatcgaacaggtatatcaggagatcgcaatccttaagaaattagatcacccaaatgtcgtgaagcttgtggaagttttggatgaccctaacgaggaccatctctatatggtatttgagctcgtgaaccaaggcccagtaatggaggtcccaaccctcaagccgctcagtgaggatcaggccagattctattttcaggacttgattaagggtatcgagtacctgcactatcagaaaatcatacacagagatattaagcctagcaacctcttagttggagaggacggtcatataaaaattgcggattttggagtttctaatgaattcaaaggatctgacgccttactatcaaacaccgttggcacacccgcattcatggcaccggagtccctaagcgagacaaggaagatcttttccggaaaagccctggatgtgtgggctatgggagtgacactctactgcttcgtgttcggccagtgcccttttatggatgagaggatcatgtgccttcacagcaagatcaaatctcaggcactggagtttcctgatcagccagatatcgctgaggacctgaaggatctaatcaccaggatgttggataagaaccctgagagcagaatcgttgttcctgagattaaactccacccatgggtaacccgccacggggcagagccactgcccagcgaggacgagaattgtactctggtggaggtaactgaagaagaggtggagaattccgttaaacacatcccctccctggccaccgtgattttggtgaagaccatgatcaggaagaggtccttcggaaatccattcgaagggtctagaagagaggaacgaagcctgtctgctcctggtaatctcttgactaaaaagcccaccagggagtgcgagagcctgagtgagctgaaagaagccagacaacgcaggcagcccccaggacacaggcccgctccaagggggggtggcggatccgctcttgtacgcggatcgccttgtgtggaatcttgttgggccccagcccctggctctccagctagaatgcacccgctgaggccagaagaggccatggagcccgaatag

SEQ ID NO: 95399 - DNA, 5598 bp, Artificial Sequence
  derived and/or modified sequence
gagcctggggaggtcgagggtgcagcgagccgtgatcgtgctactgcactccagcctgggcaacacagagagaccctgtctcaaaacaaacaaacaaacaaacaaacaaacaaacaaaaaaaacaaagaaaaaaaaatgggagtgggccgggcgcggtgactcacacctgtaatcccagcactttcggaggccaaggcgggtggatcacgaggtcaggaattcaagattagcctggacaacatggtgaaaccccatctctacgaaaaatacaaaaattagccaagtatggtggccggcgcctgtaatcccagctactcgggagactgaggcagagaactgcttgaacctgggaggcagaggttgcagtgatccgagatcgcgtcactgcactccagcgtgggcgacagagcgagactccgtttcagaaaagaaaaaaaaaaaaaaaaaaaagggagtcggggtggagctctcattggctcgttgcatgtgagtgtccctacggcctagaaatacaagagaagcacatcggaacgggctggaaatccacccagttaactagagggctttgaaccttttattaacttggaggttgactctcctgtcaactcgattcccttttggctgtttggcagggtcagtgagacatcccctgggtcgctcgaccccgtaggacggttcagggagccctccaggtcttcgtttctcctcttccccgcacagtgctgttatccagctgggggatccaacgcacacttaaggctccagcaaagtggctccgctgccggatgggagtgccccagtgtgctggatgaagctggcgcatgcaccatgtcatcatgtgtctctagccagcccagcagcaaccgggccgccccccaggatgagctggggggcaggggcagcagcagcagcgaaagccagaagccctgtgaggccctgcggggcctctcatccttgagcatccacctgggcatggagtccttcattgtggtcaccgagtgtgagccgggctgtgctgtggacctcggcttggcgcgggaccggcccctggaggccgatggccaagaggtcccccttgacacctccgggtcccaggcccggccccacctctccggtcgcaagctgtctctgcaagagcggtcccagggtgggctggcagccggtggcagcctggacatgaacggacgctgcatctgcccgtccctgccctactcacccgtcagctccccgcagtcctcgcctcggctgccccggcggccgacagtggagtctcaccacgtctccatcacgggtatgcaggactgtgtgcagctgaatcagtataccctgaaggatgaaattggaaagggctcctatggtgtcgtcaagttggcctacaatgaaaatgacaatacctactatgcaatgaaggtgctgtccaaaaagaagctgatccggcaggccggctttccacgtcgccctccaccccgaggcacccggccagctcctggaggctgcatccagcccaggggccccattgagcaggtgtaccaggaaattgccatcctcaagaagctggaccaccccaatgtggtgaagctggtggaggtcctggatgaccccaatgaggaccatctgtacatggtgttcgaactggtcaaccaagggcccgtgatggaagtgcccaccctcaaaccactctctgaagaccaggcccgtttctacttccaggatctgatcaaaggcatcgagtacttacactaccagaagatcatccaccgtgacatcaaaccttccaacctcctggtcggagaagatgggcacatcaagatcgctgactttggtgtgagcaatgaattcaagggcagtgacgcgctcctctccaacaccgtgggcacgcccgccttcatggcacccgagtcgctctctgagacccgcaagatcttctctgggaaggccttggatgtttgggccatgggtgtgacactatactgctttgtctttggccagtgcccattcatggacgagcggatcatgtgtttacacagtaagatcaagagtcaggccctggaatttccagaccagcccgacatagctgaggacttgaaggacctgatcacccgtatgctggacaagaaccccgagtcgaggatcgtggtgccggaaatcaagctgcacccctgggtcacgaggcatggggcggagccgttgccgtcggaggatgagaactgcacgctggtcgaagtgactgaagaggaggtcgagaactcagtcaaacacattcccagcttggcaaccgtgatcctggtgaagaccatgatacgtaaacgctcctttgggaacccattcgagggcagccggcgggaggaacgctcactgtcagcgcctggaaacttgctcaccaaaaaaccaaccagggaatgtgagtccctgtctgagctcaaggaagcaaggcagcgaagacaacctccagggcaccgacccgccccccgtgggggaggaggaagtgctcttgtgagaggcagtccctgcgtggaaagttgctgggcccccgcccccggctcccccgcacgcatgcatccactgcggccggaggaggccatggagcccgagtagctgcctggatcgctcgacctcgcatgcgcgccgcgtcgcctctggggggctgctgcaccgcgtttccatagcagcatgtcctacggaaacccagcacgtgtgtagagcctcgatcgtcatctctggttatttgttttttcctttgttgttttaaaggggacaaaaaaaaaaaaaggacttgactccatgacgtcgaccgtggccgctggctggctggacaggcgggtgtgaggagttgcagacccaaacccacgtgcattttgggacaattgctttttaaaacgtttttatgccaaaaatccttcattgtgattttcagaaccacgtcagatataccaagtgactgtgtgtggggtttgacaactgtggaaaggcgagcagaaaactccggcggtctgaggccatggaggtggttgctgcatttgagagggagtagggggctagatgtggctcctagtgcaaaccggaaaccatggcaccttccagagccgtggtctcaaggagtcagagcagggctggccctcagtagctgcagggagctttgatgcaacttatttgtaagaaggatttttaaattttttatgggtagaattgtagtcaggaaaacagaaagggcttgaaatttaataagtgctgctggaaggggattttccaagcctggaagggtattcagcagctgtggtggggaaacatttctcctgaaagactgaacgtgtttcttcatgacagctgctcaaagcaggtttctgagatagctgaccgagctctggtaaatctctttgtcaaattacgaaaacttcagggtgaaatcctatgcttccatgtacattacatggcttaagattaaacaaaaacatttttcaagtctctaactagagtgaactctagagcacagtagttcagaaactatttagagcttccaggatatatttcacagcttcaggcatgtgatcagttagagccgatgaaacctatgcccgcctgtatatatattagcagcttagctagttcataacctgtatattctaaagactgctaaggttttgttttcattttaaatcctagctgattgttgtggtcaatgaaatacccagtttctggagggccaggtgggaaatgctttcactggaccaacacacaaatgatcatcctgaggatctgagcttccctagactccacacaataaccttggggcacccttttagagaagactgttgaaacccacagcactcgttggggtatgaggaaaccagggcttggcacaggaagttcccctttgtagctaaaagtccagaaagaaagggttcatctttttgacttccaactgatattgggaagtttggttgaggttcaagtgtgactccttccagagccacaggtaggggagtgtgaagttgagggggaggaaagctggaaggactctgccttgggagattcccagctctgctttccagcgcttggtggaatctgggctggggaaagacggcaccgggaaactctgcttccccattgtttccatctgatcagctgtggtgtgaggacttctcagacaaaggcaaggcctcgtgcccctgcccagcccattcatggagccctgggccttcttggcttccatagatcctaagctcttgactgtagtttagccagacttgttttgctatcttataagcagttcagaattagggaatgctggttttgaagagcaaaggacaggtagtctagagagggtcgtctggcctgcttgctgggtctttgtaacccagcacttcctcttgccctcctggctttatgtttatggggagaggactcaatagctccaccccttctggcaccagatggggcttggttagtttgcaataagcaccttgcagaggttaaagccagcgggtccctagtcttaggcccagcctgcttgtgtgggctctggcctggcctggtggctggcccagggggcagcagtgcttagagcttctgcagggcttctcttgtttacacagctgcatcagacaatgccatttctccccaccacggaaccttccatctaagatttcttccagggaatgccagcaatcaggcagcacccagctgtgggggcagtggggtgggggagacccacattgatgactttttttttttcttttaatgaagaaacaccaaagaaagctgtggaaaggacctgccccacatgaaaaggataagccaagatggctgtaaacacagagcatttgagctgccactcttggagcacattgatttttcaaaagccagctctgtcaggaaaggaggtgctgttatgagcagctcttccagtgggcaaagaggacgcccataatttcttccattgctagctcatctgtgggaccaatttggtgtaagcaacctgtggcctgcacttgtggcctcgaaggaagcacaaaccctccatccacttcccatttcctctgcccttttccacctcccccttccatcccaccagctgccagtggctcccagaaagccttattgagccccttgttgacacttggggctgcggaggcctctccctactggtctggcctttcctgagaggcaggtcttccgtcctcagagcctttctggaacaaggagaatgcctgtgcaggtggacacacaggcctggcctgtcgctctcacttgtcttccagcggggagcttcacgttgccgagtggaagaaccatgacctccacttgcttccaaggtgctagggaagtttcagggtacgctggttcccctctccagctggaggccgagtttctggggactgcagatttttctactctgtgatcgattcaatgcccgatgcttctgtttcattcccgaccctttctactatgcattttccttttatcaggtgtataaagttaaatactgtgtatttatcactaaaaagtacatgaacttaagagacaactaagcctttcgtgtttttccacaggtgtttaagcttctctgtacagttgaaataaacagacagcaaaatggt

SEQ ID NO: 95400 - DNA, 1767 bp, Artificial Sequence
  derived and/or modified sequence
atgagcagctgcgtgagcagccagcccagcagcaacagagccgccccccaggacgagctgggcggcagaggcagcagcagcagcgagagccagaagccctgcgaggccctgagaggcctgagcagcctgagcatccacctgggcatggagagcttcatcgtggtgaccgagtgcgagcccggctgcgccgtggacctgggcctggccagagacagacccctggaggccgacggccaggaggtgcccctggacaccagcggcagccaggccagaccccacctgagcggcagaaagctgagcctgcaggagagaagccagggcggcctggccgccggcggcagcctggacatgaacggcagatgcatctgccccagcctgccctacagccccgtgagcagcccccagagcagccccagactgcccagaagacccaccgtggagagccaccacgtgagcatcaccggcatgcaggactgcgtgcagctgaaccagtacaccctgaaggacgagatcggcaagggcagctacggcgtggtgaagctggcctacaacgagaacgacaacacctactacgccatgaaggtgctgagcaagaagaagctgatcagacaggccggcttccccagaagacccccccccagaggcaccagacccgcccccggcggctgcatccagcccagaggccccatcgagcaggtgtaccaggagatcgccatcctgaagaagctggaccaccccaacgtggtgaagctggtggaggtgctggacgaccccaacgaggaccacctgtacatggtgttcgagctggtgaaccagggccccgtgatggaggtgcccaccctgaagcccctgagcgaggaccaggccagattctacttccaggacctgatcaagggcatcgagtacctgcactaccagaagatcatccacagagacatcaagcccagcaacctgctggtgggcgaggacggccacatcaagatcgccgacttcggcgtgagcaacgagttcaagggcagcgacgccctgctgagcaacaccgtgggcacccccgccttcatggcccccgagagcctgagcgagaccagaaagatcttcagcggcaaggccctggacgtgtgggccatgggcgtgaccctgtactgcttcgtgttcggccagtgccccttcatggacgagagaatcatgtgcctgcacagcaagatcaagagccaggccctggagttccccgaccagcccgacatcgccgaggacctgaaggacctgatcaccagaatgctggacaagaaccccgagagcagaatcgtggtgcccgagatcaagctgcacccctgggtgaccagacacggcgccgagcccctgcccagcgaggacgagaactgcaccctggtggaggtgaccgaggaggaggtggagaacagcgtgaagcacatccccagcctggccaccgtgatcctggtgaagaccatgatcagaaagagaagcttcggcaaccccttcgagggcagcagaagagaggagagaagcctgagcgcccccggcaacctgctgaccaagaagcccaccagagagtgcgagagcctgagcgagctgaaggaggccagacagagaagacagccccccggccacagacccgcccccagaggcggcggcggcagcgccctggtgagaggcagcccctgcgtggagagctgctgggcccccgcccccggcagccccgccagaatgcaccccctgagacccgaggaggccatggagcccgagtag

SEQ ID NO: 95401 - protein, 556 aa, Artificial Sequence
  derived and/or modified sequence
MSSCVSSQPSSNRAAPQDELGGRGSSSSESQKPCEALRGLSSLSIHLGMESFIVVTECEPGCAVDLGLARDRPLEADGQEVPLDTSGSQARPHLSGRKLSLQERSQGGLAAGGSLDMNGRCICPSLPYSPVSSPQSSPRLPRRPTVESHHVSITGMQDCVQLNQYTLKDEIGKGSYGVVKLAYNENDNTYYAMKVLSKKKLIRQAGFPRRPPPRGTRPAPGGCIQPRGPIEQVYQEIAILKKLDHPNVVKLVEVLDDPNEDHLYMVFELVNQGPVMEVPTLKPLSEDQARFYFQDLIKGIEYLHYQKIIHRDIKPSNLLVGEDGHIKIADFGVSNEFKGSDALLSNTVGTPAFMAPESLSETRKIFSGKALDVWAMGVTLYCFVFGQCPFMDERIMCLHSKIKSQALEFPDQPDIAEDLKDLITRMLDKNPESRIVVPEIKLHPWVTRHGAEPLPSEDENCTLVEVTEEEVENSVKHIPSLATVILVKTMIRKRSFGNPFEGSRREERSLSAPGNLLTKKPTRECESLSELKGTKKKKGLDSMTSTVAAGWLDRRV

SEQ ID NO: 95402 - DNA, 1671 bp, Artificial Sequence
  derived and/or modified sequence
atgagcagctgcgtgagcagccagcccagcagcaacagagccgccccccaggacgagctgggcggcagaggcagcagcagcagcgagagccagaagccctgcgaggccctgagaggcctgagcagcctgagcatccacctgggcatggagagcttcatcgtggtgaccgagtgcgagcccggctgcgccgtggacctgggcctggccagagacagacccctggaggccgacggccaggaggtgcccctggacaccagcggcagccaggccagaccccacctgagcggcagaaagctgagcctgcaggagagaagccagggcggcctggccgccggcggcagcctggacatgaacggcagatgcatctgccccagcctgccctacagccccgtgagcagcccccagagcagccccagactgcccagaagacccaccgtggagagccaccacgtgagcatcaccggcatgcaggactgcgtgcagctgaaccagtacaccctgaaggacgagatcggcaagggcagctacggcgtggtgaagctggcctacaacgagaacgacaacacctactacgccatgaaggtgctgagcaagaagaagctgatcagacaggccggcttccccagaagacccccccccagaggcaccagacccgcccccggcggctgcatccagcccagaggccccatcgagcaggtgtaccaggagatcgccatcctgaagaagctggaccaccccaacgtggtgaagctggtggaggtgctggacgaccccaacgaggaccacctgtacatggtgttcgagctggtgaaccagggccccgtgatggaggtgcccaccctgaagcccctgagcgaggaccaggccagattctacttccaggacctgatcaagggcatcgagtacctgcactaccagaagatcatccacagagacatcaagcccagcaacctgctggtgggcgaggacggccacatcaagatcgccgacttcggcgtgagcaacgagttcaagggcagcgacgccctgctgagcaacaccgtgggcacccccgccttcatggcccccgagagcctgagcgagaccagaaagatcttcagcggcaaggccctggacgtgtgggccatgggcgtgaccctgtactgcttcgtgttcggccagtgccccttcatggacgagagaatcatgtgcctgcacagcaagatcaagagccaggccctggagttccccgaccagcccgacatcgccgaggacctgaaggacctgatcaccagaatgctggacaagaaccccgagagcagaatcgtggtgcccgagatcaagctgcacccctgggtgaccagacacggcgccgagcccctgcccagcgaggacgagaactgcaccctggtggaggtgaccgaggaggaggtggagaacagcgtgaagcacatccccagcctggccaccgtgatcctggtgaagaccatgatcagaaagagaagcttcggcaaccccttcgagggcagcagaagagaggagagaagcctgagcgcccccggcaacctgctgaccaagaagcccaccagagagtgcgagagcctgagcgagctgaagggcaccaagaagaagaagggcctggacagcatgaccagcaccgtggccgccggctggctggacagaagagtgtag

SEQ ID NO: 95403 - DNA, 1671 bp, Artificial Sequence
  derived and/or modified sequence
atgtcgtcatgcgtgtccagccagccctcaagtaatagagccgccccccaagatgaactgggtgggcgcgggtcgagcagctccgagtcacagaaaccctgtgaagcactccgtgggctaagtagcctgtctatccacttgggaatggaaagctttatagtcgtgacagagtgtgagcccggctgtgccgtggatttgggccttgcccgtgaccggcccttggaggctgatgggcaagaggttccactggacacgtccggttctcaggcacggcctcatctatccggacgaaagctttctctgcaggaaagaagccaagggggtctggccgctggaggcagtttagacatgaatgggagatgcatatgtccttcattaccctactcacctgtctccagtccccagtcttccccaagattgcctcgaaggcctactgttgagtcccaccatgtgagtattaccggcatgcaagactgcgtccagctgaatcagtatacgttaaaagatgaaatcggtaaggggagttacggggtggtaaagcttgcctacaacgaaaatgacaacacatactacgccatgaaggtcctgagcaagaagaaactgattcggcaagctggattccctagaaggcccccacctaggggcacccgcccggccccagggggttgtatacagccaaggggtcctattgagcaagtgtaccaggagattgccatcttgaagaagctagatcacccgaatgtcgtcaaactagtagaagtcctggacgacccaaatgaagaccacctgtacatggtgttcgaactggtgaatcaggggcccgttatggaagtgccaacgttaaagcccttgagtgaggatcaggcacgattctatttccaggacttgattaaggggatagagtatctacactaccagaaaatcatccaccgcgatattaaaccctctaacctgctggtgggagaagatggacacattaagatagccgattttggagtgtctaacgagttcaagggaagtgacgccctgttgagcaacaccgtcggcacacctgctttcatggctccagagagtctatccgagacaaggaagatcttctccggtaaggccttagacgtttgggcaatgggcgtaacattatattgtttcgtgtttggacaatgcccatttatggatgaaaggattatgtgccttcactcaaagatcaagtcacaggctctggaattcccagatcaaccagacattgctgaagatttaaaggacctcattaccaggatgctcgataagaatcccgagtcccgtatcgttgtccccgagattaaactgcacccatgggtgacccggcacggcgccgaacccctgccgtcagaggatgagaactgcactctagttgaagtgaccgaggaagaggtggaaaattcagtcaagcatattcctagtctcgccaccgtcattttggtcaagaccatgattagaaagcgctcattcggcaacccatttgaaggcagcaggcgcgaggagcgaagcctgtccgcccccggaaatctgcttacgaagaagcccactcgggagtgcgaatcactcagcgagttaaaaggtactaagaaaaaaaagggccttgattccatgacatccaccgtcgccgccgggtggctcgatcggagggtgtag

SEQ ID NO: 95404 - DNA, 1671 bp, Artificial Sequence
  derived and/or modified sequence
atgagcagctgtgtgagcagccagcccagcagcaacagagctgccccccaggatgagctgggcggccggggcagcagcagcagcgagagccagaagccctgtgaggccctgcggggcctgagcagcctgagcatccacctgggcatggagagcttcatcgtggtgacagaatgtgagcccggctgtgctgtggacctgggcctggcccgggaccggcccctggaggctgatggccaggaggtgcccctggacaccagcggcagccaggcccggccccacctgagcggcaggaagctgagcctgcaggagaggagccagggcggcctggccgccggcggcagcctggacatgaatggccgctgcatctgccccagcctgccctacagccctgtgagcagcccccagagcagcccccggctgccccggcggcccaccgtggagagccaccacgtgtccatcaccggcatgcaggactgtgtgcagctgaaccagtacaccctgaaggatgaaattggcaagggcagctatggagtggtgaagctggcctacaatgaaaatgacaacacctactatgccatgaaggtgctgagcaagaagaagctgatccggcaggccggcttcccccggcggcccccaccccggggcaccaggcctgcccctgggggctgcatccagccccggggccccatcgagcaggtgtaccaggagatcgccatcctgaagaagctggaccaccccaacgtggtgaagctggtggaggtgctggatgaccccaatgaagaccacctgtacatggtgtttgagctggtgaaccagggccctgtgatggaggtgcccaccctgaagcccctgtctgaggaccaggcccgcttctacttccaggacctgatcaagggcatcgagtacctgcactaccagaagatcatccaccgggacatcaagcccagcaacctgctggtgggggaggatggccacatcaagattgctgactttggagtgtccaatgagttcaagggcagtgatgccctgctgagcaacacagtgggcaccccagccttcatggcccctgagagcctgtctgagaccaggaagatcttcagcggcaaggccctggatgtgtgggccatgggcgtgaccctgtactgctttgtgtttggccagtgccccttcatggatgagcgcatcatgtgcctgcacagcaagatcaagagccaggccctggagttcccagaccagcctgacattgctgaggacctgaaggacctgatcaccaggatgctggacaagaaccctgagagcagaattgtggtgcctgagatcaagctgcacccctgggtgaccaggcatggagctgagcccctgcccagtgaagatgagaactgcaccctggtggaggtgacagaggaggaggtggagaacagcgtgaagcacatccccagcctggccaccgtcatcctggtgaagaccatgatcaggaagaggagctttggaaacccctttgagggcagccggcgggaggagaggagcctgagcgcccctggcaacctgctgaccaagaagcccacccgggagtgtgagagcctgtctgagctgaagggcaccaagaagaagaagggcctggacagcatgaccagcacagtggccgccggctggctggaccggcgggtgtag

SEQ ID NO: 95405 - DNA, 4450 bp, Artificial Sequence
  derived and/or modified sequence
gcaccatgtcatcatgtgtctctagccagcccagcagcaaccgggccgccccccaggatgagctggggggcaggggcagcagcagcagcgaaagccagaagccctgtgaggccctgcggggcctctcatccttgagcatccacctgggcatggagtccttcattgtggtcaccgagtgtgagccgggctgtgctgtggacctcggcttggcgcgggaccggcccctggaggccgatggccaagaggtcccccttgacacctccgggtcccaggcccggccccacctctccggtcgcaagctgtctctgcaagagcggtcccagggtgggctggcagccggtggcagcctggacatgaacggacgctgcatctgcccgtccctgccctactcacccgtcagctccccgcagtcctcgcctcggctgccccggcggccgacagtggagtctcaccacgtctccatcacgggtatgcaggactgtgtgcagctgaatcagtataccctgaaggatgaaattggaaagggctcctatggtgtcgtcaagttggcctacaatgaaaatgacaatacctactatgcaatgaaggtgctgtccaaaaagaagctgatccggcaggccggctttccacgtcgccctccaccccgaggcacccggccagctcctggaggctgcatccagcccaggggccccattgagcaggtgtaccaggaaattgccatcctcaagaagctggaccaccccaatgtggtgaagctggtggaggtcctggatgaccccaatgaggaccatctgtacatggtgttcgaactggtcaaccaagggcccgtgatggaagtgcccaccctcaaaccactctctgaagaccaggcccgtttctacttccaggatctgatcaaaggcatcgagtacttacactaccagaagatcatccaccgtgacatcaaaccttccaacctcctggtcggagaagatgggcacatcaagatcgctgactttggtgtgagcaatgaattcaagggcagtgacgcgctcctctccaacaccgtgggcacgcccgccttcatggcacccgagtcgctctctgagacccgcaagatcttctctgggaaggccttggatgtttgggccatgggtgtgacactatactgctttgtctttggccagtgcccattcatggacgagcggatcatgtgtttacacagtaagatcaagagtcaggccctggaatttccagaccagcccgacatagctgaggacttgaaggacctgatcacccgtatgctggacaagaaccccgagtcgaggatcgtggtgccggaaatcaagctgcacccctgggtcacgaggcatggggcggagccgttgccgtcggaggatgagaactgcacgctggtcgaagtgactgaagaggaggtcgagaactcagtcaaacacattcccagcttggcaaccgtgatcctggtgaagaccatgatacgtaaacgctcctttgggaacccattcgagggcagccggcgggaggaacgctcactgtcagcgcctggaaacttgctcaccaaaaaaccaaccagggaatgtgagtccctgtctgagctcaaggggacaaaaaaaaaaaaaggacttgactccatgacgtcgaccgtggccgctggctggctggacaggcgggtgtgaggagttgcagacccaaacccacgtgcattttgggacaattgctttttaaaacgtttttatgccaaaaatccttcattgtgattttcagaaccacgtcagatataccaagtgactgtgtgtggggtttgacaactgtggaaaggcgagcagaaaactccggcggtctgaggccatggaggtggttgctgcatttgagagggagtagggggctagatgtggctcctagtgcaaaccggaaaccatggcaccttccagagccgtggtctcaaggagtcagagcagggctggccctcagtagctgcagggagctttgatgcaacttatttgtaagaaggatttttaaattttttatgggtagaattgtagtcaggaaaacagaaagggcttgaaatttaataagtgctgctggaaggggattttccaagcctggaagggtattcagcagctgtggtggggaaacatttctcctgaaagactgaacgtgtttcttcatgacagctgctcaaagcaggtttctgagatagctgaccgagctctggtaaatctctttgtcaaattacgaaaacttcagggtgaaatcctatgcttccatgtacattacatggcttaagattaaacaaaaacatttttcaagtctctaactagagtgaactctagagcacagtagttcagaaactatttagagcttccaggatatatttcacagcttcaggcatgtgatcagttagagccgatgaaacctatgcccgcctgtatatatattagcagcttagctagttcataacctgtatattctaaagactgctaaggttttgttttcattttaaatcctagctgattgttgtggtcaatgaaatacccagtttctggagggccaggtgggaaatgctttcactggaccaacacacaaatgatcatcctgaggatctgagcttccctagactccacacaataaccttggggcacccttttagagaagactgttgaaacccacagcactcgttggggtatgaggaaaccagggcttggcacaggaagttcccctttgtagctaaaagtccagaaagaaagggttcatctttttgacttccaactgatattgggaagtttggttgaggttcaagtgtgactccttccagagccacaggtaggggagtgtgaagttgagggggaggaaagctggaaggactctgccttgggagattcccagctctgctttccagcgcttggtggaatctgggctggggaaagacggcaccgggaaactctgcttccccattgtttccatctgatcagctgtggtgtgaggacttctcagacaaaggcaaggcctcgtgcccctgcccagcccattcatggagccctgggccttcttggcttccatagatcctaagctcttgactgtagtttagccagacttgttttgctatcttataagcagttcagaattagggaatgctggttttgaagagcaaaggacaggtagtctagagagggtcgtctggcctgcttgctgggtctttgtaacccagcacttcctcttgccctcctggctttatgtttatggggagaggactcaatagctccaccccttctggcaccagatggggcttggttagtttgcaataagcaccttgcagaggttaaagccagcgggtccctagtcttaggcccagcctgcttgtgtgggctctggcctggcctggtggctggcccagggggcagcagtgcttagagcttctgcagggcttctcttgtttacacagctgcatcagacaatgccatttctccccaccacggaaccttccatctaagatttcttccagggaatgccagcaatcaggcagcacccagctgtgggggcagtggggtgggggagacccacattgatgactttttttttttcttttaatgaagaaacaccaaagaaagctgtggaaaggacctgccccacatgaaaaggataagccaagatggctgtaaacacagagcatttgagctgccactcttggagcacattgatttttcaaaagccagctctgtcaggaaaggaggtgctgttatgagcagctcttccagtgggcaaagaggacgcccataatttcttccattgctagctcatctgtgggaccaatttggtgtaagcaacctgtggcctgcacttgtggcctcgaaggaagcacaaaccctccatccacttcccatttcctctgcccttttccacctcccccttccatcccaccagctgccagtggctcccagaaagccttattgagccccttgttgacacttggggctgcggaggcctctccctactggtctggcctttcctgagaggcaggtcttccgtcctcagagcctttctggaacaaggagaatgcctgtgcaggtggacacacaggcctggcctgtcgctctcacttgtcttccagcggggagcttcacgttgccgagtggaagaaccatgacctccacttgcttccaaggtgctagggaagtttcagggtacgctggttcccctctccagctggaggccgagtttctggggactgcagatttttctactctgtgatcgattcaatgcccgatgcttctgtttcattcccgaccctttctactatgcattttccttttatcaggtgtataaagttaaatactgtgtatttatcactaaaaagtacatgaacttaagagacaactaagcctttcgtgtttttccacaggtgtttaagcttctctgtacagttgaaataaacagacagcaaaatggtgcc

SEQ ID NO: 95406 - DNA, 1671 bp, Artificial Sequence
  derived and/or modified sequence
atgagcagctgcgtgagcagccagcccagcagcaaccgggccgcccctcaagatgagctgggtgggcggggatcctcctcgagtgagagccagaaaccttgtgaggccctgaggggactgtcctccttgtctatacatttgggcatggagtcctttatagtggtgactgagtgcgaacccggatgcgccgtggatctgggcttagctagagataggccactcgaagccgatggccaggaggtgcccctcgataccagtggctctcaagcacggccccacctgtctggacggaaattgtcattacaggagcggtcccagggtggattggccgccggtggctcgttggacatgaatggccgctgtatctgcccatcactcccgtatagcccagtatcttccccccagagctccccacggctgcctcgccgaccaacagtggagtcccaccacgtgagcatcaccgggatgcaagactgcgttcagctcaatcaatacaccctgaaagatgaaatcggcaaagggtcttatggggtggtaaagctggcctacaacgagaacgataatacctattatgctatgaaggtgctgagtaagaagaaactgattaggcaggctggatttccccgcaggcccccaccgagggggactcgcccagcaccaggggggtgtatccagcccaggggtccaattgagcaggtgtatcaggagatcgcaatccttaaaaagctggatcatccaaatgtagttaaactggtagaggttctggatgatcctaacgaggatcacctgtatatggtcttcgagctggtgaatcagggccccgttatggaggttcctaccctgaagcccttatccgaagatcaggcccgcttctactttcaggacctgataaaaggtattgaatatctacactaccaaaaaattattcaccgcgacattaagcccagcaatcttctggtcggtgaggacggccacattaagatcgcagattttggtgtgtctaatgagttcaaaggttcagacgctctgttgtccaacacagtgggaacgccagcattcatggctccagaatcgctctccgagacccgcaaaatcttttccgggaaggccttggacgtgtgggccatgggtgtgactctctactgcttcgtattcgggcaatgccccttcatggatgaacgcatcatgtgcctccactccaaaattaaatctcaagcgctcgagttcccagatcagccggacatagctgaagatcttaaggacctaattacccgcatgttggataagaacccggaatcccgtatagtcgtaccggaaataaaactgcacccctgggttactcggcacggcgcagagccccttcccagcgaagatgaaaattgcacactggtcgaagttaccgaagaggaggttgagaattcagtgaagcacatcccctcgctagcaacagtgattctggtgaaaacgatgattcggaagagaagtttcggcaacccattcgagggcagtcggcgcgaggagaggtccctgagtgctcctgggaatctgttaacaaaaaagcccacacgggagtgtgaatccttatctgagctgaaggggaccaaaaagaagaaaggcctcgactccatgacttccaccgtcgctgccggctggctagacaggagagtgtag

SEQ ID NO: 95407 - DNA, 1671 bp, Artificial Sequence
  derived and/or modified sequence
atgagttcctgtgtgtcttctcagccttcctcaaatagggctgcaccacaggacgaattaggcggtcggggaagttccagcagcgagagccagaaaccgtgcgaggcattaaggggcctgtctagtctaagcatccatctaggcatggagtctttcattgttgtgaccgaatgcgagccgggttgcgctgttgatctgggcttggcccgagatagaccgctggaagctgacggacaggaggtgcctttggatacttcaggttcccaggccaggcctcatctgagtggccgaaaactttcccttcaggagcgcagccagggagggctggctgctggcggttctctggacatgaatgggagatgtatctgcccttcccttccctatagtccagtgtcaagcccacagagttcgcctcgtctgccacggaggccaactgtggaaagccatcacgtttctattacgggcatgcaggattgtgtgcagctcaatcagtatacactcaaggatgagattggtaaaggctcttatggcgtggttaaactggcctataatgaaaacgataacacttactacgcgatgaaagtgcttagtaaaaaaaaactaattcgacaggcaggctttccccgtagacccccaccgcgaggaaccaggcccgctccaggaggttgcatacagcccagggggcctattgagcaagtgtaccaggagattgctatcctgaagaaactggaccatccgaacgtggtgaagctggtcgaagtgctggacgaccctaacgaggatcatctatacatggtgtttgagctcgtcaatcaaggcccagtgatggaggtaccgaccctcaaacctctctctgaagatcaggctcggttttattttcaggacctgattaagggcatagagtatctgcattaccagaagatcatccaccgggatatcaaaccaagcaatttgcttgtaggtgaggatggtcacatcaagatagccgactttggcgtgtccaacgagttcaaaggaagcgacgctcttctgagcaacacagttggcacgcctgcattcatggccccagaaagtctgtccgagacccgcaagatcttttccggcaaagcattggacgtgtgggccatgggcgtgactctgtattgtttcgttttcggacaatgccctttcatggatgagaggattatgtgccttcactccaagataaaaagccaggcgctagaattcccagaccaacccgacattgccgaagatctcaaagacctcatcacacggatgctcgataagaatcccgaatcccgcattgtggtgcccgaaataaagcttcacccatgggtgacccgacacggcgctgaacctcttccatctgaagacgagaactgcacactagttgaggtgaccgaggaggaagtggaaaacagtgtaaagcatatccctagtctcgctaccgttatcctggtaaagaccatgatcaggaaaaggtcctttggcaatccgttcgagggttctagacgcgaagaacgctctctctcagccccaggtaatctgttgaccaaaaaacccactagagaatgtgagtctctttcagaacttaagggcaccaaaaagaaaaaaggactggatagcatgacgagcaccgttgcagccggatggctcgacaggcgagtttag

SEQ ID NO: 95408 - protein, 159 aa, Artificial Sequence
  derived and/or modified sequence
MLYRFLARRTNSTFNQVVLKRLFMSRTNRPPLSLSRMIRKMKLPGRENKTAVVVGTITDDVRVQEVPKLKVCALRVTSRARSRILRAGGKILTFDQLALDSPKGCGTVLLSGPRKGREVYRHFGKAPGTPHSHTKPYVRSKGRKFERARGRRASRGYKN

SEQ ID NO: 95409 - DNA, 480 bp, Artificial Sequence
  derived and/or modified sequence
atgctgtacaggtttctggccagacggactaacagcactttcaaccaggtggtgctcaagcgtttgtttatgagtcggactaatagacctccacttagcctcagtagaatgatcagaaaaatgaagcttccaggcagagaaaacaagactgccgtcgtcgtcgggacaattaccgatgacgttagggtgcaggaagttcccaaattgaaagtttgtgccctccgtgtaaccagcagagcaagaagtagaatcctccgcgccggaggcaaaatcttaactttcgatcagctggctctggacagtcctaaagggtgtggcaccgtgttactctctggccctaggaaaggcagagaggtataccgtcactttggaaaagctcctggaacaccccactcacacacaaaaccttacgttcggagcaaggggcggaagtttgaacgcgctcggggaaggcgggcttcacgcgggtacaagaactag

SEQ ID NO: 95410 - DNA, 480 bp, Artificial Sequence
  derived and/or modified sequence
atgctgtaccgcttcctggcccggaggaccaacagcaccttcaaccaggtggtgctgaagaggctcttcatgagcaggaccaaccggccccccctgagcctgagcaggatgatcaggaagatgaagctgcccggccgggagaacaagacagctgtggtggtgggcaccatcacagatgatgtgcgggtgcaggaggtgcccaagctgaaggtgtgtgccctgcgggtgaccagccgggcccggagccgcatcctgcgggccggcggcaagatcctgacctttgaccagctggccctggacagccccaagggctgcggcaccgtgctgctgagcggccccaggaagggccgggaggtgtaccgccactttgggaaggcccctggcaccccccacagccacaccaagccctacgtgcgcagcaaaggaaggaagtttgagcgggcccggggcagaagagccagccggggctacaagaactag

SEQ ID NO: 95411 - DNA, 480 bp, Artificial Sequence
  derived and/or modified sequence
atgctgtaccggttcctggcccggcggaccaacagcaccttcaaccaggtggtgttaaagcggctgttcatgtcccgcaccaacaggcctcctctcagtttgtcaagaatgattcgaaagatgaaactgccaggcagagagaacaagacagctgtggtagtcggtaccattacagatgacgtgcgggttcaagaggtgcccaagctcaaggtgtgtgcgctgagggtgacctctcgggcccgctcccggatcctgcgagccggaggcaagatcctaacattcgatcagctcgccttggacagccctaaaggttgcggtacagtgctgttaagtggacctcgaaaagggcgagaggtataccgtcatttcgggaaagcacccggcactccgcacagccacacaaaaccgtatgtgcgtagcaagggaaggaaatttgaaagagcgcgcggccgacgcgcatctcgaggatataaaaactag

SEQ ID NO: 95412 - DNA, 480 bp, Artificial Sequence
  derived and/or modified sequence
atgctctatagatttctggccaggcgtaccaactccacctttaatcaagtcgtgttgaaacggttatttatgagtagaactaatcgaccacctctgtccctatcacggatgattcgtaaaatgaagctgccgggtagggagaacaagactgcagtggtggtcgggaccatcacggatgacgtcagggtgcaggaggttccgaaactgaaggtgtgtgcgcttagagttaccagccgggcacgttcaagaatcttacgggcagggggaaaaatcctcacattcgatcagctggctttagacagccccaagggatgcgggactgtactcctgtctggccctcgaaaagggagggaggtgtatcggcacttcggcaaggctcctggcaccccacactcccacacgaagccctatgtgcggtctaaggggaggaaatttgagcgagcaagaggtcggagggcgtcacgtggctacaaaaactag

SEQ ID NO: 95413 - DNA, 559 bp, Artificial Sequence
  derived and/or modified sequence
tctctctttccggacctggccgagcaggaggcgccatcatgttatacaggtttctggccagaagaaccaactccacattcaaccaggttgtgttgaagaggttgtttatgagtcgcaccaaccggccgcctctgtccctttcccggatgatccggaagatgaagcttcctggccgggaaaacaagacggccgtggttgtggggaccataactgatgatgtgcgggttcaggaggtacccaaactgaaggtatgtgcactgcgcgtgaccagccgggcccgcagccgcatcctcagggcagggggcaagatcctcactttcgaccagctggccctggactcccctaagggctgtggcactgtcctgctctccggtcctcgcaagggccgagaggtgtaccggcatttcggcaaggccccaggaaccccgcacagccacaccaaaccctacgtccgctccaagggccggaagttcgagcgtgccagaggccgacgggccagccgaggctacaaaaactaaccctggatcctactctcttattaaaaagatttttgctgaca

SEQ ID NO: 95414 - DNA, 480 bp, Artificial Sequence
  derived and/or modified sequence
atgctgtacagattcctggccagaagaaccaacagcaccttcaaccaggtggtgctgaagagactgttcatgagcagaaccaacagaccccccctgagcctgagcagaatgatcagaaagatgaagctgcccggcagagagaacaagaccgccgtggtggtgggcaccatcaccgacgacgtgagagtgcaggaggtgcccaagctgaaggtgtgcgccctgagagtgaccagcagagccagaagcagaatcctgagagccggcggcaagatcctgaccttcgaccagctggccctggacagccccaagggctgcggcaccgtgctgctgagcggccccagaaagggcagagaggtgtacagacacttcggcaaggcccccggcaccccccacagccacaccaagccctacgtgagaagcaagggcagaaagttcgagagagccagaggcagaagagccagcagaggctacaagaactag

SEQ ID NO: 95415 - protein, 76 aa, Artificial Sequence
  derived and/or modified sequence
MTSLMPGAGLLPIPTPNPLTTLGVSLSSLGAIPAAALDPNIATLGEIPQPPLMGNVDPSKIDEIRRTVYVGNLNSQ

SEQ ID NO: 95416 - DNA, 1527 bp, Artificial Sequence
  derived and/or modified sequence
atgaccagcctgatgcccggcgccggcctgctgcccatccccacccccaaccccctgaccaccctgggcgtgagcctgagcagcctgggcgccatccccgccgccgccctggaccccaacatcgccaccctgggcgagatcccccagccccccctgatgggcaacgtggaccccagcaagatcgacgagatcagaagaaccgtgtacgtgggcaacctgaacagccagaccaccaccgccgaccagctgctggagttcttcaagcaggtgggcgaggtgaagttcgtgagaatggccggcgacgagacccagcccaccagattcgccttcgtggagttcgccgaccagaacagcgtgcccagagccctggccttcaacggcgtgatgttcggcgacagacccctgaagatcaaccacagcaacaacgccatcgtgaagccccccgagatgaccccccaggccgccgccaaggagctggaggaggtgatgaagagagtgagagaggcccagagcttcatcagcgccgccatcgagcccgagagcggcaagagcaacgagagaaagggcggcagaagcagaagccacaccagaagcaagagcagaagcagcagcaagagccacagcagaagaaagagaagccagagcaagcacagaagcagaagccacaacagaagcagaagcagacagaaggacagaagaagaagcaagagcccccacaagaagagaagcaagagcagagagagaagaaagagcagaagcagaagccacagcagagacaagagaaaggacaccagagagaagatcaaggagaaggagagagtgaaggagaaggacagagagaaggagagagagagagagaaggagagagagaaggagaaggagagaggcaagaacaaggacagagacaaggagagagagaaggacagagagaaggacaaggagaaggacagagagagagagagagagaaggagcacgagaaggacagagacaaggagaaggagaaggagcaggacaaggagaaggagagagagaaggacagaagcaaggagatcgacgagaagagaaagaaggacaagaagagcagaaccccccccagaagctacaacgccagcagaagaagcagaagcagcagcagagagagaagaagaagaagaagcagaagcagcagcagaagccccagaaccagcaagaccatcaagagaaagagcagcagaagccccagccccagaagcagaaacaagaaggacaagaagagagagaaggagagagaccacatcagcgagagaagagagagagagagaagcaccagcatgagaaagagcagcaacgacagagacggcaaggagaagctggagaagaacagcaccagcctgaaggagaaggagcacaacaaggagcccgacagcagcgtgagcaaggaggtggacgacaaggacgcccccagaaccgaggagaacaagatccagcacaacggcaactgccagctgaacgaggagaacctgagcaccaagaccgaggccgtgtag

SEQ ID NO: 95417 - DNA, 1527 bp, Artificial Sequence
  derived and/or modified sequence
atgacaagtctaatgcccggcgccggactactgccaattccaaccccaaacccattgaccaccttgggtgtatccttgagcagcttaggtgctatcccagctgcagctcttgatcctaatatcgccacacttggggagatccctcagcctcctctcatgggtaacgtggatccctccaaaatcgacgagattcgcaggactgtctacgttggtaacttgaacagccagaccaccaccgccgatcagcttctcgagttcttcaagcaggtgggagaggtgaagtttgtccggatggctggtgacgagacacagcctacacgttttgcttttgttgaatttgcggatcaaaactcagttcctagagccctggcgtttaacggggtgatgtttggggatcggcccctgaaaataaatcactccaataacgcgattgtcaaaccccccgaaatgactccccaagcagccgcaaaagagttagaagaggttatgaagagagtcagagaggcacagtcctttattagtgctgccatagagccagagtcggggaagtccaatgagcgtaagggagggcgctcacgatcccatacgcgtagcaaatctagatcctcctcaaaatctcactcaagacggaaaaggagccagtctaagcaccgcagtagaagccataaccgcagccgatcaagacagaaagaccgtcgcaggagcaaaagtccccataagaagcgttccaagagtagggagaggcggaagtcgaggagccggtcacatagtcgggacaagcgcaaggatacacgcgagaagattaaagaaaaagagcgcgtgaaagaaaaggatagagagaaggaacgggagagggagaaggagcgagagaaagagaaagagagaggaaaaaacaaagatcgtgacaaggaacgagaaaaggatcgcgaaaaggataaagaaaaagacagagaaagagagcgggaaaaggaacatgaaaaagatagggataaagaaaaggagaaagagcaagacaaggaaaaagagcgggaaaaggacagaagcaaggagattgatgagaaaagaaagaaggacaaaaaatctagaaccccaccacgatcctataacgcatccagacgcagccgctcatcatcccgggaacgaaggcgtaggagatcccggtcctcctctagatctccgaggaccagcaagactattaagcggaaaagctccagatccccttcccccaggagccgcaacaagaaagataaaaaaagagaaaaggaacgtgatcatattagtgagcgacgggagcgagagcgtagcacctctatgcggaaatcctccaatgatagagatgggaaggaaaagctagagaaaaacagtacctcccttaaagagaaggaacataacaaggagcctgatagttccgtcagtaaagaggtcgatgacaaggacgcaccacggacggaggaaaataaaatccagcacaacggtaactgccagttgaatgaagagaacctcagcactaagactgaagcggtgtag

SEQ ID NO: 95418 - DNA, 1527 bp, Artificial Sequence
  derived and/or modified sequence
atgaccagcctgatgcctggggccggcctgctgcccatccccacccccaaccccctgaccaccctgggcgtgtccctgagcagcctgggcgccatcccagctgctgccctggaccccaacatcgccaccctgggggagatcccccagccccccctgatgggaaatgtggaccccagcaagattgatgagatcagaagaacagtgtatgtgggcaacctgaacagccagaccaccacagctgaccagctgctggagttcttcaagcaggtgggggaggtgaagtttgtgaggatggctggagatgagacccagcccaccaggtttgcctttgtggagtttgctgaccagaacagcgtgccccgggccctggccttcaacggggtgatgtttggagaccggcccctgaagatcaaccacagcaacaatgccatcgtgaagcccccagagatgaccccccaggccgccgccaaggagctggaggaggtgatgaagagggtgcgggaggcccagagcttcatctctgctgccatcgagcctgagagcggcaagagcaatgaaaggaagggcggccgcagccgcagccacaccaggagcaagagccgcagcagcagcaagagccacagcaggaggaagaggagccagagcaagcacaggagccgcagccacaacagaagccgcagccggcagaaggacagaagaagaagcaagagcccccacaagaagaggagcaagagccgggagaggaggaagagccgcagccgcagccacagccgggacaagaggaaggacacccgggagaagatcaaggagaaggagcgggtgaaggagaaggaccgggagaaggagcgggagcgggagaaggagcgggagaaggagaaggagcggggcaagaacaaggaccgggacaaggagcgggagaaggaccgggagaaggacaaggagaaggaccgggagcgggagcgggagaaggagcacgagaaggaccgggacaaggagaaggagaaggagcaggacaaggagaaggagcgggagaaggacaggagcaaggagattgatgagaagaggaagaaggacaagaagagcaggaccccacccaggagctacaatgccagccgccgcagccgcagcagcagccgggagaggagaagaagaagaagccgcagcagcagccgcagccccaggaccagcaagaccatcaagaggaagagcagccgcagccccagccccaggagcaggaacaagaaggacaagaagcgggagaaggagcgggaccacatcagcgagcggcgggagcgggagaggagcacctccatgaggaagagcagcaatgacagagatggcaaggagaagctggagaagaacagcaccagcctgaaggagaaggagcacaacaaggagccagacagctctgtgtccaaggaggtggatgacaaggatgcccccaggacagaggagaacaagatccagcacaatggaaactgccagctgaatgaggagaacctgagcaccaagacagaagctgtgtag

SEQ ID NO: 95419 - DNA, 1527 bp, Artificial Sequence
  derived and/or modified sequence
atgaccagcctgatgcccggcgccggcctgctgcccatccccacccctaaccctttaaccactctaggcgtttcactgtcatctcttggggccatccccgctgctgcattggatcccaacattgccacactaggagagatcccccagccccccttaatgggaaacgtggacccctcaaaaatcgatgagattaggcggaccgtgtatgtgggtaacctgaacagccagacaactacagcagaccagcttctggaattcttcaaacaagttggggaagtcaaattcgtacggatggcaggtgacgaaacccaacccacccggtttgccttcgtagagtttgcagaccagaattcggtgcctcgggcactagcttttaacggagtgatgtttggtgacaggccgcttaagataaatcacagcaataacgctatagtgaaaccaccggagatgacaccccaggccgcggccaaagaattagaagaagtgatgaagcgtgtccgcgaggctcagagctttatctccgccgctattgagccagaatcaggaaaatctaatgaaaggaaaggcggtcggagccgctcacataccagaagtaagtcacggagctcttctaaaagccatagccgcaggaagaggtcacagtccaaacaccggtcccggagtcacaatcgaagccgctcaagacagaaggacagaaggcgatccaaatctccgcacaagaagagatctaaatcccgtgagaggagaaaatctcggtcacgctcacattcacgtgacaaacggaaggatacacgggaaaaaatcaaggaaaaggaaagagtcaaggaaaaggaccgggagaaagagcgggagcgcgagaaagaacgcgaaaaggagaaagaacggggtaaaaacaaggatcgcgacaaggagcgggagaaagaccgcgaaaaggacaaggaaaaggacagagaaagggagcgcgaaaaagagcacgaaaaggaccgcgataaggagaaagagaaagaacaagacaaagagaaggagagggagaaggacagaagtaaagagattgatgagaagcgtaaaaaggataagaagtcgagaacccctccccgatcctacaacgccagtaggagaagtcggagttccagccgcgagcgaagacgaagacgttctaggagctcctctcggtcacctaggacttctaaaaccattaagaggaagtcgtctcggagcccatccccgcggagccgcaacaaaaaagacaagaagagggagaaggaacgagatcatatttcggaacggagggaaagggaaaggtctacaagcatgaggaagtcaagcaatgatagagatggcaaagagaaactggaaaagaactccacatcactgaaggagaaggagcacaataaggagccagacagctccgtaagcaaggaagtggatgacaaagacgctccacggacagaggaaaacaagatccaacacaatggaaactgccaactaaatgaggaaaacttaagcaccaagactgaggcagtatag

SEQ ID NO: 95420 - DNA, 1527 bp, Artificial Sequence
  derived and/or modified sequence
atgacgtcattaatgcctggggcaggtcttctaccgattccgacccctaaccctcttaccactctcggcgtctctctgtcgtctcttggtgctatacccgcagcagccctagatcccaacatcgctacactgggcgaaatcccgcagcctccactgatgggtaacgtagatccctccaaaattgatgaaatccggaggaccgtgtacgtcgggaacctgaattcccagacaacaactgcagaccagttactggagtttttcaagcaggtgggcgaggttaaattcgtcagaatggctggtgacgagacccaacctactagattcgccttcgtggagttcgctgaccagaactccgtaccccgtgcactagcatttaacggggtgatgtttggggatcgcccacttaagattaatcactctaacaacgcaatcgtgaagcctcccgagatgacaccccaggcggcagcgaaggaactggaggaggttatgaagagggtaagagaggctcagagctttatttctgcagcaatagagccggaatccgggaagtcaaacgagagaaaaggtggcagatcgcgcagccatactcgctccaagagccgttcaagctcgaaaagccactcccgaaggaaaaggtcccagagtaaacatcgatcaagatctcacaaccggagccggtccaggcagaaggacaggagaagatctaaatctcctcacaagaaacgctctaagagcagagaacgacgaaagagcaggtcccgctcacacagccgcgacaagcggaaggacacccgggagaaaatcaaggagaaagaaagggtgaaagaaaaagaccgcgagaaggagcgggagcgggaaaaagagagggagaaagaaaaagagagaggcaaaaacaaggatcgcgataaagagagggagaaggatcgcgaaaaggataaggagaaggatcgcgagagagaacgcgagaaggagcatgaaaaagacagagacaaagaaaaagagaaggagcaggacaaggagaaggagcgggagaaggatcggagtaaggagatcgatgagaagcgcaaaaaggacaaaaagagtcgaacccctccaaggagctacaacgcatccagaagatcacgctcatcatcgcgggaacgccgaagaagaagaagtagatctagctcaaggagtcctaggacaagcaagactataaaaaggaagtcatcccggagtcctagtcctcggagcagaaacaagaaggacaaaaagagggagaaggagcgtgaccatatctcagaacgtagggaaagagaacggtccacaagtatgcgaaaatccagtaatgaccgggatggaaaagaaaaactggaaaaaaattcaacttccctgaaagagaaggaacacaacaaggagccagatagctcagtctccaaggaggtcgacgacaaagatgcgccaaggactgaggagaacaaaattcaacataacggaaactgtcagttgaatgaggagaaccttagcacaaagaccgaggcagtatag

SEQ ID NO: 95421 - protein, 690 aa, Artificial Sequence
  derived and/or modified sequence
MKRSEKPEGYRQMRPKTFPASNYTVSSRQMLQEIRESLRNLSKPSDAAKAEHNMSKMSTEDPRQVRNPPKFGTHHKALQEIRNSLLPFANETNSSRSTSEVNPQMLQDLQAAGFDEDMVIQALQKTNNRSIEAAIEFISKMSYQDPRREQMAAAAARPINASMKPGNVQQSVNRKQSWKGSKESLVPQRHGPPLGESVAYHSESPNSQTDVGRPLSGSGISAFVQAHPSNGQRVNPPPPPQVRSVTPPPPPRGQTPPPRGTTPPPPSWEPNSQTKRYSGNMEYVISRISPVPPGAWQEGYPPPPLNTSPMNPPNQGQRGISSVPVGRQPIIMQSSSKFNFPSGRPGMQNGTGQTDFMIHQNVVPAGTVNRQPPPPYPLTAANGQSPSALQTGGSAAPSSYTNGSIPQSMMVPNRNSHNMELYNISVPGLQTNWPQSSSAPAQSSPSSGHEIPTWQPNIPVRSNSFNNPLGNRASHSANSQPSATTVTAITPAPIQQPVKSMRVLKPELQTALAPTHPSWIPQPIQTVQPSPFPEGTASNVTVMPPVAEAPNYQGPPPPYPKHLLHQNPSVPPYESISKPSKEDQPSLPKEDESEKSYENVDSGDKEKKQITTSPITVRKNKKDEERRESRIQSYSPQAFKFFMEQHVENVLKSHQQRLHRKKQLENEMMRVKPFKMSIFILNHLFAWCLF

SEQ ID NO: 95422 - DNA, 2073 bp, Artificial Sequence
  derived and/or modified sequence
atgaagagaagcgagaagcccgagggctacagacagatgagacccaagaccttccccgccagcaactacaccgtgagcagcagacagatgctgcaggagatcagagagagcctgagaaacctgagcaagcccagcgacgccgccaaggccgagcacaacatgagcaagatgagcaccgaggaccccagacaggtgagaaacccccccaagttcggcacccaccacaaggccctgcaggagatcagaaacagcctgctgcccttcgccaacgagaccaacagcagcagaagcaccagcgaggtgaacccccagatgctgcaggacctgcaggccgccggcttcgacgaggacatggtgatccaggccctgcagaagaccaacaacagaagcatcgaggccgccatcgagttcatcagcaagatgagctaccaggaccccagaagagagcagatggccgccgccgccgccagacccatcaacgccagcatgaagcccggcaacgtgcagcagagcgtgaacagaaagcagagctggaagggcagcaaggagagcctggtgccccagagacacggcccccccctgggcgagagcgtggcctaccacagcgagagccccaacagccagaccgacgtgggcagacccctgagcggcagcggcatcagcgccttcgtgcaggcccaccccagcaacggccagagagtgaacccccccccccccccccaggtgagaagcgtgacccccccccccccccccagaggccagacccccccccccagaggcaccaccccccccccccccagctgggagcccaacagccagaccaagagatacagcggcaacatggagtacgtgatcagcagaatcagccccgtgccccccggcgcctggcaggagggctacccccccccccccctgaacaccagccccatgaacccccccaaccagggccagagaggcatcagcagcgtgcccgtgggcagacagcccatcatcatgcagagcagcagcaagttcaacttccccagcggcagacccggcatgcagaacggcaccggccagaccgacttcatgatccaccagaacgtggtgcccgccggcaccgtgaacagacagcccccccccccctaccccctgaccgccgccaacggccagagccccagcgccctgcagaccggcggcagcgccgcccccagcagctacaccaacggcagcatcccccagagcatgatggtgcccaacagaaacagccacaacatggagctgtacaacatcagcgtgcccggcctgcagaccaactggccccagagcagcagcgcccccgcccagagcagccccagcagcggccacgagatccccacctggcagcccaacatccccgtgagaagcaacagcttcaacaaccccctgggcaacagagccagccacagcgccaacagccagcccagcgccaccaccgtgaccgccatcacccccgcccccatccagcagcccgtgaagagcatgagagtgctgaagcccgagctgcagaccgccctggcccccacccaccccagctggatcccccagcccatccagaccgtgcagcccagccccttccccgagggcaccgccagcaacgtgaccgtgatgccccccgtggccgaggcccccaactaccagggccccccccccccctaccccaagcacctgctgcaccagaaccccagcgtgcccccctacgagagcatcagcaagcccagcaaggaggaccagcccagcctgcccaaggaggacgagagcgagaagagctacgagaacgtggacagcggcgacaaggagaagaagcagatcaccaccagccccatcaccgtgagaaagaacaagaaggacgaggagagaagagagagcagaatccagagctacagcccccaggccttcaagttcttcatggagcagcacgtggagaacgtgctgaagagccaccagcagagactgcacagaaagaagcagctggagaacgagatgatgagagtgaagcccttcaagatgagcatcttcatcctgaaccacctgttcgcctggtgcctgttctag

SEQ ID NO: 95423 - DNA, 2073 bp, Artificial Sequence
  derived and/or modified sequence
atgaaacgatcagagaagccagagggttacaggcagatgaggcctaaaactttcccagccagtaactataccgtgtccagcaggcagatgctgcaagagatccgtgaatctcttaggaacctctccaaacctagcgatgccgccaaagccgagcacaacatgtctaagatgtcgacagaagatccccgtcaggtgcgcaatccaccgaagttcgggacacaccacaaagctctccaagagattcggaacagcctgcttccattcgcaaatgagaccaattcaagcagaagcacctcggaggttaatcctcagatgctccaggacctccaggcggccggttttgatgaagatatggtcattcaggccctccaaaagacgaacaatagaagtatcgaggctgccattgagttcataagcaagatgtcgtaccaggaccctcgtcgcgaacagatggctgctgcagcagcccgtccgattaacgctagcatgaaacctggtaacgtgcagcagtctgtcaatcgcaaacagagctggaaagggagtaaagagtcccttgttccccagagacatggccctcctctcggcgagtccgtggcgtatcactctgaatccccaaatagtcaaactgacgtcggcaggcccttgtccggctccgggatcagcgcctttgtgcaggcccatccttcaaacggccagagggtgaaccccccccctcccccacaagtgcggtccgtcacacctccgccaccgccgcgcgggcaaactcctcccccaagaggcaccacaccaccgcccccatcatgggaacctaattcccagaccaagcggtactccggcaatatggaatatgttattagtagaatctctcccgtgcccccaggggcttggcaggaagggtaccccccccctccactcaatacctcccctatgaatcctcccaaccaggggcagcgtgggattagttctgtcccggtggggcggcagcccattatcatgcagagttcatcaaaatttaatttcccttctggccggcccgggatgcagaatgggactggccagacagatttcatgattcaccagaacgtggtgccagccggcaccgtgaaccgacagccaccacctccttaccccctgacagccgccaatgggcagtcccccagtgctttgcagaccggcggaagcgccgccccatcctcctataccaacggttcaatcccacaaagtatgatggtgcccaatcggaactcccacaacatggaactgtacaatatcagcgtgccaggactgcagacaaattggcctcagtcctctagcgcccctgcacagagctcaccctcaagcggccacgaaatccccacgtggcagccgaatattccagtcaggtctaactcctttaataaccctctgggcaatcgcgcctcccatagcgcgaactctcagccatcagctactacagtcactgcaatcacccctgctcccatccaacagcctgtgaaatctatgcgggtcctcaagccggagctccagacagccctggctccgactcacccatcatggattccccagcccatccagacagtgcaaccatccccctttcccgagggcactgctagcaacgtgactgtgatgccaccagtagccgaggcacccaactatcagggcccccctccgccataccccaagcatttgctgcatcagaacccctctgtgcccccatatgaatccatcagtaaaccctccaaagaagaccagccaagtctgccgaaagaggacgagtcagaaaagtcatacgagaacgtcgactccggcgacaaagaaaaaaaacaaattacaacctctcccattactgttaggaagaacaaaaaggatgaagagaggcgcgagtccagaatccagtcatatagtccacaggcgttcaagttctttatggaacaacatgtggaaaacgtcctcaaatcccatcagcagcggctccaccgaaaaaagcagctggaaaacgagatgatgcgcgttaaaccttttaaaatgagcattttcatcctgaaccatctcttcgcctggtgcctcttctag

SEQ ID NO: 95424 - DNA, 2073 bp, Artificial Sequence
  derived and/or modified sequence
atgaagaggtctgagaagccagagggctaccggcagatgaggcccaagaccttccctgccagcaactacacagtgagcagccggcagatgctgcaggagatccgggagagcctgaggaacctgagcaagcccagtgatgctgccaaggccgagcacaacatgagcaagatgagcacagaggacccccggcaggtgaggaacccccccaagtttggcacccaccacaaggccctgcaggagatccggaacagcctgctgccctttgccaatgagaccaacagcagccgcagcaccagcgaggtgaacccccagatgctgcaggacctgcaggccgccggctttgatgaggacatggtgatccaggccctgcagaagaccaacaacagaagcattgaagctgccatcgagttcatcagcaagatgagctaccaggacccccggcgggagcagatggctgctgctgctgcccggcccatcaatgcctccatgaagccaggaaatgtgcagcagagcgtgaacaggaagcagagctggaagggcagcaaggagagcctggtgccccagagacatggcccccccctgggggagagcgtggcctaccacagcgagagccccaacagccagacagatgtgggccggcccctgagcggcagcggcatcagcgcctttgtgcaggcccaccccagcaatggccagagggtgaaccccccacctccaccccaggtgcgctctgtgaccccacctcctccaccccggggccagaccccaccaccccggggcaccaccccacctcctccttcctgggagcccaacagccagaccaagcgctacagcggcaacatggagtatgtgatcagccgcatcagccctgtgcccccaggggcctggcaggagggctacccacctccacccctgaacaccagccccatgaacccccccaaccagggccagaggggcatcagctctgtgcctgtgggccggcagcccatcatcatgcagagcagcagcaagttcaacttccccagcggccggcccggcatgcagaatggaacaggccagacagacttcatgatccaccagaatgtggtgcctgctggcaccgtgaaccggcagcccccaccaccctaccccctgacagctgccaacggccagagccccagcgccctgcagacaggaggcagcgctgcccccagcagctacaccaacggcagcatcccccagagcatgatggtgcccaacagaaacagccacaacatggagctgtacaacatctctgtgcccggcctgcagaccaactggccccagagcagcagcgccccagcccagagcagccccagcagcggccacgagatccccacctggcagcccaacatccctgtgcgcagcaacagcttcaacaaccccctgggcaacagagccagccacagcgccaacagccagcccagcgccaccaccgtgacagccatcaccccagcccccatccagcagcctgtgaagtccatgagggtgctgaagccagagctgcagacagccctggcccccacccaccccagctggatcccccagcccatccagacagtgcagcccagccccttccctgagggcacagccagcaatgtgacagtgatgcctcctgtggccgaggcccccaactaccagggccccccaccaccctaccccaagcacctgctgcaccagaaccccagcgtgcccccctatgagagcatcagcaagcccagcaaggaggaccagcccagcctgcccaaggaggatgaaagtgagaagagctatgaaaatgtggacagcggggacaaggagaagaagcagatcaccaccagccccatcaccgtgaggaagaacaagaaggatgaggagcggcgggagagccgcatccagagctacagcccccaggccttcaagttcttcatggagcagcacgtggagaatgtgctgaagagccaccagcagaggctgcacaggaagaagcagctggagaatgagatgatgagggtgaagcccttcaagatgagcatcttcatcctgaaccacctgtttgcctggtgcctcttctag

SEQ ID NO: 95425 - DNA, 2567 bp, Artificial Sequence
  derived and/or modified sequence
ctgcagcggagtgcggcggcggcgacactgagtggaaggcaaaatggcggcggcggcggcggtggcctggtgttaaggggagagccaggtcctcacgacccctgggacgggccgcgctggcccgcggcagcccccccgttcgtctccccgctctgccccaccagggatacttggggttgctgggacggactctggccgcctcagcgtccgccctcaggcccgtggccgctgtccaggagctctgctctcccctccagagttaattatttatattgtaaagaattttaacagtcctggggacttccttgaaggatcattttcacttttgctcagaagaaagctctggatctatcaaataaagaagtccttcgtgtgggctacatatatagatgttttcatgaagaggagtgaaaagccagaaggatatagacaaatgaggcctaagacctttcctgccagtaactatactgtcagtagccggcaaatgttacaagaaattcgggaatcccttaggaatttatctaaaccatctgatgctgctaaggctgagcataacatgagtaaaatgtcaaccgaagatcctcgacaagtcagaaatccacccaaatttgggacgcatcataaagccttgcaggaaattcgaaactctctgcttccatttgcaaatgaaacaaattcttctcggagtacttcagaagttaatccacaaatgcttcaagacttgcaagctgctggatttgatgaggatatggttatacaagctcttcagaaaactaacaacagaagtatagaagcagcaattgaattcattagtaaaatgagttaccaagatcctcgacgagagcagatggctgcagcagctgccagacctattaatgccagcatgaaaccagggaatgtgcagcaatcagttaaccgcaaacagagctggaaaggttctaaagaatccttagttcctcagaggcatggcccgccactaggagaaagtgtggcctatcattctgagagtcccaactcacagacagatgtaggaagacctttgtctggatctggtatatcagcatttgttcaagctcaccctagcaacggacagagagtgaaccccccaccaccacctcaagtaaggagtgttactcctccaccacctccaagaggccagactccccctccaagaggtacaactccacctcccccttcatgggaaccaaactctcaaacaaagcgctattctggaaacatggaatacgtaatctcccgaatctctcctgtcccacctggggcatggcaagagggctatcctccaccacctctcaacacttcccccatgaatcctcctaatcaaggacagagaggcattagttctgttcctgttggcagacaaccaatcatcatgcagagttctagcaaatttaactttccatcagggagacctggaatgcagaatggtactggacaaactgatttcatgatacaccaaaatgttgtccctgctggcactgtgaatcggcagccaccacctccatatcctctgacagcagctaatggacaaagcccttctgctttacaaacagggggatctgctgctccttcgtcatatacaaatggaagtattcctcagtctatgatggtgccaaacagaaatagtcataacatggaactatataacattagtgtacctggactgcaaacaaattggcctcagtcatcttctgctccagcccagtcatccccgagcagtgggcatgaaatccctacatggcaacctaacataccagtgaggtcaaattcttttaataacccattaggaaatagagcaagtcactctgctaattctcagccttctgctacaacagtcactgcaattacaccagctcctattcaacagcctgtgaaaagtatgcgtgtattaaaaccagagctacagactgctttagcacctacacacccttcttggataccacagccaattcaaactgttcaacccagtccttttcctgagggaaccgcttcaaatgtgactgtgatgccacctgttgctgaagctccaaactatcaaggaccaccaccaccctacccaaaacatctgctgcaccaaaacccatctgttcctccatacgagtcaatcagtaagcctagcaaagaggatcagccaagcttgcccaaggaagatgagagtgaaaagagttatgaaaatgttgatagtggggataaagaaaagaaacagattacaacttcacctattactgttaggaaaaacaagaaagatgaagagcgaagggaatctcgtattcaaagttattctcctcaagcatttaaattctttatggagcaacatgtagaaaatgtactcaaatctcatcagcagcgtctacatcgtaaaaaacaattagagaatgaaatgatgcgggtaaaaccttttaaaatgtccatttttatacttaatcatctgtttgcttggtgtttattttaaaatattgtgtccagtatttttctttctttttatagctaaataaaatatattatcagttatggaatttaaaagtgaataaatattaaagtacttttga

SEQ ID NO: 95426 - DNA, 2073 bp, Artificial Sequence
  derived and/or modified sequence
atgaagcggagcgagaagcccgagggctaccggcagatgcggcccaagacttttccagcctccaactatacagtttcaagtcggcagatgctgcaggaaatccgcgaatcgctgaggaacctgtctaaaccaagtgatgccgctaaggcagagcacaacatgagcaagatgtcgaccgaggatccgagacaggtgcgcaatccccccaaatttggcacccaccacaaagcactccaggagattagaaactcattgctaccgtttgccaacgagacaaacagcagtcgttctacttccgaggtgaatccacagatgttgcaggacctgcaggccgctggattcgacgaagatatggtgatccaggccttgcagaagactaacaaccggtctatcgaggccgcaatcgagtttataagtaagatgtcctatcaggaccccaggagagaacagatggccgccgccgccgccagacccatcaacgcctcaatgaaaccaggtaacgtgcagcagtccgtcaaccgcaagcagagctggaaggggtccaaggaatcgttggtgccccagagacatgggccccccttgggcgagagcgtggcatatcactccgagagccccaactcccaaaccgacgttggaaggcccctctcggggagtggtatttccgcgtttgtgcaagcccacccttccaacgggcaacgggtcaatcccccccctccccctcaggttcgttcagtgactcctccacctccccccaggggacagacccccccaccccgcgggaccacgccacccccgccctcatgggaacctaattcccagacaaaacggtattcggggaacatggagtatgtgatttccagaatcagccccgtcccacctggggcatggcaggaaggatatcccccacctcccctgaacacatcccccatgaaccccccaaatcagggacagaggggcatttcctccgtgcctgtcggaaggcagcctattattatgcagagctcttccaaattcaatttcccaagcggaaggcctggaatgcagaacggcaccggacagacagattttatgattcatcagaacgtggttcccgctggtactgttaaccggcagcccccccctccataccctctcacagccgcaaacggccagagtccttctgcactccagacaggcggatctgccgcccctagcagctacaccaacggatccatcccccaaagtatgatggtccccaaccggaactcgcacaatatggagctgtataatatctcagtcccgggtctgcagacaaattggccacagtcctcgagtgcacccgcccaaagcagcccctctagcgggcatgagattcccacatggcagccaaacattcccgtcaggtcaaacagcttcaacaaccccttgggaaatcgcgccagccactccgctaattcccaaccgagcgctaccactgtgaccgccattacccctgccccaatccaacagcctgtaaagtctatgagagttcttaagccggaacttcagacggccctggctcccacgcacccaagctggatacctcagccgattcagactgtgcaaccctctcccttcccggagggaaccgccagcaacgtgacggtcatgcctcctgtggctgaagctccaaactaccaaggtccacctcccccatatcccaagcatctcctgcatcagaatccttcggtgcctccgtatgagagcattagtaaaccttctaaggaggaccagccctcactgcctaaggaggacgaatcagaaaagagttacgaaaatgtggactccggtgataaagagaaaaaacagataacaaccagccccataaccgtgcggaaaaacaaaaaagacgaggagaggcgcgaatcgaggatccagtcttattctccacaagcttttaagttctttatggaacagcatgtcgagaatgtgcttaaaagtcatcagcagcgccttcatcggaagaaacaactggagaatgagatgatgagggtgaagcctttcaagatgagtatctttattttaaaccatctgtttgcctggtgtctattctag

SEQ ID NO: 95427 - DNA, 2073 bp, Artificial Sequence
  derived and/or modified sequence
atgaagcggtccgagaagccggaaggatatcggcagatgcgaccaaagaccttccctgcaagtaattataccgtgagctcacgtcagatgctgcaggagataagagagagccttagaaacctgagtaaaccttccgacgccgcaaaggctgaacataatatgagtaagatgtcaaccgaggatcctcgccaggtaaggaatcccccaaaatttgggacgcatcacaaggctctccaggagatccggaattccttgctcccattcgccaatgaaaccaacagcagccggagtacgagtgaagtcaatccacagatgctccaagacctgcaggctgctggttttgacgaggatatggtgatccaggcgctgcaaaagaccaacaacaggtccattgaggctgccatcgagtttatctctaagatgagctaccaggaccccaggagagaacagatggcggcagcagccgctcggcctattaacgctagtatgaagcccggtaacgtgcagcaatccgtaaacaggaagcagtcctggaagggatccaaagagtcactcgtccctcagagacacgggccaccactgggggagagcgtggcttaccatagcgagtccccaaatagccagactgacgtcggtcgacctctgtcagggagtggcatatctgcttttgtgcaagcccacccctccaatggtcagcgcgtgaatcccccaccacctccacaggtcagaagcgtcacaccgccaccaccaccacgaggacagacacccccacccaggggaaccacaccaccccctcctagctgggagccaaatagtcagacgaagagatactcagggaacatggagtacgtgatcagtcggataagcccagtgcccccaggagcctggcaggaagggtacccaccgcctcctttaaacacctctcctatgaacccacccaatcagggccagagaggaatttcatccgtaccggtggggcgtcagcccatcattatgcagtcatcctccaaattcaacttcccgtctggacggcctggtatgcagaatgggaccggccagactgatttcatgatccatcagaacgtcgtccctgctggtacagtgaatcgtcagcctcccccaccttatccactaactgcagccaacggtcagagtccctcagctctgcagaccgggggaagcgctgctcccagttcttacaccaacggctctattcctcagtccatgatggtcccaaaccggaacagtcataatatggaactgtataacataagtgtgcctggcctccaaaccaactggccccagtcctctagcgccccagctcagtctagccccagctctggccatgagatccccacgtggcagccaaatataccggttaggtcgaactcctttaataacccgctcgggaatcgggctagtcactctgctaactcccagccttctgcgactactgttacggctattacccctgctcctatccaacaacccgtgaagagcatgcgagttcttaaacctgaactgcagactgctctggctcccactcatccaagctggattccgcagcctatccagacagtacagccatccccctttcctgaaggcacagcctcaaacgtgaccgtaatgcctccagtggccgaggccccaaattaccagggccctccgccaccatatcctaagcatctcctgcatcagaaccctagcgttcctccctacgagtcaattagcaagcctagcaaggaagaccagccaagcctcccaaaagaagacgagtctgagaagtcatatgagaatgtggactcgggcgacaaggaaaagaaacagataacgacatcaccaatcactgtgcgcaaaaacaagaaagatgaggaaagacgcgagtccaggattcaatcgtattcaccacaggccttcaaatttttcatggaacagcacgtggaaaatgtgctcaagagccatcagcagaggctccatcggaagaagcagctggagaacgaaatgatgagagtcaagcctttcaagatgtcgatctttatcctcaatcatctttttgcatggtgcctcttttag

SEQ ID NO: 95428 - protein, 1068 aa, Artificial Sequence
  derived and/or modified sequence
MAPRKRGGRGISFIFCCFRNNDHPEITYRLRNDSNFALQTMEPALPMPPVEELDVMFSELVDELDLTDKHREAMFALPAEKKWQIYCSKKKDQEENKGATSWPEFYIDQLNSMAARKSLLALEKEEEEERSKTIESLKTALRTKPMRFVTRFIDLDGLSCILNFLKTMDYETSESRIHTSLIGCIKALMNNSQGRAHVLAHSESINVIAQSLSTENIKTKVAVLEILGAVCLVPGGHKKVLQAMLHYQKYASERTRFQTLINDLDKSTGRYRDEVSLKTAIMSFINAVLSQGAGVESLDFRLHLRYEFLMLGIQPVIDKLREHENSTLDRHLDFFEMLRNEDELEFAKRFELVHIDTKSATQMFELTRKRLTHSEAYPHFMSILHHCLQMPYKRSGNTVQYWLLLDRIIQQIVIQNDKGQDPDSTPLENFNIKNVVRMLVNENEVKQWKEQAEKMRKEHNELQQKLEKKERECDAKTQEKEEMMQTLNKMKEKLEKETTEHKQVKQQVADLTAQLHELSRRAVCASIPGGPSPGAPGGPFPSSVPGSLLPPPPPPPLPGGMLPPPPPPLPPGGPPPPPGPPPLGAIMPPPGAPMGLALKKKSIPQPTNALKSFNWSKLPENKLEGTVWTEIDDTKVFKILDLEDLERTFSAYQRQQKEADAIDDTLSSKLKVKELSVIDGRRAQNCNILLSRLKLSNDEIKRAILTMDEQEDLPKDMLEQLLKFVPEKSDIDLLEEHKHELDRMAKADRFLFEMSRINHYQQRLQSLYFKKKFAERVAEVKPKVEAIRSGSEEVFRSGALKQLLEVVLAFGNYMNKGQRGNAYGFKISSLNKIADTKSSIDKNITLLHYLITIVENKYPSVLNLNEELRDIPQAAKVNMTELDKEISTLRSGLKAVETELEYQKSQPPQPGDKFVSVVSQFITVASFSFSDVEDLLAEAKDLFTKAVKHFGEEAGKIQPDEFFGIFDQFLQAVSEAKQENENMRKKKEEEERRARMEAQLKEQRERERKMRKAKENSEESGEFDDLVSALRSGEVFDKDLSKLKRNRKRITNQMTDSSRERPITKLNF

SEQ ID NO: 95429 - protein, 1364 aa, Artificial Sequence
  derived and/or modified sequence
METQLQSIFEEVVKTEVIEEAFPGMFMDTPEDEKTKLISCLGAFRQFWGGLSQESHEQCIQWIVKFIHGQHSPKRISFLYDCLAMAVETGLLPPRLVCESLINSDTLEWERTQLWALTFKLVRKIIGGVDYKGVRDLLKVILEKILTIPNTVSSAVVQQLLAAREVIAYILERNACLLPAYFAVTEIRKLYPEGKLPHWLLGNLVSDFVDTFRPTARINSICGRCSLLPVVNNSGAICNSWKLDPATLRFPLKGLLPYDKDLFEPQTALLRYVLEQPYSRDMVCNMLGLNKQHKQRCPVLEDQLVDLVVYAMERSETEEKFDDGGTSQLLWQHLSSQLIFFVLFQFASFPHMVLSLHQKLAGRGLIKGRDHLMWVLLQFISGSIQKNALADFLPVMKLFDLLYPEKEYIPVPDINKPQSTHAFAMTCIWIHLNRKAQNDNSKLQIPIPHSLRLHHEFLQQSLRNKSLQMNDYKIALLCNAYSTNSECFTLPMGALVETIYGNGIMRIPLPGTNCMASGSITPLPMNLLDSLTVHAKMSLIHSIATRVIKLAHAKSSVALAPALVETYSRLLVYMEIESLGIKGFISQLLPTVFKSHAWGILHTLLEMFSYRMHHIQPHYRVQLLSHLHTLAAVAQTNQNQLHLCVESTALRLITALGSSEVQPQFTRFLSDPKTVLSAESEELNRALILTLARATHVTDFFTGSDSIQGTWCKDILQTIMSFTPHNWASHTLSCFPGPLQAFFKQNNVPQESRFNLKKNVEEEYRKWKSMSNENDIITHFSMQGSPPLFLCLLWKMLLETDHINQIGYRVLERIGARALVAHVRTFADFLVYEFSTSAGGQQLNKCIEILNDMVWKYNIVTLDRLILCLAMRSHEGNEAQVCYFIIQLLLLKPNDFRNRVSDFVKENSPEHWLQNDWHTKHMNYHKKYPEKLYFEGLAEQVDPPVQIQSPYLPIYFGNVCLRFLPVFDIVIHRFLELLPVSKSLETLLDHLGGLYKFHDRPVTYLYNTLHYYEMHLRDRAFLKRKLVHAIIGSLKDNRPQGWCLSDTYLKCAMNAREENPWVPDDTYYCRLIGRLVDTMAGKSPGPFPNCDWRFNEFPNPAAHALHVTCVELMALAVSGKEVGNALLNVVLKSQPLVPRENITAWMNAIGLIITALPEPYWIVLHDRIVSVISSPSLTSETEWVGYPFRLFDFTACHQSYSEMSCSYTLALAHAVWHHSSIGQLSLIPKFLTEVLLPIVKTEFQLLYVYHLVGPFLQRFQQERTRCMIEIGVAFYDMLLNVDQCSTHLNYMDPICDFLYHMKYMFTGDSVKEQVEKIICNLKPALKLRLRFITHISKMEPAAVPPQAMNSGSPAPQSNQVDTLT

SEQ ID NO: 95430 - DNA, 4095 bp, Artificial Sequence
  derived and/or modified sequence
atggaaacacaactgcaaagcatcttcgaggaagtggtaaaaacagaagtaatcgaagaggcttttcccggcatgttcatggacactccagaagacgaaaaaaccaagctgatctcttgcctgggagccttccggcaattttggggtggcctctcacaggagagtcatgagcagtgtatccagtggatcgtgaagttcatccacggacagcattccccaaaaagaatcagctttctgtatgattgtctggctatggctgttgagaccgggctgttgcctccacgcctggtatgcgaatccctaattaactccgataccttggagtgggaacgcacccagctgtgggccttaactttcaaactcgtccggaaaatcattggcggagtggattataaaggggttagggacctgttgaaggtaattctggagaagatccttactatccccaacaccgtgtcatcagcggtggtgcaacagctgctggctgcaagagaggttatagcctacattctggagagaaacgcatgtcttctccccgcctacttcgctgtcactgagatccgaaaactctaccccgaggggaagcttccacattggctgttggggaatctggtgagcgatttcgtggacacctttcgacctactgcccgaatcaatagtatctgcggcaggtgttcactgctccccgtggtgaataatagcggagcaatatgcaattcatggaaactcgatcctgcgactcttcgatttcccctgaaggggctgctgccctacgacaaagatttgttcgaaccacagacagctctgctccgttacgtgctggagcagccgtactctagggacatggtctgtaatatgctgggactgaacaagcagcacaagcaacggtgtccagttctggaagatcagctggtcgacctggttgtgtacgcaatggagaggagtgagaccgaggagaagtttgatgatggtggaacctcccagctcctatggcaacatcttagctcacaactgatattttttgttttgtttcagttcgccagttttccacatatggttttatcgcttcaccagaagctggccggcagagggctaataaaaggaagggaccatttgatgtgggtgcttctgcagtttatcagcggatctatccagaaaaacgctctggccgatttcctgcctgtaatgaaactgttcgatctcttataccctgagaaagagtatatccctgtgcccgatattaacaagccgcagagtacccacgcatttgctatgacgtgtatatggatccacctgaaccggaaggcacagaatgataactctaagctgcaaatccccatcccgcactcgttgcgattgcatcatgagttcctacagcagtcactgagaaataagagcttacagatgaacgactacaaaattgccctgctgtgcaacgcttatagcacaaacagcgagtgttttacgctgcctatgggggccctcgtagagacaatctatggcaatggtattatgaggatcccattacctggcacaaattgcatggccagtggctctattactccactccctatgaacctcctcgattctctgactgtccatgccaaaatgagcctgattcatagcatagctacaagggttataaaattggctcacgcaaaaagctccgtggccctcgcgcctgctctggtagaaacttactcccggctccttgtgtacatggagattgaatccctcgggattaaggggtttatctcacagctgcttccgaccgtgttcaagagccacgcttggggaatcttgcataccttgctagaaatgttctcttaccgtatgcaccatatccaaccccattaccgagtccagctcctctcgcacttacacactctggcagctgttgcccagacgaatcaaaatcagcttcacctctgcgtggaaagtactgccttacggctgatcacagccttaggatctagcgaggtgcagccccagttcacacgatttctaagcgacccaaaaaccgtattgtctgcagagagtgaagaactgaatagagccctgattctgacattagcacgagctactcatgtgaccgacttcttcacgggttccgactccatccagggtacctggtgcaaggacatcctccagactattatgtcattcacaccgcacaactgggcctcccacacgctgagctgtttccctggacccttgcaggcattttttaagcagaataacgtaccccaggagtcccgcttcaaccttaaaaagaatgtggaggaggaatacaggaagtggaaatccatgagtaatgagaacgacattatcacccatttttcaatgcagggcagcccaccactattcctctgtctcttatggaaaatgctccttgaaacggatcacatcaatcaaattggctaccgggttttggagcgaataggagctcgcgctctcgtcgctcacgtcaggaccttcgcagactttctggtgtatgaattttcaactagcgcaggcggacagcagctgaataaatgcatagagatcctgaatgacatggtctggaagtacaacatcgtaacactagaccgacttattttgtgcctggccatgaggagtcacgaagggaacgaggcccaggtctgctacttcatcattcagttacttctgctgaagcctaacgactttaggaaccgggtttcagacttcgttaaagaaaacagcccagaacattggttgcagaatgactggcacacaaagcatatgaactaccacaaaaagtaccctgaaaaattatacttcgaaggcctcgctgaacaggtcgacccacctgtccagattcaatcaccgtacttgcctatctattttggtaatgtttgtttgcgcttcttgcccgtctttgatattgtgatccatagatttctggagttactccccgtatcaaaaagtttggagaccctgctcgaccacctgggagggctctataaattccacgatcgacccgtgacttatttgtacaataccttgcattattacgaaatgcaccttcgagatagagcctttctgaagagaaagcttgtgcacgcaataatcgggtccctgaaagacaatagaccccagggatggtgtctgtctgacacatacctcaagtgtgcgatgaacgccagggaggagaatccatgggtccctgatgatacttattattgccggctaatcgggagactggtggatacaatggccggaaagtctcctggacccttcccgaactgcgattggaggttcaacgaattcccgaacccagctgctcatgcactgcatgtgacttgcgttgagctgatggcattggccgtttcaggaaaggaggtgggaaacgctctcctaaatgtggtcctgaagagccagcccctagtacctcgcgaaaatatcacagcttggatgaatgcaatcggattaattatcaccgcactccccgagccttattggatcgtgctccatgatagaattgtcagtgtgatcagcagtccatctttaacgagcgagacagaatgggtcggctacccttttagactcttcgattttacagcatgccatcagtcctattcggaaatgtcctgttcctacacattagctttggcacacgccgtatggcatcatagtagtatcggccagctgtctctgatccccaaatttctgaccgaagtgctgctgcctatcgtaaaaactgaattccagctgttgtacgtctatcacctggtaggacccttcctgcaacgcttccagcaggaacgaactcggtgcatgatcgagatcggcgttgcattttatgatatgcttttaaacgtagaccagtgttccacccacctaaattatatggacccaatatgtgattttctgtaccacatgaagtacatgttcacgggggattctgttaaagagcaggtagaaaagattatttgcaacctgaagcctgcactaaagctgcggctccgtttcatcacacacatctcgaaaatggagccagctgccgtgcctccacaagccatgaattccggctcccctgcaccacaaagcaaccaggtggatacactcacctag

SEQ ID NO: 95431 - DNA, 4095 bp, Artificial Sequence
  derived and/or modified sequence
atggagacccagctgcagagcatctttgaggaggtggtgaagacagaggtgattgaggaggccttccctggcatgttcatggacaccccagaagatgagaagaccaagctgatcagctgcctgggcgccttccggcagttctggggcggcctgagccaggagagccatgagcagtgcatccagtggatcgtgaagttcatccacggccagcacagccccaagaggatctccttcctgtatgactgcctggccatggctgtggagaccggcctgctgcccccccggctggtgtgtgagagcctcatcaacagcgacaccctggagtgggagaggacccagctgtgggccctgaccttcaagctggtgaggaagatcatcggcggcgtggactacaagggcgtgcgggacctgctgaaggtgatcctggagaagatcctgaccatccccaacacagtgagcagcgctgtggtgcagcagctgctggccgcccgggaggtgattgcctacatcctggagagaaatgcctgcctgctgcctgcctactttgctgtgacagagatcaggaagctgtacccagagggcaagctgccccactggctgctgggcaacctggtgtctgactttgtggacaccttccggcccacagcccgcatcaacagcatctgtggccgctgcagcctgctgcctgtggtgaacaacagcggggccatctgcaacagctggaagctggaccctgccaccctgcgcttccccctgaagggcctgctgccctatgacaaggacctgtttgagccccagacagccctgctgcgctacgtgctggagcagccctacagccgggacatggtgtgcaacatgctgggcctgaacaagcagcacaagcagcgctgccctgtgctggaggaccagctggtggacctggtggtgtatgccatggagaggagtgaaacagaggagaagtttgatgatggcggcaccagccagctgctgtggcagcacctgagcagccagctgatcttctttgtgctcttccagtttgccagcttcccccacatggtgctgagcctgcaccagaagctggccggccggggcctcatcaagggccgggaccacctgatgtgggtgctgctgcagttcatcagcggcagcatccagaagaatgccctggccgacttcctgcctgtgatgaagctgtttgacctgctgtacccagagaaggagtacatccctgtgcctgacatcaacaagccccagagcacccacgcctttgccatgacctgcatctggatccacctgaacaggaaggcccagaatgacaacagcaagctgcagatccccatcccccacagcctgcggctgcaccacgagttcctgcagcagagcctgaggaacaagagcctgcagatgaatgactacaagatcgccctgctgtgcaatgcctacagcaccaacagcgagtgcttcaccctgcccatgggcgccctggtggagaccatctatggaaatggcatcatgaggatccccctgcccggcaccaactgcatggccagcggcagcatcacccccctgcccatgaacctgctggacagcctgactgtgcacgccaagatgagcctcatccacagcatcgccaccagggtcatcaagctggcccacgccaagagctctgtggccctggccccagccctggtggagacctacagccggctgctggtgtacatggagattgagagcctgggcatcaagggcttcatcagccagctgctgcccaccgtcttcaagagccacgcctggggcatcctgcacaccctgctggagatgttctcctacaggatgcaccacatccagccccactacagagtgcagctgctgagccacctgcacaccctggccgctgtggcccagaccaaccagaaccagctgcacctgtgtgtggagagcacagccctgcggctcatcacagccctgggcagcagcgaggtgcagccccagttcacccgcttcctgagtgaccccaagacagtgctgtctgctgagagcgaggagctgaacagagccctgatcctgaccctggcccgggccacccacgtgacagacttcttcaccggcagtgacagcatccagggcacctggtgcaaggacatcctgcagaccatcatgtccttcaccccccacaactgggccagccacaccctgagctgcttccctggccccctgcaggccttcttcaagcagaacaacgtgccccaggagagccgcttcaacctgaagaagaatgtggaggaggagtacaggaagtggaagtccatgagcaatgaaaatgacatcatcacccacttctccatgcagggcagccccccactcttcctgtgcctgctgtggaagatgctgctggagacagaccacatcaaccagatcggctacagagtgctggagcgcatcggggcccgggccctggtggcccacgtgaggacctttgctgacttcctggtgtatgagttcagcaccagcgctgggggccagcagctgaacaagtgcatcgagatcctgaatgacatggtgtggaagtacaacatcgtgaccctggacaggctcatcctgtgcctggccatgaggagccatgagggcaatgaggcccaggtgtgctacttcatcatccagctgctgctgctgaagcccaatgacttcaggaacagagtgtctgactttgtgaaggagaacagccctgagcactggctgcagaatgactggcacaccaagcacatgaactaccacaagaagtacccagagaagctgtactttgagggcctggccgagcaggtggacccccctgtgcagatccagagcccctacctgcccatctactttggaaatgtgtgcctgcgcttcctgcctgtgtttgatattgtcatccaccgcttcctggagctgctgcctgtgtccaagagcctggagaccctgctggaccacctgggcggcctgtacaagttccatgacaggcctgtgacctacctgtacaacaccctgcactactatgagatgcacctgcgggaccgggccttcctgaagaggaagctggtgcacgccatcatcggcagcctgaaggacaaccggccccagggctggtgcctgagtgacacctacctgaagtgtgccatgaatgcccgggaggagaacccctgggtgcctgatgacacctactactgccgcctcatcggccgcctggtggacaccatggccggcaagagccctggccccttccccaactgtgactggaggttcaatgagttccccaacccagctgcccacgccctgcacgtgacctgtgtggagctgatggccctggccgtgtctgggaaggaggtgggcaatgccctgctgaatgtggtgctgaagagccagcccctggtgccccgggagaacatcacagcctggatgaatgccatcggcctcatcatcacagccctgcctgagccctactggatcgtgctgcatgaccgcatcgtgtctgtcatcagcagccccagcctgaccagcgagacagagtgggtgggctaccccttccggctgtttgacttcaccgcctgccaccagagctacagcgagatgagctgcagctacaccctggccctggcccatgctgtgtggcaccacagcagcatcggccagctgagcctcatccccaagttcctgacagaggtgctgctgcccatcgtgaagacagagttccagctgctgtatgtgtaccacctggtgggccccttcctgcagcgcttccagcaggagaggacccgctgcatgattgaaattggagtggccttctatgacatgctgctgaatgtggaccagtgcagcacccacctgaactacatggaccccatctgtgacttcctgtaccacatgaagtacatgttcaccggggacagcgtgaaggagcaggtggagaagatcatctgcaacctgaagccagccctgaagctgcggctgcgcttcatcacccacatcagcaagatggagcctgctgctgtgcccccccaggccatgaacagcggcagccctgccccccagagcaaccaggtggacaccctgacctag

SEQ ID NO: 95432 - DNA, 4446 bp, Artificial Sequence
  derived and/or modified sequence
gttcctgctgttggctgggctcgggagggaacgctccaggtaaagcgctgggggaggaagcgacgccgaggagctacggtttcctccagaggtctccgcccctctgcccctatattcccagagctcgagtctgatccgggccttgccgggcaccctggaaaggcgggggtgatagtacagatggagacgcaactgcagagcattttcgaagaggtggtgaaaacggaagttatagaagaggcttttcctggcatgtttatggatactcctgaagatgagaaaacaaaactaattagctgtttgggggccttcagacagttttggggtggtctttctcaggagtctcatgaacagtgtatccagtggattgttaagtttattcatggtcagcatagtcctaaaagaatttcttttctttatgactgcttagcaatggcagttgagactggtctccttccacccaggctggtttgtgaatccctgataaactctgacactcttgagtgggaaagaacacagctttgggccttaacatttaaactggttcggaaaataattgggggagtggattacaagggtgttcgagatctcttaaaagtgattttggagaagattttgacaattcctaatacagtgagctctgctgttgtacagcagcttctggcagcaagagaggttatagcatatatcttggaaagaaatgcctgcttattaccagcctattttgcagtcactgagatcaggaaactgtatcctgaaggcaaacttccacactggttacttggaaacctagtatcagactttgtggataccttcaggcccacagcaaggataaactccatttgtggtcgctgtagtcttctgccagttgtaaataattcgggtgccatttgtaattcatggaaactggatcctgctactcttcgttttcctttgaaaggccttttgccatatgataaggatctgtttgaaccacagactgctttgttgagatatgtattggagcagccttattccagggatatggtctgcaatatgctaggtttaaataagcagcacaagcagcgctgccctgtgctggaggaccagttggtggatctggttgtttatgccatggagcgatctgagaccgaggagaagtttgacgatgggggaacaagccaactcctgtggcagcatctctcaagtcagctcattttctttgtgcttttccagtttgcaagttttccacatatggtgctttctcttcatcagaagttagcagggcgaggactgattaaaggcagagatcatcttatgtgggttctcctgcaattcatttctggaagtattcagaaaaatgcactagctgattttctccctgtgatgaagctcttcgacttgctatacccagaaaaagaatatatcccagttcctgatattaacaaaccccagtcaacccatgcctttgcaatgacctgtatttggattcatctcaatagaaaagctcaaaatgacaactccaagctacagattccaatacctcattccctaagacttcaccatgagttcctgcagcagagtctaagaaataaaagtttacagatgaatgactataagattgctctattgtgtaatgcatactctacaaattcagaatgttttacattacccatgggagctctggtagaaactatttatggaaatggaattatgaggatacctctccctggaacaaactgtatggcttcaggatctattacccccttacctatgaacctcctggattcactgacagttcatgccaaaatgagccttattcacagcattgcaaccagggtgataaaacttgctcatgcaaagtccagtgtggccttggctccagccctagtggaaacttacagtcgtttattggtctatatggaaatagagtctttgggcatcaaaggatttatcagtcagcttttgccaactgttttcaaatcacatgcatgggggatcttacacacactccttgagatgtttagctaccggatgcatcatattcagcctcattacagagttcagctcctgagtcatcttcatactttggctgcagttgcacaaacaaaccagaaccagctccatctttgtgtcgagagcactgctctcaggcttataacagcattaggtagctcagaggtacaaccgcagtttacacgcttccttagtgatcccaaaacagtgctctcagcagaatctgaagaactgaaccgagccttgatattgaccttggctagagcaactcatgtaacagatttttttacaggctctgattcaattcagggaacttggtgtaaagacatacttcagaccatcatgagtttcactcctcataattgggcttcacacaccctgagctgttttccaggcccactacaggcattcttcaaacaaaataatgtgcctcaggaaagccgttttaatctgaaaaaaaatgtggaggaggagtataggaagtggaagtcaatgagcaacgaaaacgacattattacccacttctctatgcagggctcccctcctctctttctttgtcttctctggaaaatgctcttggaaacagatcatattaatcagattggctatagagtattagagagaattggagccagggccttggtagcccatgtgaggacatttgcagatttcctggtatatgagttttctacatcagcagggggtcagcaactcaataaatgcattgaaattcttaatgacatggtatggaagtataacattgttacactggacagattaattctctgcctggccatgcgtagtcacgaaggaaatgaagcccaggtttgttatttcataattcagttgctgttactcaaaccaaacgattttagaaatcgagtaagtgactttgtgaaggaaaattccccagagcactggttacagaatgactggcacaccaagcacatgaattatcacaagaaatatccagagaagttgtattttgagggcctcgcggaacaggtggatcctcctgtacagatccagtctccctatctgcccatctattttgggaatgtgtgtcttcgattccttccagtatttgatatagtaatccacagatttttagagttgcttccggtatccaaatcactggagactctactggatcatctaggaggcttatataaatttcatgatcgtccagtgacttatctgtataacactctgcactattatgaaatgcacctgagagaccgcgcatttctcaaacgaaaactcgtccatgcgatcattggctctctgaaggataatcgaccgcagggctggtgtctaagtgacacttacctgaaatgcgctatgaatgcacgagaggaaaatccttgggttccagatgacacctactattgcagattgattggcagactagtcgatacgatggctggcaaatctcctggtccctttccaaactgtgactggagattcaatgagtttcccaacccagctgcccatgctctccatgttacttgtgtggagctcatggccttggcagtttcaggcaaagaagttgggaatgcccttctaaatgttgtcctaaaaagtcagcctttagtgccaagagagaacattacagcatggatgaatgcaattggtttgatcatcactgccctaccagagccatattggattgttcttcatgatcgaattgtgagtgtcatcagcagccccagcttgacgtctgaaacagagtgggttggctatccattccgcctctttgatttcactgcctgtcatcagtcctactctgagatgagttgtagctatacgttagctcttgcacatgctgtgtggcaccattctagcatcggacaactttctctcattccaaagtttcttactgaagtacttcttcctatagtgaagaccgaattccagttgctttatgtataccatcttgttggaccatttttacaaagatttcagcaagagagaactcgttgtatgatagagattggtgtggcgttttatgacatgctgctgaatgttgaccagtgtagcacccatttaaattacatggatcccatctgtgacttcctctatcacatgaagtatatgtttactggtgacagcgtgaaagagcaagtagagaagattatctgtaacttaaaaccagctttaaaacttcgtcttcgattcatcacacacattagcaagatggagccagctgcagtgcctccacaagccatgaacagtgggtctccagcacctcagtctaatcaggttgacactctcacctgacagatgatgtaattcttcaatttttataatcttaaaatttttaaattttatatttgtaaatacagtacacattttatttcttggattttgagagacattgttaattttgggggaattggcattgcgaaagacttgaaaactaatgagtaaagtctgctgaatgaataaacc

SEQ ID NO: 95433 - DNA, 4095 bp, Artificial Sequence
  derived and/or modified sequence
atggagacccagctgcagagcatcttcgaggaggtggtgaagaccgaggttatagaggaagccttcccaggaatgttcatggacacgcctgaagacgaaaagactaagttaatttcgtgtctcggggcttttcgccagttctggggaggcctctcccaggaatcccacgagcaatgtatacagtggatagttaaattcatacatggccagcatagccctaagcgcatttctttcttatacgactgtctggctatggctgtcgaaaccggccttctgcctccgagactggtttgcgagtctctgatcaatagcgatactctggaatgggagcgcacccaactttgggctctcacatttaagctggtgagaaaaattattggtggggtcgactataaaggtgtgcgagacctgctgaaggtcatattagaaaagatactgaccattcctaatactgtttcctcagccgtcgttcagcaactgctggcggcacgtgaagtcattgcctatattttggagcgcaatgcatgtcttttgcctgcctactttgccgttacggagattcgcaagctgtatcctgagggcaagctgccccactggctgctgggtaatctcgtatctgacttcgtcgacacctttcggcctactgcacgaatcaatagtatctgtggcagatgctcgttgcttccagttgttaataattccggagccatctgcaattcttggaagctggatccagctaccctgagattcccccttaaaggcctgctgccatatgataaagatctatttgagccccaaactgctctgttgcgatacgtcctggaacagccatactcacgcgatatggtatgcaatatgctggggttaaataaacagcacaaacaaaggtgccccgttttagaagaccagctggtggatttagtggtttatgcaatggagcgctccgaaacagaagagaaattcgatgatggcgggacctcacagcttctttggcagcatctcagctcgcagttgatcttttttgtgttattccagttcgcctcctttccccacatggtcctgagcctgcatcagaagctggcgggcaggggactcatcaaaggaagggaccatctgatgtgggtactgttacagtttattagcggctcgatccagaagaacgctctcgcagactttctgcctgtgatgaaattatttgacttgctgtatcccgaaaaggaatatatccctgtacctgatataaataagcctcagagcacacacgccttcgccatgacgtgtatatggattcatctgaatcggaaggcccagaacgacaacagcaagctacagattcctataccccatagcttgcgattgcatcacgagtttttacaacagtcgctgcgtaacaagtctcttcaaatgaacgactacaagatcgcactgctctgcaacgcttactcaacgaactctgaatgtttcactctccccatgggcgccttggtcgaaaccatttatggaaatggaatcatgaggatcccactgccgggtacaaattgtatggcttctgggagcatcacacctctcccgatgaatctactggactcactgactgtccacgccaaaatgtctctcattcacagtatcgccaccagagtaataaaactcgcacacgccaagagttctgtagccctggctcctgccctagtggagacatactctaggcttctcgtgtacatggagatagagagtctcgggattaaagggttcatctctcaattgctgcctaccgttttcaaaagccacgcatgggggatcctgcacacattgttggaaatgttcagctatcggatgcaccatattcagccacactaccgtgtgcaactcctgtctcacctgcacacactggccgctgtggcccagactaaccagaaccaacttcacttgtgcgtcgagagcaccgcgttgagactcatcaccgctcttggttcaagcgaggtacaaccccagtttacgaggtttctctccgatccaaaaaccgtgttgtcagccgagagtgaggaactcaaccgggcattaatcttgacgttggcaagggccactcacgttaccgactttttcactgggtcagatagcatccaggggacatggtgcaaggacatcctgcagacaattatgagctttactccccataattgggcaagccatacgctgagctgtttcccggggccacttcaggccttcttcaaacagaacaacgttccacaggagtctcggtttaatcttaagaaaaacgtggaggaggagtatcggaaatggaaatcaatgagcaacgagaacgatatcataactcacttcagcatgcagggctcaccacctctgtttctctgccttctgtggaaaatgctgctagagactgatcacatcaaccagatcgggtacagggtgcttgagagaattggtgcgagggcactggtggcacatgtgagaacattcgctgactttctggtgtacgagttttctacgtccgccggagggcaacagctgaacaagtgtattgaaatcctcaacgatatggtgtggaaatacaatatcgtcacactggataggctgatactttgtctggcaatgcgcagccatgagggcaacgaggcacaggtctgctattttattattcaattgttgctcctgaaacctaacgactttcgcaaccgtgtatctgactttgttaaagaaaattcccctgaacattggctgcagaatgactggcatacaaagcatatgaactatcacaaaaaataccccgagaagctctactttgaagggctcgctgagcaggtggaccctccggtacagattcagtccccttatctaccaatatactttggcaatgtttgcctgcgctttttaccggtgttcgatatcgttatccaccggttcctcgaactgttgccagtctccaaatccttagagactctcctggatcacttgggtggcctctataagtttcatgaccgacccgtgacttatctgtataatactcttcactactacgagatgcacctcagagacagagcattcctaaagcgcaagctggttcacgctataataggctctctgaaagataacagaccacagggatggtgtctcagcgatacctatctgaagtgtgccatgaatgctcgggaggagaatccgtgggtgcctgacgacacatattattgtcgacttattgggaggttggtcgacactatggcagggaaaagcccaggacccttccctaactgcgactggagatttaacgagttccctaatcccgccgcacacgcactccatgtgacttgcgttgaattaatggcgctggctgtgtcgggcaaggaggtcgggaatgcactgctgaacgttgtactgaagtcccagcccttagtaccccgtgagaacatcacggcgtggatgaacgccatcggtctgattataactgccctgcctgagccttactggattgtcctgcacgatagaattgtttcagtgatctcaagcccttctctcacctctgagaccgaatgggtgggatatccattccgcctgtttgatttcactgcatgtcaccagagttattctgagatgtcctgctcctatacccttgctctggcccacgcagtgtggcaccattctagcattggccaactttcactgatccccaagtttctgacagaggtcctgttaccaatcgtaaaaacagaatttcaactcctctatgtgtatcacctggtggggccttttctccaaaggttccaacaggaacgaacccgttgtatgatcgaaatcggcgtggcgttctatgacatgctgctcaacgttgaccagtgttccactcatttaaactacatggaccccatttgcgacttcctttaccatatgaaatacatgttcaccggggattcagtgaaggaacaggtggagaagattatctgcaacctcaaaccggcactgaaacttaggctccgatttataacacatatatctaagatggaacccgccgctgttccaccgcaggctatgaattctggcagcccagccccgcagagtaaccaggtagataccttaacatag

SEQ ID NO: 95434 - DNA, 4095 bp, Artificial Sequence
  derived and/or modified sequence
atggagacccaactccagtccatttttgaagaagtggtcaaaactgaggtgattgaggaagcctttccagggatgttcatggatacccctgaggacgagaagacaaaactgattagctgtcttggagcattcagacaattctggggcggattgtcacaagagagccacgagcagtgtatccagtggatcgtgaagttcattcatggccagcactcaccaaaacgtatcagttttctctatgactgcttggccatggccgtggagacagggctgctcccgcctcgcttggtgtgcgagagccttatcaactcggacacattggaatgggagagaactcagctttgggcactcaccttcaagctcgttcgcaagattataggcggagtggactacaagggtgtaagggaccttttaaaagtaattctggagaagatcctcactataccaaatacagttagcagcgctgtggtacagcagctgttagcggcaagagaagtgatcgcctacatcctggagagaaatgcctgcctactgcccgcttactttgcagttaccgagattcggaaactgtacccggaggggaagttgccccattggttactggggaacctggtcagcgacttcgtggataccttcagaccaacggctcggattaacagcatatgcggtcggtgtagccttctccctgtcgtaaacaatagcggcgcaatctgtaatagctggaagctggatcctgctaccttacggttccctttaaaaggactgctgccttacgataaggatttgtttgaaccacagacggcccttctccgttacgtcctggagcagccgtacagccgcgatatggtatgcaacatgctgggcctgaataagcagcataaacagcgctgtcccgtgctggaagaccagctggtggatttggtggtctatgctatggaacgctccgagacagaggaaaagttcgacgacggcggaaccagtcagcttctgtggcagcatctttcctcgcagttaatctttttcgtgctgtttcagttcgcctcttttccacacatggtactatcacttcatcagaagctcgctggaaggggccttatcaaaggtagggaccacctaatgtgggtcctactgcagttcatcagtggtagtatccagaaaaatgccctggccgatttcttaccagtaatgaaactcttcgaccttctctatcccgaaaaggaatacatccccgtgccagacatcaacaaaccccagtctacccacgccttcgccatgacttgtatttggatccacttaaaccggaaagcccagaacgacaactccaaactgcaaatccccataccacatagcctgcggctgcaccatgagtttcttcaacagtctctgcggaataagtctctgcaaatgaacgattacaaaattgcactgctctgcaacgcctactctaccaactccgagtgcttcactctgcctatgggagcactggtcgaaaccatttacggcaatggaatcatgcggatcccattacccggaactaactgtatggcctcggggtcaatcacgccactgcccatgaacctgctggattctctgaccgtgcatgcaaagatgagccttattcattctatcgcgaccagggtcatcaagctggctcatgcgaagagctccgttgctctcgccccagctttggtcgagacctactctcggctccttgtctacatggagatagaatctttggggataaaaggatttatctctcaactccttccaacagtgttcaaatcgcacgcctgggggatacttcacaccctccttgaaatgttctcctaccgtatgcaccacatccagccccattatcgggtgcagctgttaagccaccttcataccctcgcagccgtggcacagactaaccagaatcaactgcatctgtgcgttgagtcaaccgccctgaggctcatcaccgcattgggttcaagtgaggtgcagccccagtttaccaggttcctttcagatcctaagacggtacttagcgccgaatccgaggaactgaatagagcactaattctcacgctagcacgggctacacacgtcaccgatttcttcactggcagcgacagcatccagggcacctggtgcaaggacatccttcagactattatgtcttttacacctcacaactgggcctcccacacactttcatgttttcctggacctctccaagccttcttcaaacaaaataacgtcccccaggagtctagattcaatctgaaaaagaacgtagaggaggaataccgtaagtggaaatctatgtccaacgagaacgatattatcactcatttctccatgcaggggtctccccctcttttcctgtgccttctctggaaaatgttacttgagactgaccacataaatcaaattggctacagggtgctagaacgtatcggggcacgtgctttggttgcccacgttaggaccttcgctgactttctggtgtatgaatttagtacttcagctggaggacagcagctgaataaatgtattgagatccttaatgacatggtctggaagtacaacattgtaactctcgaccgcctaattctttgccttgctatgagatcccatgaggggaatgaagcgcaggtgtgttattttatcattcaattgttgctgctcaaaccgaacgactttcgtaatcgagttagcgattttgttaaggagaattccccggaacattggctgcagaatgattggcatacgaagcacatgaattatcataagaagtaccctgaaaaactgtacttcgagggcttagccgaacaggtcgatcccccagtgcagatccagtccccctatctgccaatttacttcgggaatgtctgcctgcggttcctgccggtttttgacattgtcatccacagattcctcgagcttcttcccgtctctaaatccctcgaaaccttattggatcatctgggcggtctatataaatttcacgatagaccagtgacctatttgtacaacacactgcattactacgagatgcatctgagagatcgtgccttcctgaaacggaagctggtgcacgctataatcggcagcctcaaggataatcggccacagggctggtgcctctctgatacatatctcaagtgtgctatgaacgcccgtgaagaaaatccctgggtgccagatgacacgtattattgcaggctgatcggccgtctagtagatacgatggccggaaaatcacccggaccttttcctaactgtgactggagattcaacgagtttcctaatcctgcagcccatgccctgcatgtgacctgtgtcgagctaatggcactggcagtgagtgggaaggaggttggcaacgcacttctgaacgtggtattaaagagccaacccctcgtgcccagagagaatatcacagcttggatgaatgcaatcggtttgattatcaccgccttgcctgaaccatactggatcgtgctccacgatcggatcgtctcagtcatctcttctccatctctgacctccgagaccgaatgggttgggtacccctttcgactatttgacttcaccgcctgtcatcagtcttacagcgagatgagttgttcctatacgctggctcttgcacatgccgtgtggcaccattcctctattgggcagctttctctgattcccaagttcctcactgaggtgttgcttcccatagttaagacggagtttcaactcctctacgtgtatcatcttgtgggtcccttcctgcaaagattccagcaagagaggactcgctgtatgattgagattggggtagccttctatgacatgctgttaaacgtggatcaatgctccacacatctgaactacatggaccccatctgtgacttcctgtaccatatgaaatacatgttcacgggcgactcagtgaaggagcaagttgagaagataatttgcaaccttaagcctgccctgaagctgcgactgagattcatcacacatatcagtaaaatggagcccgcagcagtgcctccacaagccatgaattccgggtcacccgcacctcaatctaaccaagtggacacacttacgtag

SEQ ID NO: 95435 - DNA, 4095 bp, Artificial Sequence
  derived and/or modified sequence
atggagacccagctgcagagcatcttcgaggaggtggtgaagaccgaggtgatcgaggaggccttccccggcatgttcatggacacccccgaggacgagaagaccaagctgatcagctgcctgggcgccttcagacagttctggggcggcctgagccaggagagccacgagcagtgcatccagtggatcgtgaagttcatccacggccagcacagccccaagagaatcagcttcctgtacgactgcctggccatggccgtggagaccggcctgctgccccccagactggtgtgcgagagcctgatcaacagcgacaccctggagtgggagagaacccagctgtgggccctgaccttcaagctggtgagaaagatcatcggcggcgtggactacaagggcgtgagagacctgctgaaggtgatcctggagaagatcctgaccatccccaacaccgtgagcagcgccgtggtgcagcagctgctggccgccagagaggtgatcgcctacatcctggagagaaacgcctgcctgctgcccgcctacttcgccgtgaccgagatcagaaagctgtaccccgagggcaagctgccccactggctgctgggcaacctggtgagcgacttcgtggacaccttcagacccaccgccagaatcaacagcatctgcggcagatgcagcctgctgcccgtggtgaacaacagcggcgccatctgcaacagctggaagctggaccccgccaccctgagattccccctgaagggcctgctgccctacgacaaggacctgttcgagccccagaccgccctgctgagatacgtgctggagcagccctacagcagagacatggtgtgcaacatgctgggcctgaacaagcagcacaagcagagatgccccgtgctggaggaccagctggtggacctggtggtgtacgccatggagagaagcgagaccgaggagaagttcgacgacggcggcaccagccagctgctgtggcagcacctgagcagccagctgatcttcttcgtgctgttccagttcgccagcttcccccacatggtgctgagcctgcaccagaagctggccggcagaggcctgatcaagggcagagaccacctgatgtgggtgctgctgcagttcatcagcggcagcatccagaagaacgccctggccgacttcctgcccgtgatgaagctgttcgacctgctgtaccccgagaaggagtacatccccgtgcccgacatcaacaagccccagagcacccacgccttcgccatgacctgcatctggatccacctgaacagaaaggcccagaacgacaacagcaagctgcagatccccatcccccacagcctgagactgcaccacgagttcctgcagcagagcctgagaaacaagagcctgcagatgaacgactacaagatcgccctgctgtgcaacgcctacagcaccaacagcgagtgcttcaccctgcccatgggcgccctggtggagaccatctacggcaacggcatcatgagaatccccctgcccggcaccaactgcatggccagcggcagcatcacccccctgcccatgaacctgctggacagcctgaccgtgcacgccaagatgagcctgatccacagcatcgccaccagagtgatcaagctggcccacgccaagagcagcgtggccctggcccccgccctggtggagacctacagcagactgctggtgtacatggagatcgagagcctgggcatcaagggcttcatcagccagctgctgcccaccgtgttcaagagccacgcctggggcatcctgcacaccctgctggagatgttcagctacagaatgcaccacatccagccccactacagagtgcagctgctgagccacctgcacaccctggccgccgtggcccagaccaaccagaaccagctgcacctgtgcgtggagagcaccgccctgagactgatcaccgccctgggcagcagcgaggtgcagccccagttcaccagattcctgagcgaccccaagaccgtgctgagcgccgagagcgaggagctgaacagagccctgatcctgaccctggccagagccacccacgtgaccgacttcttcaccggcagcgacagcatccagggcacctggtgcaaggacatcctgcagaccatcatgagcttcaccccccacaactgggccagccacaccctgagctgcttccccggccccctgcaggccttcttcaagcagaacaacgtgccccaggagagcagattcaacctgaagaagaacgtggaggaggagtacagaaagtggaagagcatgagcaacgagaacgacatcatcacccacttcagcatgcagggcagcccccccctgttcctgtgcctgctgtggaagatgctgctggagaccgaccacatcaaccagatcggctacagagtgctggagagaatcggcgccagagccctggtggcccacgtgagaaccttcgccgacttcctggtgtacgagttcagcaccagcgccggcggccagcagctgaacaagtgcatcgagatcctgaacgacatggtgtggaagtacaacatcgtgaccctggacagactgatcctgtgcctggccatgagaagccacgagggcaacgaggcccaggtgtgctacttcatcatccagctgctgctgctgaagcccaacgacttcagaaacagagtgagcgacttcgtgaaggagaacagccccgagcactggctgcagaacgactggcacaccaagcacatgaactaccacaagaagtaccccgagaagctgtacttcgagggcctggccgagcaggtggacccccccgtgcagatccagagcccctacctgcccatctacttcggcaacgtgtgcctgagattcctgcccgtgttcgacatcgtgatccacagattcctggagctgctgcccgtgagcaagagcctggagaccctgctggaccacctgggcggcctgtacaagttccacgacagacccgtgacctacctgtacaacaccctgcactactacgagatgcacctgagagacagagccttcctgaagagaaagctggtgcacgccatcatcggcagcctgaaggacaacagaccccagggctggtgcctgagcgacacctacctgaagtgcgccatgaacgccagagaggagaacccctgggtgcccgacgacacctactactgcagactgatcggcagactggtggacaccatggccggcaagagccccggccccttccccaactgcgactggagattcaacgagttccccaaccccgccgcccacgccctgcacgtgacctgcgtggagctgatggccctggccgtgagcggcaaggaggtgggcaacgccctgctgaacgtggtgctgaagagccagcccctggtgcccagagagaacatcaccgcctggatgaacgccatcggcctgatcatcaccgccctgcccgagccctactggatcgtgctgcacgacagaatcgtgagcgtgatcagcagccccagcctgaccagcgagaccgagtgggtgggctaccccttcagactgttcgacttcaccgcctgccaccagagctacagcgagatgagctgcagctacaccctggccctggcccacgccgtgtggcaccacagcagcatcggccagctgagcctgatccccaagttcctgaccgaggtgctgctgcccatcgtgaagaccgagttccagctgctgtacgtgtaccacctggtgggccccttcctgcagagattccagcaggagagaaccagatgcatgatcgagatcggcgtggccttctacgacatgctgctgaacgtggaccagtgcagcacccacctgaactacatggaccccatctgcgacttcctgtaccacatgaagtacatgttcaccggcgacagcgtgaaggagcaggtggagaagatcatctgcaacctgaagcccgccctgaagctgagactgagattcatcacccacatcagcaagatggagcccgccgccgtgcccccccaggccatgaacagcggcagccccgccccccagagcaaccaggtggacaccctgacctag

SEQ ID NO: 95436 - protein, 289 aa, Artificial Sequence
  derived and/or modified sequence
MMSYLKQPPYAVNGLSLTTSGMDLLHPSVGYPATPRKQRRERTTFTRAQLDVLEALFAKTRYPDIFMREEVALKINLPESRVQVWFKNRRAKCRQQQQQQQNGGQNKVRPAKKKTSPAREVSSESGTSGQFTPPSSTSVPTIASSSAPVSIWSPASISPLSDPLSTSSSCMQRSYPMTYTQASGYSQGYAGSTSYFGGMDCGSYLTPMHHQLPGPGATLSPMGTNAVTSHLNQSPASLSTQGYGASSLGFNSTTDCLDYKDQTASWKLNFNADCLDYKDQTSSWKFQVL

SEQ ID NO: 95437 - protein, 163 aa, Artificial Sequence
  derived and/or modified sequence
MMSYLKQPPYAVNGLSLTTSGMDLLHPSVGYPATPRKQRRERTTFTRAQLDVLEALFAKTRYPDIFMREEVALKINLPESRVQVWFKNRRAKCRQQQQQQQNGGQNKVRPAKKKTSPAREVSSESGTSGQFTPPSSTSVPTIASSSAPVSIWSPASISPLSDP

SEQ ID NO: 95438 - DNA, 870 bp, Artificial Sequence
  derived and/or modified sequence
atgatgtcctatctcaaacaaccaccctatgcggtgaatggattatcccttaccacatccggcatggatctcctgcacccatccgtcgggtaccccgctacacctcgtaaacagagaagagagcgaaccaccttcaccagagcccagcttgatgtcctcgaggctttatttgctaaaacccgttatcccgacatcttcatgcgtgaagaggtcgctttgaagatcaatctgcctgagtctagagtgcaggtttggtttaagaatcgacgggctaaatgtaggcagcagcagcagcaacaacagaacggtggacaaaacaaggttagaccagctaaaaagaaaacctcaccggcccgtgaagttagcagtgagtcgggaacctctggtcaattcacaccaccatccagcaccagcgtgcctacgatcgcatcctcctctgctccagtttccatctggtctcctgcaagcatttctcccctgagcgacccacttagcacctcaagtagttgtatgcagagatcctacccaatgacatacacacaggcctctgggtatagccagggatatgcaggctctacatcgtactttggtgggatggactgtgggtcttatttaaccccaatgcaccaccaactcccgggtcccggggcaactctttccccgatgggtactaatgctgtgacctcccatctgaatcagagccccgcatcgctgtcaactcaggggtacggggcatcatccctcggcttcaatagcactaccgattgtttagactacaaggaccaaaccgcttcctggaagctgaacttcaacgccgattgtctggattacaaagaccaaaccagcagctggaaatttcaggttctctag

SEQ ID NO: 95439 - DNA, 870 bp, Artificial Sequence
  derived and/or modified sequence
atgatgtcttacctcaagcaaccgccatacgcagtcaatggtctgtcccttacgaccagcggtatggatttacttcacccatccgttggctacccggctacccctcgcaaacaaaggcgtgaacgcaccaccttcacgagagctcagctcgacgtccttgaagcgctgttcgcgaaaacccggtacccagatatctttatgcgagaagaagtcgcacttaagattaatttgcccgagagcagggtccaggtatggttcaagaaccgaagagcaaagtgccgccaacagcagcagcagcagcagaatggtggacagaataaggttcgcccagctaagaaaaagaccagtcctgcaagagaggtctcttctgagtcagggaccagcggtcaatttacacccccaagcagcactagcgtgcctacaatcgcttcctcatctgcacccgtgtcaatctggtccccggcctcaatctcccccctcagtgacccacttagtacatcatcatcatgcatgcagcgaagctaccccatgacgtatactcaggcgtccggatatagtcaagggtacgcaggtagcaccagctatttcggtgggatggactgtggatcttaccttacccctatgcaccatcagcttccaggccctggtgctactctgtctcctatgggcactaacgctgtgaccagtcacctgaatcaatccccggcttcattgtcgacacagggctacggagctagtagcttaggttttaactccaccacagactgtttagattacaaagatcagaccgcaagctggaaactgaacttcaatgcagattgcttggattacaaagatcagacatcctcctggaagttccaggtgctatag

SEQ ID NO: 95440 - DNA, 492 bp, Artificial Sequence
  derived and/or modified sequence
atgatgagctatctgaaacaacctccgtatgcggtgaatggtctctccctgacgacttccggcatggacttgctacaccccagcgtcgggtacccggcaacacccagaaagcagcgcagggaaaggaccacctttactcgtgcacaactggacgtgctagaagccttgttcgccaagacacggtatcctgatatctttatgcgcgaggaagtcgctctgaaaatcaatttgcccgagtcccgcgtccaagtctggttcaagaaccgccgtgcaaagtgccgccaacagcagcagcagcaacagaatggagggcagaataaagtcaggccagccaagaagaagacttcgcctgcccgggaggtctcatctgagagtggcacaagcggacagttcactccgccaagctcaacatctgtgcccactatcgcctcctcctcggcccctgtaagtatctggtccccagccagcataagtcccctctccgatccatag

SEQ ID NO: 95441 - DNA, 870 bp, Artificial Sequence
  derived and/or modified sequence
atgatgagctacctgaagcagcccccctatgctgtgaatggcctgagcctgaccaccagcggcatggacctgctgcaccccagcgtgggctacccagccacccccaggaagcagaggcgggagaggaccaccttcacccgggcccagctggatgtgctggaggccctgtttgccaagacccgctacccagacatcttcatgagggaggaggtggccctgaagatcaacctgcctgagagccgggtgcaggtgtggttcaagaacagaagagccaagtgccggcagcagcagcagcagcagcagaatggaggccagaacaaggtgcggcctgccaagaagaagaccagccctgcccgggaggtgtcctctgagagcggcaccagcggccagttcaccccacccagcagcacctctgtgcccaccatcgccagcagcagcgcccctgtgtccatctggagccctgccagcatcagccccctgagtgaccccctgagcaccagcagcagctgcatgcagaggagctaccccatgacctacacccaggccagcggctacagccagggctacgccggcagcaccagctactttggaggcatggactgtggcagctacctgacccccatgcaccaccagctgcccggccctggggccaccctgagccccatgggcaccaatgctgtgaccagccacctgaaccagagccctgccagcctgagcacccagggctatggagccagcagcctgggcttcaacagcaccacagactgcctggactacaaggaccagacagcctcctggaagctgaacttcaatgctgactgcctggactacaaggaccagaccagctcctggaagttccaggtgctgtag

SEQ ID NO: 95442 - DNA, 492 bp, Artificial Sequence
  derived and/or modified sequence
atgatgagctacctgaagcagcccccctatgctgtgaatggcctgagcctgaccaccagcggcatggacctgctgcaccccagcgtgggctacccagccacccccaggaagcagaggcgggagaggaccaccttcacccgggcccagctggatgtgctggaggccctgtttgccaagacccgctacccagacatcttcatgagggaggaggtggccctgaagatcaacctgcctgagagccgggtgcaggtgtggttcaagaacagaagagccaagtgccggcagcagcagcagcagcagcagaatggaggccagaacaaggtgcggcctgccaagaagaagaccagccctgcccgggaggtgtcctctgagagcggcaccagcggccagttcaccccacccagcagcacctctgtgcccaccatcgccagcagcagcgcccctgtgtccatctggagccctgccagcatcagccccctgagtgacccctag

SEQ ID NO: 95443 - DNA, 870 bp, Artificial Sequence
  derived and/or modified sequence
atgatgagctacctgaagcagcccccctacgccgtgaacggcctgagtctgacaacatctggaatggacttgctgcatcctagcgtcgggtacccagcaactccacgcaagcagcgtcgggagcgcactaccttcactagagcccagttggatgtgctggaagcacttttcgccaaaacccgttatcctgacatttttatgagggaggaggttgctctgaaaatcaatctcccagaatcacgcgttcaagtctggtttaagaatcgtagagcaaagtgtcgccagcagcaacaacaacagcagaacggcggacagaataaagtgcggcccgctaagaaaaagacaagccctgccagggaggtatcaagtgagtccgggacaagcggacagttcacgccccccagctctacctctgtgcctaccatcgcaagttcctccgccccagtcagtatctggtctcccgctagcatcagccctctctccgaccctctgtccacctcttcatcctgtatgcaaagaagttacccgatgacgtacacacaggcttccggttactcccagggctatgccggttccacttcttacttcggcggcatggactgtggctcctatctgactccgatgcatcatcagctcccaggccccggggctacactgtctccaatgggaacgaatgctgtcacgtcccatctgaaccagtcgccggcctcgctgtctacccagggatacggcgcaagcagcctggggttcaattcaaccacagactgtctggattataaagatcagacagcatcctggaagttgaattttaacgccgattgtctggattacaaagatcagacctcctcttggaagtttcaagtactttag

SEQ ID NO: 95444 - DNA, 870 bp, Artificial Sequence
  derived and/or modified sequence
atgatgagctacctgaagcagcccccctacgccgtgaacggcctgtcactgaccacctccggcatggacctgcttcacccgtctgtcggctacccagctaccccacgcaaacagcggcgagagaggaccaccttcacaagggctcagctggacgtgctcgaagccctgttcgcaaagacacgctacccagacatcttcatgcgcgaggaagtcgccctgaagattaacttgcccgaatcccgtgtgcaggtctggttcaaaaacaggcgcgccaagtgccggcagcaacagcagcaacagcagaatgggggccaaaataaagtcaggccagctaaaaagaaaacttccccagcaagggaagtcagctcggaatcaggaacaagtgggcagttcacacccccatccagcacctcagttcctacaatagctagttccagcgccccagtgtcaatatggtccccagcctcaatctcgcccttgagcgatccactctccacgtcatcatcctgcatgcagcgatcctaccctatgacctacactcaggccagcggatatagccaaggatatgcagggtccacgagctacttcggcggcatggactgtgggtcttatctgacgcccatgcaccaccagctgccaggacccggcgccaccctctcacccatgggcacgaatgctgttacatctcacctgaaccaatcccctgcatctttaagcactcagggttatggagcttcaagcctgggatttaattctacaactgattgtcttgattacaaagaccagactgcgtcatggaagctgaatttcaacgctgactgtcttgattacaaggaccagacaagcagttggaagttccaggtcctgtag

SEQ ID NO: 95445 - DNA, 492 bp, Artificial Sequence
  derived and/or modified sequence
atgatgagctacctgaagcagcccccctacgccgtgaacggcctgtcgttaacgacctctggcatggacctgttgcacccgtccgtcggctatccggctacaccgcgcaaacagagacgggagcgcaccacgttcacccgcgcacaactggatgtgctggaagccctgttcgctaagactagataccctgatattttcatgcgcgaggaagttgcactgaaaatcaatctgccagaatctcgggtgcaggtctggttcaaaaatcggagggccaaatgtaggcaacagcaacagcagcagcagaacggcggccaaaataaggtgcggcctgctaagaaaaaaaccagcccagcaagagaagtcagctcggaatcagggacctcgggacagtttactccacctagcagtaccagtgtccctaccatagcttcttcctcggcccccgtctccatttggtcacctgccagcattagccctctgagcgatccctag

SEQ ID NO: 95446 - DNA, 1082 bp, Artificial Sequence
  derived and/or modified sequence
tttttaagttagtgctggaacgtggaagagctgctgcctccgaagcagtaaaccagcccctctgtttgtttgtttgctttgcccttagttccactgctccaaacccacccaccaaggactctgaacctgtccaccccgggcgcatcaagatcttccagctgggtacccccgatttgggccgactttgcacctccaaacaaccttagcatgatgtcttatcttaagcaaccgccttacgcagtcaatgggctgagtctgaccacttcgggtatggacttgctgcacccctccgtgggctacccggccaccccccggaaacagcgccgggagaggacgacgttcactcgggcgcagctagatgtgctggaagcactgtttgccaagacccggtacccagacatcttcatgcgagaggaggtggcactgaaaatcaacttgcccgagtcgagggtgcaggtatggtttaagaatcgaagagctaagtgccgccaacaacagcaacaacagcagaatggaggtcaaaacaaagtgagacctgccaaaaagaagacatctccagctcgggaagtgagttcagagagtggaacaagtggccaattcactcccccctctagcacctcagtcccgaccattgccagcagcagtgctcctgtgtctatctggagcccagcttccatctccccactgtcagatcccttgtccacctcctcttcctgcatgcagaggtcctatcccatgacctatactcaggcttcaggttatagtcaaggatatgctggctcaacttcctactttgggggcatggactgtggatcatatttgacccctatgcatcaccagcttcccggaccaggggccacactcagtcccatgggtaccaatgcagtcaccagccatctcaatcagtccccagcttctctttccacccagggatatggagcttcaagcttgggttttaactcaaccactgattgcttggattataaggaccaaactgcctcctggaagcttaacttcaatgctgactgcttggattataaagatcagacatcctcgtggaaattccaggttttgtgaagacc

SEQ ID NO: 95447 - DNA, 1279 bp, Artificial Sequence
  derived and/or modified sequence
agctccaacacagcctccactgtgattaaaaataaaaattgctagagcagccctcactcgccacatctactttgtatgtattgcagaggggcccacgcgtgtttagaactctagccgccttcctcattttcgttctttaaaaaaaattttttttggttgtgtttgacttttcatggaagggtgaagactgcaaggtttctaactcaatactcttgatttcttttaggatagctggctatttggaatttaaaggatatttgactttttctaacctcccatgaggctgtaagttccactgctccaaacccacccaccaaggactctgaacctgtccaccccgggcgcatcaagatcttccagctgggtacccccgatttgggccgactttgcacctccaaacaaccttagcatgatgtcttatcttaagcaaccgccttacgcagtcaatgggctgagtctgaccacttcgggtatggacttgctgcacccctccgtgggctacccggccaccccccggaaacagcgccgggagaggacgacgttcactcgggcgcagctagatgtgctggaagcactgtttgccaagacccggtacccagacatcttcatgcgagaggaggtggcactgaaaatcaacttgcccgagtcgagggtgcaggtatggtttaagaatcgaagagctaagtgccgccaacaacagcaacaacagcagaatggaggtcaaaacaaagtgagacctgccaaaaagaagacatctccagctcgggaagtgagttcagagagtggaacaagtggccaattcactcccccctctagcacctcagtcccgaccattgccagcagcagtgctcctgtgtctatctggagcccagcttccatctccccactgtcagatcccttgtccacctcctcttcctgcatgcagaggtcctatcccatgacctatactcaggcttcaggttatagtcaaggatatgctggctcaacttcctactttgggggcatggactgtggatcatatttgacccctatgcatcaccagcttcccggaccaggggccacactcagtcccatgggtaccaatgcagtcaccagccatctcaatcagtccccagcttctctttccacccagggatatggagcttcaagcttgggttttaactcaaccactgattgcttggattataaggaccaaactgcctcctggaagcttaacttcaatgctgactgcttggattataaagatcagacatcctcgtggaaattccaggttttgtga

SEQ ID NO: 95448 - DNA, 797 bp, Artificial Sequence
  derived and/or modified sequence
agcaaatctccctgagagcgggaccggcctcagctccaacacagcctccactgtgattaaaaataaaaattgctagagcagccctcactcgccacatctactttgatagctggctatttggaatttaaaggatatttgactttttctaacctcccatgaggctgtaaggattgtaggaaacttgaaagttccactgctccaaacccacccaccaaggactctgaacctgtccaccccgggcgcatcaagatcttccagctgggtacccccgatttgggccgactttgcacctccaaacaaccttagcatgatgtcttatcttaagcaaccgccttacgcagtcaatgggctgagtctgaccacttcgggtatggacttgctgcacccctccgtgggctacccggccaccccccggaaacagcgccgggagaggacgacgttcactcgggcgcagctagatgtgctggaagcactgtttgccaagacccggtacccagacatcttcatgcgagaggaggtggcactgaaaatcaacttgcccgagtcgagggtgcaggtatggtttaagaatcgaagagctaagtgccgccaacaacagcaacaacagcagaatggaggtcaaaacaaagtgagacctgccaaaaagaagacatctccagctcgggaagtgagttcagagagtggaacaagtggccaattcactcccccctctagcacctcagtcccgaccattgccagcagcagtgctcctgtgtctatctggagcccagcttccatctccccactgtcagatccct

SEQ ID NO: 95449 - DNA, 870 bp, Artificial Sequence
  derived and/or modified sequence
atgatgtcctatcttaagcagcctccgtatgcagtgaacggtctctccctaaccactagcgggatggacctgcttcacccaagtgtgggttaccccgctactccacggaagcagcggagagaacggactacttttacgcgggcacagctcgatgtgctagaggcactattcgccaaaactaggtacccagatatctttatgcgggaggaggtggccctcaagatcaacctgcctgaatccagggtccaggtgtggtttaagaacagacgtgcaaaatgccggcagcagcaacagcagcagcagaacggagggcagaacaaggtgcgcccagcaaaaaaaaagacaagccctgctcgagaggtttcatctgaaagcggaacatccggccagttcacacctccatcttcaacgtctgttcctaccattgcaagctcaagtgcacccgtatcaatttggagcccggcatccatctcccctctgtctgaccccttatcaacaagcagcagttgcatgcagaggagttatccaatgacgtacacacaagcgtcaggatattcccaaggatatgccggatctactagctactttgggggtatggactgcggctcatatctcacacctatgcaccatcagttgcctggtcccggagcaaccctgagcccaatgggtacgaatgcagtcacatcacaccttaatcaaagtccggcaagtctaagcacccagggttatggcgctagtagcctcggttttaatagtaccacagattgccttgattataaagaccagacggcatcatggaaactaaatttcaacgcagactgccttgattataaggatcagacatcctcttggaagttccaggttctgtag

SEQ ID NO: 95450 - DNA, 870 bp, Artificial Sequence
  derived and/or modified sequence
atgatgagctacctgaaacagccaccatacgccgtgaacggcctctccttgaccacttccggaatggatctgctgcatccatcggtgggatacccagctacccctcgcaaacagagaagagaaagaacaacattcaccagggctcagctggacgtccttgaggccctgttcgccaaaaccagataccccgacatctttatgcgtgaagaggttgcattgaaaatcaacctccccgaatccagggtgcaagtttggttcaaaaataggcgagctaagtgtcgccagcagcagcagcagcagcagaacggcggacagaacaaggttcggccagcaaaaaagaagaccagccctgcaagggaagtttcctccgagagtggcacttcaggacaattcacccctccaagctcaactagtgtgccaaccatagcaagctcaagcgctcctgtgagcatctggagccccgcaagcatctctcctctttcagatccgctgtccacctcgagcagctgcatgcagagaagctacccaatgacctacacccaggcaagtggctacagccagggctacgcagggagcacctcctattttgggggaatggattgtggcagctacctgacaccgatgcatcaccagctgccaggtcctggggcaacactaagccccatgggaacaaatgccgtgacgtcccatctcaatcagtcccctgcaagcttgtcaacccaaggttatggtgctagcagtctgggtttcaactcgacgactgactgtctcgactacaaggaccagactgctagttggaaactgaattttaatgccgactgtctcgattacaaggaccaaacaagtagctggaagtttcaggtgctttag

SEQ ID NO: 95451 - DNA, 492 bp, Artificial Sequence
  derived and/or modified sequence
atgatgagctacctcaagcagcctccatacgctgtcaatggactgtctctgacgaccagcggaatggatctcctccatccaagcgtcggataccccgctaccccacgaaaacaacggagagaaagaactactttcaccagggcccagctagatgtgcttgaggccctcttcgctaagacaaggtatcctgatatctttatgagggaagaggtggcattaaaaatcaatctgccggagagccgggtccaggtatggtttaaaaaccgccgtgcaaaatgcagacagcagcaacaacagcagcaaaatggcggacagaataaggtcaggccggcaaaaaagaagactagtccagcaagggaggtaagttctgagtccggcacctcggggcagtttacccccccttcctctacttccgtccccactatcgcaagtagcagtgcaccagtgagcatttggagtccggcaagcatcagccctctcagtgatccttag

SEQ ID NO: 95452 - DNA, 870 bp, Artificial Sequence
  derived and/or modified sequence
atgatgagctacctgaagcagcccccctacgccgtgaacggcctgagcctgaccaccagcggcatggacctgctgcaccccagcgtgggctaccccgccacccccagaaagcagagaagagagagaaccaccttcaccagagcccagctggacgtgctggaggccctgttcgccaagaccagataccccgacatcttcatgagagaggaggtggccctgaagatcaacctgcccgagagcagagtgcaggtgtggttcaagaacagaagagccaagtgcagacagcagcagcagcagcagcagaacggcggccagaacaaggtgagacccgccaagaagaagaccagccccgccagagaggtgagcagcgagagcggcaccagcggccagttcaccccccccagcagcaccagcgtgcccaccatcgccagcagcagcgcccccgtgagcatctggagccccgccagcatcagccccctgagcgaccccctgagcaccagcagcagctgcatgcagagaagctaccccatgacctacacccaggccagcggctacagccagggctacgccggcagcaccagctacttcggcggcatggactgcggcagctacctgacccccatgcaccaccagctgcccggccccggcgccaccctgagccccatgggcaccaacgccgtgaccagccacctgaaccagagccccgccagcctgagcacccagggctacggcgccagcagcctgggcttcaacagcaccaccgactgcctggactacaaggaccagaccgccagctggaagctgaacttcaacgccgactgcctggactacaaggaccagaccagcagctggaagttccaggtgctgtag

SEQ ID NO: 95453 - DNA, 492 bp, Artificial Sequence
  derived and/or modified sequence
atgatgagctacctgaagcagcccccctacgccgtgaacggcctgagcctgaccaccagcggcatggacctgctgcaccccagcgtgggctaccccgccacccccagaaagcagagaagagagagaaccaccttcaccagagcccagctggacgtgctggaggccctgttcgccaagaccagataccccgacatcttcatgagagaggaggtggccctgaagatcaacctgcccgagagcagagtgcaggtgtggttcaagaacagaagagccaagtgcagacagcagcagcagcagcagcagaacggcggccagaacaaggtgagacccgccaagaagaagaccagccccgccagagaggtgagcagcgagagcggcaccagcggccagttcaccccccccagcagcaccagcgtgcccaccatcgccagcagcagcgcccccgtgagcatctggagccccgccagcatcagccccctgagcgacccctag

SEQ ID NO: 95454 - protein, 297 aa, Artificial Sequence
  derived and/or modified sequence
MMSYLKQPPYAVNGLSLTTSGMDLLHPSVGYPGPWASCPAATPRKQRRERTTFTRAQLDVLEALFAKTRYPDIFMREEVALKINLPESRVQVWFKNRRAKCRQQQQQQQNGGQNKVRPAKKKTSPAREVSSESGTSGQFTPPSSTSVPTIASSSAPVSIWSPASISPLSDPLSTSSSCMQRSYPMTYTQASGYSQGYAGSTSYFGGMDCGSYLTPMHHQLPGPGATLSPMGTNAVTSHLNQSPASLSTQGYGASSLGFNSTTDCLDYKDQTASWKLNFNADCLDYKDQTSSWKFQVL

SEQ ID NO: 95455 - protein, 239 aa, Artificial Sequence
  derived and/or modified sequence
MMSYLKQPPYAVNGLSLTTSGMDLLHPSVGYPGPWASCPAATPRKQRRERTTFTRAQLDVLEALFAKTRYPDIFMREEVALKINLPESRVQVWFKNRRAKCRQQQQQQQNGGQNKVRPAKKKTSPAREVSSESGTSGQFTPPSSTSVPTIASSSAPVSIWSPASISPLSDPLSTSSSCMQRSYPMTYTQASGYSQGYAGSTSYFGGMDCGSYLTPMHHQLPGPGATLSPMGTNAVTSHL

SEQ ID NO: 95456 - DNA, 2209 bp, Artificial Sequence
  derived and/or modified sequence
gagagcgggaccggcctcagctccaacacagcctccactgtgattaaaaataaaaattgctagagcagccctcactcgccacatctactttgatagctggctatttggaatttaaaggatatttgactttttctaacctcccatgaggctgtaagttccactgctccaaacccacccaccaaggactctgaacctgtccaccccgggcgcatcaagatcttccagctgggtacccccgatttgggccgactttgcacctccaaacaaccttagcatgatgtcttatcttaagcaaccgccttacgcagtcaatgggctgagtctgaccacttcgggtatggacttgctgcacccctccgtgggctacccggggccctgggcttcttgtcccgcagccaccccccggaaacagcgccgggagaggacgacgttcactcgggcgcagctagatgtgctggaagcactgtttgccaagacccggtacccagacatcttcatgcgagaggaggtggcactgaaaatcaacttgcccgagtcgagggtgcaggtatggtttaagaatcgaagagctaagtgccgccaacaacagcaacaacagcagaatggaggtcaaaacaaagtgagacctgccaaaaagaagacatctccagctcgggaagtgagttcagagagtggaacaagtggccaattcactcccccctctagcacctcagtcccgaccattgccagcagcagtgctcctgtgtctatctggagcccagcttccatctccccactgtcagatcccttgtccacctcctcttcctgcatgcagaggtcctatcccatgacctatactcaggcttcaggttatagtcaaggatatgctggctcaacttcctactttgggggcatggactgtggatcatatttgacccctatgcatcaccagcttcccggaccaggggccacactcagtcccatgggtaccaatgcagtcaccagccatctcaatcagtccccagcttctctttccacccagggatatggagcttcaagcttgggttttaactcaaccactgattgcttggattataaggaccaaactgcctcctggaagcttaacttcaatgctgactgcttggattataaagatcagacatcctcgtggaaattccaggttttgtgaagacctgtagaacctctttttgtgggtgatttttaaatatactgggctggacattccagttttagccaggcattggttaaaagagttagatgggatgatgctcagactcatctgatcaaagttccgagaggcatagaaggaaaaacgaagggccttagaggggcctacaaaccagcaacatgaaatggacaaaccaatctgcttaagatcctgtcatagttttagatcattggttatcctgatttgcaaagtgatcaaaagcattctagccatgtgcaaccaaacaccaccaaaaataaaatcaaacaaaactaagttgtgaaggaagggagggaaggtcatagccttcttaagcagaggtgttccattgttttagccaatccttggttgaatcttaggaatgaacagtgtctcaagctcattcacgtttcatgaccaactggtagttggcactgaaaaaacttttcagggctgtgtgaattgtgtgactgattgtcctagatgcactactttatttaaaaaataatgttcataaggagtcaatatgtagtttaagagacaatcagtgtgtgtcttataaatggtacatctgtggtttttaatctgtgctagacttcaaaactgtgatctcctgttattgtatgcaaccttgaactccacctctgcaggggttcttctgtgattaaataggttataattataagcaaaattcagagcaactgagtactgatctaaaaagattacctttggctggaggtgagctgcactgaaactttacgacaaaatgtctctggacaaagagagtcagagaagagaagcaaaaggacactaattcatctgtaatttactgttggtaagcctagcagtaaagagacattggtcaattgctctgaccctgatgaattattaaactgagatcattgtcgtttatgcttgcagatgttaaatggaaaagttatatatgcataaaccttttcttcctggatttggcagatatgtataattatattaaaatggttctagcacaaaaaaaaaaaaaaa

SEQ ID NO: 95457 - DNA, 894 bp, Artificial Sequence
  derived and/or modified sequence
atgatgtcatacctcaagcaacctccttatgccgtgaatggccttagcctgactactagcgggatggatcttctccatccgtccgtgggctaccccggaccctgggctagctgccctgcggccactcctagaaagcaacgccgggagagaacaaccttcactagagcccaactcgatgttcttgaagccctgttcgcaaaaacacgctacccagatattttcatgagagaagaggtcgctttgaagattaacctgcctgaaagccgggtccaggtgtggttcaagaatagacgggctaagtgccgccaacagcaacaacaacagcaaaatggcggacagaataaggttcgccctgcaaagaagaaaaccagccccgcaagggaagtgtcttcagagtcaggcacatccggccagtttaccccccccagtagcacatcagtcccaactatcgcgtcctccagcgcacccgtgtcgatctggagccctgcttctatcagccctctctccgaccccctatctaccagcagctcctgcatgcagaggtcctaccccatgacttacacacaggcgtccgggtacagccaggggtacgcaggcagcacaagttacttcggagggatggattgcgggtcttatctcacacccatgcatcatcagctacctggaccaggggcaaccctgagccctatgggcaccaacgcggttaccagtcatctgaatcaatcacctgctagtttatccacccagggctatggagctagttccttaggctttaacagtaccacagactgccttgactataaagaccagaccgcctcatggaagcttaactttaatgccgactgtttggactacaaagatcagactagctcctggaaattccaggtgctctag

SEQ ID NO: 95458 - DNA, 720 bp, Artificial Sequence
  derived and/or modified sequence
atgatgagctatctcaagcaacctccctatgctgtgaatggactgtcactaacaacctcaggcatggacttgctacaccctagcgttggctaccccggtccttgggcgtcttgccccgccgccacacctcggaaacaacggagagagcgcaccacattcacccgggctcagctggacgttctagaggctctcttcgccaaaacgaggtaccccgacatttttatgagggaggaagtcgccctgaagatcaatctgcccgagtccagagtccaagtgtggtttaagaacagacgggctaaatgcagacagcaacagcagcagcagcagaatggtgggcagaataaagtgagacccgcgaagaagaaaacatcccctgccagagaagtgagcagcgaaagcggcacttctggccagttcaccccgccgtcatctacaagtgtgcccacaattgcctcatccagcgccccagtgagtatatggagtccagcctcaatttcacctctcagcgaccccctctccacaagctctagttgcatgcagagatcctacccaatgacctacactcaggcctctggctatagccagggctacgccgggagcacctcttactttgggggcatggactgcggatcatatttaacgcctatgcatcatcaactccctggccccggcgcaactctgtctcctatgggaactaacgcggtgaccagccatttatag

SEQ ID NO: 95459 - DNA, 894 bp, Artificial Sequence
  derived and/or modified sequence
atgatgagctacctgaagcagcccccctatgctgtgaatggcctgagcctgaccaccagcggcatggacctgctgcaccccagcgtgggctacccaggcccctgggccagctgcccagctgccacccccaggaagcagaggcgggagaggaccaccttcacccgggcccagctggatgtgctggaggccctgtttgccaagacccgctacccagacatcttcatgagggaggaggtggccctgaagatcaacctgcctgagagccgggtgcaggtgtggttcaagaacagaagagccaagtgccggcagcagcagcagcagcagcagaatggaggccagaacaaggtgcggcctgccaagaagaagaccagccctgcccgggaggtgtcctctgagagcggcaccagcggccagttcaccccacccagcagcacctctgtgcccaccatcgccagcagcagcgcccctgtgtccatctggagccctgccagcatcagccccctgagtgaccccctgagcaccagcagcagctgcatgcagaggagctaccccatgacctacacccaggccagcggctacagccagggctacgccggcagcaccagctactttggaggcatggactgtggcagctacctgacccccatgcaccaccagctgcccggccctggggccaccctgagccccatgggcaccaatgctgtgaccagccacctgaaccagagccctgccagcctgagcacccagggctatggagccagcagcctgggcttcaacagcaccacagactgcctggactacaaggaccagacagcctcctggaagctgaacttcaatgctgactgcctggactacaaggaccagaccagctcctggaagttccaggtgctgtag

SEQ ID NO: 95460 - DNA, 720 bp, Artificial Sequence
  derived and/or modified sequence
atgatgagctacctgaagcagcccccctatgctgtgaatggcctgagcctgaccaccagcggcatggacctgctgcaccccagcgtgggctacccaggcccctgggccagctgcccagctgccacccccaggaagcagaggcgggagaggaccaccttcacccgggcccagctggatgtgctggaggccctgtttgccaagacccgctacccagacatcttcatgagggaggaggtggccctgaagatcaacctgcctgagagccgggtgcaggtgtggttcaagaacagaagagccaagtgccggcagcagcagcagcagcagcagaatggaggccagaacaaggtgcggcctgccaagaagaagaccagccctgcccgggaggtgtcctctgagagcggcaccagcggccagttcaccccacccagcagcacctctgtgcccaccatcgccagcagcagcgcccctgtgtccatctggagccctgccagcatcagccccctgagtgaccccctgagcaccagcagcagctgcatgcagaggagctaccccatgacctacacccaggccagcggctacagccagggctacgccggcagcaccagctactttggaggcatggactgtggcagctacctgacccccatgcaccaccagctgcccggccctggggccaccctgagccccatgggcaccaatgctgtgaccagccacctgtag

SEQ ID NO: 95461 - DNA, 894 bp, Artificial Sequence
  derived and/or modified sequence
atgatgagctacctgaagcagcccccctacgccgtgaacggcctgagcctcacaacgtcaggcatggatctgctgcacccaagcgttggctacccaggaccgtgggcttcctgtcctgccgctaccccaaggaagcaacggcgagaacgaacaacattcacaagggcgcaactggacgttctggaagctttattcgccaagaccagatatcccgacatctttatgagagaggaggtagctctgaagatcaatctgcccgaaagtcgggtccaggtctggttcaagaacagacgggctaaatgtagacagcagcagcagcaacagcagaatggcgggcagaacaaagtccgcccagcaaagaaaaaaacctcccctgctagggaggtgtccagcgagagcggcacaagcgggcagttcacccccccttcatctacgtctgttcctaccattgctagctcttcagctcctgttagcatctggtcccccgccagtatttccccactgtcagacccattgagcactagcagcagctgtatgcagcggtcctacccaatgacttacactcaggcatcaggctacagtcaggggtatgcgggcagtactagctatttcggtggcatggattgcgggtcttacctaacgcctatgcatcaccagttacccggacccggggctacgctgtcgcccatgggcactaatgcagttacaagtcacctgaatcagagccctgcttccttgtctacgcaggggtatggtgcatcctctcttggattcaattccaccacggactgtctcgattacaaggaccagaccgcctcctggaaactgaattttaacgcagactgcctggactacaaagaccagacgtcctcgtggaaattccaggtgctctag

SEQ ID NO: 95462 - DNA, 720 bp, Artificial Sequence
  derived and/or modified sequence
atgatgagctacctgaagcagcccccctacgccgtgaacggcctgagtttaaccacatccggcatggaccttctccatccctcagttgggtaccccggcccgtgggccagctgcccagctgcaactccgcgcaagcaacggcgggagcgaacaaccttcaccagagcccagttagatgtgctggaggcgctgttcgctaaaaccaggtaccctgatatatttatgcgtgaggaagttgccttgaaaataaatcttcctgagtcccgggttcaggtgtggtttaaaaatcgtcgggcgaagtgcagacagcaacaacagcagcagcagaacggcgggcagaacaaagtgcgtccggctaaaaaaaaaacgagcccagctcgggaagtttcttcagagtccggtacaagtggccagttcacccccccttcgtccacctcagtgccgactatcgctagcagttccgcgccagtttccatctggagcccagctagtatttcaccattgagcgaccccctctctacttcgagtagctgcatgcaacggtcatatcccatgacgtatacccaggcatccggatacagccagggctatgccggtagcaccagctacttcggaggtatggattgcggcagctatttaactccaatgcatcatcaacttcctggtccgggtgcaaccctctcacccatgggcacaaatgctgtgacctcacatctgtag

SEQ ID NO: 95463 - DNA, 2198 bp, Artificial Sequence
  derived and/or modified sequence
cctgagagcgggaccggcctcagctccaacacagcctccactgtgattaaaaataaaaattgctagagcagccctcactcgccacatctactttgatagctggctatttggaatttaaaggatatttgactttttctaacctcccatgaggctgtaagttccactgctccaaacccacccaccaaggactctgaacctgtccaccccgggcgcatcaagatcttccagctgggtacccccgatttgggccgactttgcacctccaaacaaccttagcatgatgtcttatcttaagcaaccgccttacgcagtcaatgggctgagtctgaccacttcgggtatggacttgctgcacccctccgtgggctacccggggccctgggcttcttgtcccgcagccaccccccggaaacagcgccgggagaggacgacgttcactcgggcgcagctagatgtgctggaagcactgtttgccaagacccggtacccagacatcttcatgcgagaggaggtggcactgaaaatcaacttgcccgagtcgagggtgcaggtatggtttaagaatcgaagagctaagtgccgccaacaacagcaacaacagcagaatggaggtcaaaacaaagtgagacctgccaaaaagaagacatctccagctcgggaagtgagttcagagagtggaacaagtggccaattcactcccccctctagcacctcagtcccgaccattgccagcagcagtgctcctgtgtctatctggagcccagcttccatctccccactgtcagatcccttgtccacctcctcttcctgcatgcagaggtcctatcccatgacctatactcaggcttcaggttatagtcaaggatatgctggctcaacttcctactttgggggcatggactgtggatcatatttgacccctatgcatcaccagcttcccggaccaggggccacactcagtcccatgggtaccaatgcagtcaccagccatctcaatcagtccccagcttctctttccacccagggatatggagcttcaagcttgggttttaactcaaccactgattgcttggattataaggaccaaactgcctcctggaagcttaacttcaatgctgactgcttggattataaagatcagacatcctcgtggaaattccaggttttgtgaagacctgtagaacctctttttgtgggtgatttttaaatatactgggctggacattccagttttagccaggcattggttaaaagagttagatgggatgatgctcagactcatctgatcaaagttccgagaggcatagaaggaaaaacgaagggccttagaggggcctacaaaccagcaacatgaaatggacaaaccaatctgcttaagatcctgtcatagttttagatcattggttatcctgatttgcaaagtgatcaaaagcattctagccatgtgcaaccaaacaccaccaaaaataaaatcaaacaaaactaagttgtgaaggaagggagggaaggtcatagccttcttaagcagaggtgttccattgttttagccaatccttggttgaatcttaggaatgaacagtgtctcaagctcattcacgtttcatgaccaactggtagttggcactgaaaaaacttttcagggctgtgtgaattgtgtgactgattgtcctagatgcactactttatttaaaaaataatgttcataaggagtcaatatgtagtttaagagacaatcagtgtgtgtcttataaatggtacatctgtggtttttaatctgtgctagacttcaaaactgtgatctcctgttattgtatgcaaccttgaactccacctctgcaggggttcttctgtgattaaataggttataattataagcaaaattcagagcaactgagtactgatctaaaaagattacctttggctggaggtgagctgcactgaaactttacgacaaaatgtctctggacaaagagagtcagagaagagaagcaaaaggacactaattcatctgtaatttactgttggtaagcctagcagtaaagagacattggtcaattgctctgaccctgatgaattattaaactgagatcattgtcgtttatgcttgcagatgttaaatggaaaagttatatatgcataaaccttttcttcctggatttggcagatatgtataattatattaaaatggttctagcaca

SEQ ID NO: 95464 - DNA, 908 bp, Artificial Sequence
  derived and/or modified sequence
tggaacgtggaagagctgctgcctccgaagcagtaaaccagcccctctgtttgtttgtttgctttgcccttagttccactgctccaaacccacccaccaaggactctgaacctgtccaccccgggcgcatcaagatcttccagctgggtacccccgatttgggccgactttgcacctccaaacaaccttagcatgatgtcttatcttaagcaaccgccttacgcagtcaatgggctgagtctgaccacttcgggtatggacttgctgcacccctccgtgggctacccggggccctgggcttcttgtcccgcagccaccccccggaaacagcgccgggagaggacgacgttcactcgggcgcagctagatgtgctggaagcactgtttgccaagacccggtacccagacatcttcatgcgagaggaggtggcactgaaaatcaacttgcccgagtcgagggtgcaggtatggtttaagaatcgaagagctaagtgccgccaacaacagcaacaacagcagaatggaggtcaaaacaaagtgagacctgccaaaaagaagacatctccagctcgggaagtgagttcagagagtggaacaagtggccaattcactcccccctctagcacctcagtcccgaccattgccagcagcagtgctcctgtgtctatctggagcccagcttccatctccccactgtcagatcccttgtccacctcctcttcctgcatgcagaggtcctatcccatgacctatactcaggcttcaggttatagtcaaggatatgctggctcaacttcctactttgggggcatggactgtggatcatatttgacccctatgcatcaccagcttcccggaccaggggccacactcagtcccatgggtaccaatgcagtcaccagccatct

SEQ ID NO: 95465 - DNA, 894 bp, Artificial Sequence
  derived and/or modified sequence
atgatgtcataccttaaacagccgccttatgcagtcaacgggctgagcctgacaacaagcggtatggacctgctgcacccgtcagtgggttacccaggcccttgggcatcttgccccgcagcaaccccccgtaagcagcgtagagaaagaactactttcactagagcacagctagatgtcttagaggcactatttgcaaaaactcggtatccagacatctttatgcgcgaagaagttgccctgaagataaacttacccgaatcccgcgtccaagtgtggttcaaaaatcgccgagctaagtgccgccagcagcaacagcagcaacagaatggcggtcagaacaaggtacgcccagccaaaaagaaaaccagtcccgctagagaggtgagctcagagtctggcacaagcgggcagttcactcctccttcctccaccagtgtcccaactatcgcatcgtcctctgccccagtgtcaatttggagcccagcctcaatttctccacttagcgatccattaagcacttcatccagctgcatgcagcggagttatcctatgacatacacccaggcatctggctatagccagggctacgctggaagtacatcttacttcggcggaatggattgcggatcttatctgactcccatgcaccaccaactgccaggcccaggagcaaccctttcgcctatgggcaccaacgccgttacatctcacctgaatcagagccccgctagtctgagtacacagggttacggggctagcagcctgggctttaattccacaactgattgcctcgattacaaggatcagacagccagttggaagcttaacttcaacgctgactgtcttgattataaagatcagaccagcagttggaagtttcaggtcctctag

SEQ ID NO: 95466 - DNA, 720 bp, Artificial Sequence
  derived and/or modified sequence
atgatgagctacctcaaacaaccaccatacgctgttaatggcctcagcctcactactagtgggatggacctgctgcaccctagtgtggggtacccaggcccatgggccagctgcccagccgcaactcctagaaaacagaggagggagcgcactacattcactagggcccagctggatgtgctggaagcactatttgcaaagactcgctatcctgatatcttcatgcgcgaagaagtcgctctcaagattaacctcccagagagccgcgtccaggtctggtttaagaaccggagagccaagtgcagacagcagcagcagcagcaacagaatggtggtcagaataaagtccgacccgctaaaaaaaagacctcaccagccagagaggtgtcctcagagagcggaacaagcgggcagtttacacccccttcctccacttctgtgccaaccatcgcatcttcctctgcgcctgtgtccatatggtcccctgcttctatcagccccctttcagatcctctctcaacgtctagctcctgtatgcagcgatcgtaccctatgacctacacccaagcatctggatatagccagggttatgccggatcaacctcatattttggaggtatggactgcgggtcttacctcaccccgatgcatcaccagctgccgggacccggagccaccctgagccccatgggtacaaacgccgtgacttctcatctttag

SEQ ID NO: 95467 - DNA, 894 bp, Artificial Sequence
  derived and/or modified sequence
atgatgagctacctgaagcagcccccctacgccgtgaacggcctgagcctgaccaccagcggcatggacctgctgcaccccagcgtgggctaccccggcccctgggccagctgccccgccgccacccccagaaagcagagaagagagagaaccaccttcaccagagcccagctggacgtgctggaggccctgttcgccaagaccagataccccgacatcttcatgagagaggaggtggccctgaagatcaacctgcccgagagcagagtgcaggtgtggttcaagaacagaagagccaagtgcagacagcagcagcagcagcagcagaacggcggccagaacaaggtgagacccgccaagaagaagaccagccccgccagagaggtgagcagcgagagcggcaccagcggccagttcaccccccccagcagcaccagcgtgcccaccatcgccagcagcagcgcccccgtgagcatctggagccccgccagcatcagccccctgagcgaccccctgagcaccagcagcagctgcatgcagagaagctaccccatgacctacacccaggccagcggctacagccagggctacgccggcagcaccagctacttcggcggcatggactgcggcagctacctgacccccatgcaccaccagctgcccggccccggcgccaccctgagccccatgggcaccaacgccgtgaccagccacctgaaccagagccccgccagcctgagcacccagggctacggcgccagcagcctgggcttcaacagcaccaccgactgcctggactacaaggaccagaccgccagctggaagctgaacttcaacgccgactgcctggactacaaggaccagaccagcagctggaagttccaggtgctgtag

SEQ ID NO: 95468 - DNA, 720 bp, Artificial Sequence
  derived and/or modified sequence
atgatgagctacctgaagcagcccccctacgccgtgaacggcctgagcctgaccaccagcggcatggacctgctgcaccccagcgtgggctaccccggcccctgggccagctgccccgccgccacccccagaaagcagagaagagagagaaccaccttcaccagagcccagctggacgtgctggaggccctgttcgccaagaccagataccccgacatcttcatgagagaggaggtggccctgaagatcaacctgcccgagagcagagtgcaggtgtggttcaagaacagaagagccaagtgcagacagcagcagcagcagcagcagaacggcggccagaacaaggtgagacccgccaagaagaagaccagccccgccagagaggtgagcagcgagagcggcaccagcggccagttcaccccccccagcagcaccagcgtgcccaccatcgccagcagcagcgcccccgtgagcatctggagccccgccagcatcagccccctgagcgaccccctgagcaccagcagcagctgcatgcagagaagctaccccatgacctacacccaggccagcggctacagccagggctacgccggcagcaccagctacttcggcggcatggactgcggcagctacctgacccccatgcaccaccagctgcccggccccggcgccaccctgagccccatgggcaccaacgccgtgaccagccacctgtag

SEQ ID NO: 95469 - protein, 151 aa, Artificial Sequence
  derived and/or modified sequence
MTNEEPLPKKVRLSETDFKVMARDELILRWKQYEAYVQALEGKYTDLNSNDVTGLRESEEKLKQQQQESARRENILVMRLATKEQEMQECTTQIQYLKQVQQPSVAQLRSTMVDPAINLFFLKMKGELEQTKDKLEQAQNELSAWKFTPDR

SEQ ID NO: 95470 - protein, 396 aa, Artificial Sequence
  derived and/or modified sequence
MTNEEPLPKKVRLSETDFKVMARDELILRWKQYEAYVQALEGKYTDLNSNDVTGLRESEEKLKQQQQESARRENILVMRLATKEQEMQECTTQIQYLKQVQQPSVAQLRSTMVDPAINLFFLKMKGELEQTKDKLEQAQNELSAWKFTPDSQTGKKLMAKCRMLIQENQELGRQLSQGRIAQLEAELALQKKYSEELKSSQDELNDFIIQLDEEVEGMQSTILVLQQQLKETRQQLAQYQQQQSQASAPSTSRTTASEPVEQSEATSKDCSRLTNGPSNGSSSRQRTSGSGFHREGNTTEDDFPSSPGNGNKSSNSSEERTGRGGSGYVNQLSAGYESVDSPTGSENSLTHQSNDTDSSHDPQEEKAVSGKGNRTVGSRHVQNGLDSSVNVQGSVL

SEQ ID NO: 95471 - DNA, 1191 bp, Artificial Sequence
  derived and/or modified sequence
atgaccaacgaggagcccctgcccaagaaggtgagactgagcgagaccgacttcaaggtgatggccagagacgagctgatcctgagatggaagcagtacgaggcctacgtgcaggccctggagggcaagtacaccgacctgaacagcaacgacgtgaccggcctgagagagagcgaggagaagctgaagcagcagcagcaggagagcgccagaagagagaacatcctggtgatgagactggccaccaaggagcaggagatgcaggagtgcaccacccagatccagtacctgaagcaggtgcagcagcccagcgtggcccagctgagaagcaccatggtggaccccgccatcaacctgttcttcctgaagatgaagggcgagctggagcagaccaaggacaagctggagcaggcccagaacgagctgagcgcctggaagttcacccccgacagccagaccggcaagaagctgatggccaagtgcagaatgctgatccaggagaaccaggagctgggcagacagctgagccagggcagaatcgcccagctggaggccgagctggccctgcagaagaagtacagcgaggagctgaagagcagccaggacgagctgaacgacttcatcatccagctggacgaggaggtggagggcatgcagagcaccatcctggtgctgcagcagcagctgaaggagaccagacagcagctggcccagtaccagcagcagcagagccaggccagcgcccccagcaccagcagaaccaccgccagcgagcccgtggagcagagcgaggccaccagcaaggactgcagcagactgaccaacggccccagcaacggcagcagcagcagacagagaaccagcggcagcggcttccacagagagggcaacaccaccgaggacgacttccccagcagccccggcaacggcaacaagagcagcaacagcagcgaggagagaaccggcagaggcggcagcggctacgtgaaccagctgagcgccggctacgagagcgtggacagccccaccggcagcgagaacagcctgacccaccagagcaacgacaccgacagcagccacgacccccaggaggagaaggccgtgagcggcaagggcaacagaaccgtgggcagcagacacgtgcagaacggcctggacagcagcgtgaacgtgcagggcagcgtgctgtag

SEQ ID NO: 95472 - DNA, 1191 bp, Artificial Sequence
  derived and/or modified sequence
atgacgaatgaagagccgctccctaagaaggtgaggctgtccgagactgacttcaaagtcatggcgagggatgagttaatactccggtggaagcagtacgaggcgtacgtgcaagctctcgagggcaagtacaccgatctgaattcaaacgatgtgaccggtcttagggagtctgaggagaaactgaagcaacagcagcaggagagtgcaaggagagaaaacatactcgttatgcgtcttgctactaaggaacaagagatgcaggagtgtacaactcagatacagtacctgaaacaggtacaacagccgtctgtcgcacagttaaggtctactatggtggatccggcaattaacctatttttcttaaagatgaaaggcgagctcgaacagaccaaggacaagttagagcaagcacagaacgagttgagtgcatggaaattcacgcccgactcccaaacaggaaagaaactgatggctaagtgtcgaatgcttattcaggaaaatcaggaactcgggcggcagttaagtcagggccggatcgcacaattagaggcagagttagccctgcagaaaaagtacagtgaagaactgaaaagttcccaggacgagctgaacgactttattattcagctcgacgaagaagtcgaagggatgcagtctacaatactcgtgttgcagcagcagctgaaagaaacccgacagcaattggcccagtatcaacagcaacagtcccaagcttcagctcccagcactagtagaactactgcctccgaaccagttgagcagagcgaggcaacttccaaggactgttcgagactgactaatggaccgtcgaacggctcctcctcacgccaaaggacaagtggctcgggctttcatcgcgagggcaataccacagaggacgacttcccatcctcccccggcaacggaaataagtcttcgaactcatcagaggagcgaaccggccggggaggtagcggatatgtgaatcagttaagtgcagggtatgagtcagtcgactcaccaaccggaagcgagaacagtctgacccaccagagcaatgacacggacagttcacatgatccccaggaggagaaagcagtcagtggtaaaggcaaccggactgtgggctcgaggcacgttcagaatggtctggatagttccgtgaatgtccagggttccgtgttatag

SEQ ID NO: 95473 - DNA, 1191 bp, Artificial Sequence
  derived and/or modified sequence
atgaccaatgaggagcccctgcccaagaaggtgcggctgtctgaaacagacttcaaggtgatggccagagatgagctgatcctgcgctggaagcagtatgaggcctacgtgcaggccctggagggcaagtacacagacctgaacagcaatgatgtgacaggcctgcgggagagcgaggagaagctgaagcagcagcagcaggagagcgcccggcgggagaacatcctggtgatgaggctggccaccaaggagcaggagatgcaggagtgcaccacccagatccagtacctgaagcaggtgcagcagcccagcgtggcccagctgcggagcaccatggtggaccctgccatcaacctcttcttcctgaagatgaagggggagctggagcagaccaaggacaagctggagcaggcccagaatgagctgagcgcctggaagttcaccccagacagccagacaggcaagaagctgatggccaagtgcaggatgctgatccaggagaaccaggagctgggccggcagctgagccagggccgcatcgcccagctggaggccgagctggccctgcagaagaagtacagcgaggagctgaagagcagccaggatgagctgaatgacttcatcatccagctggatgaggaggtggagggcatgcagagcaccatcctggtgctgcagcagcagctgaaggagacccggcagcagctggcccagtaccagcagcagcagagccaggccagcgcccccagcaccagcaggaccacagccagcgagcctgtggagcagagcgaggccaccagcaaggactgcagccggctgaccaacggccccagcaatggcagcagcagccggcagaggaccagcggcagcggcttccaccgggagggcaacaccacagaagatgacttccccagcagccctggaaatggaaacaagagcagcaacagcagcgaggagaggacaggccggggcggcagcggctacgtgaaccagctgtctgctggctatgagagcgtggacagccccactggaagtgagaacagcctgacccaccagagcaatgacacagacagcagccatgacccccaggaggagaaggctgtgtctggaaaaggaaacagaacagtgggcagccgccacgtgcagaatggcctggacagctctgtgaatgtgcagggctctgtgctgtag

SEQ ID NO: 95474 - DNA, 1191 bp, Artificial Sequence
  derived and/or modified sequence
atgaccaacgaggagcccctgcccaagaaggtgcggctgagcgagactgattttaaggtaatggcacgggatgagctgatcctccgctggaaacagtatgaagcatatgtgcaggccctggagggcaagtatacagacttgaatagtaatgatgtcacagggcttcgcgagtcagaagagaaactcaagcagcagcagcaggagtctgcaagacgggaaaacattttagtgatgcgactcgcgaccaaagagcaggagatgcaggagtgcactacacagatacaatatctgaaacaggtgcagcagccgagcgtggctcagctgcggagcacaatggtggatccggccatcaacctgttcttccttaagatgaagggcgaattggaacagactaaggacaagctcgaacaggcccagaatgaactgtccgcatggaaatttacacccgacagccagacaggaaaaaaattaatggctaagtgtcgcatgttgattcaagagaatcaggagctcggtcgccagctatcacagggacgaatcgcccagctggaggccgagctggcccttcagaagaaatactcagaggaactgaaatcatctcaggacgagctcaatgacttcattatacagctggacgaggaggtggagggcatgcagagtaccattctcgtcttgcagcagcagttgaaggagaccagacagcagttagctcagtaccagcagcagcagagccaggccagcgcgcccagcacgtcccgcaccaccgcaagcgaaccggttgaacaaagcgaagctacaagtaaagattgttccaggctgactaacggtccctcaaacggtagtagttcacgtcagaggacgagcggcagcggcttccacagggagggcaacactacagaagatgactttcccagtagccctgggaatggaaataagtcttccaactccagcgaggagcgcactggccgaggaggatccggctacgttaatcagctgagtgctgggtacgaatcagtcgactccccaaccgggagtgaaaatagcctgacgcaccagagtaacgacaccgattcttcacacgacccacaagaagagaaggcagtatctggaaaaggcaatagaactgtgggcagtcgccacgtccagaacgggctggatagcagtgtaaacgtgcagggctccgtcctctag

SEQ ID NO: 95475 - DNA, 1191 bp, Artificial Sequence
  derived and/or modified sequence
atgacgaatgaggaacccttgcctaaaaaggtccggctgtccgagacagacttcaaggtcatggcccgtgacgagctaatccttagatggaagcagtacgaggcttacgtgcaagctctcgagggcaagtacaccgatctcaactccaacgatgtcacaggtttgagggaaagcgaggagaaactgaagcagcagcaacaggaaagtgccaggcgggaaaacatcctcgtgatgaggttggccaccaaggagcaggagatgcaggagtgcaccactcagattcagtatcttaaacaggttcagcagcctagtgtggcccagttgcggtcaacaatggtggatcccgctataaatcttttctttctgaaaatgaagggagaactcgagcaaacgaaagacaagttagaacaagcccagaacgaattatcagcatggaaatttacgccagacagccagactggtaagaaattgatggcgaagtgccgcatgctcatacaggagaaccaggagctgggcagacagttgagccaaggtcgcatagcccagctcgaagccgaattagctctgcaaaaaaagtacagcgaagaacttaaaagcagccaagacgaactgaatgactttattattcagcttgatgaagaggtggaaggtatgcagagcacgattctggttctccaacaacagttgaaggaaactaggcagcaactcgcacagtaccagcagcagcagagccaggcaagcgccccttcgacgagcaggactaccgctagtgagcccgtggagcagtccgaagctacttctaaggactgttcccggttgacaaacggcccatcaaatggctcctcctctaggcagagaacgtcaggtagcggattccatagggaggggaatacaactgaagacgattttccctcatcacctgggaacggcaacaagtcttctaattcctccgaggagcgaacagggagaggaggcagcggatatgtcaaccagctctccgcgggatatgagtcagttgattcacctacagggtctgagaactccttaacccaccagtccaacgatacggactctagtcacgacccccaagaggaaaaagcagtgagcggcaagggtaatcgtacagtagggagccgccatgtgcagaacgggttagattctagtgttaacgtgcaggggtctgtgctatag

SEQ ID NO: 95476 - DNA, 3656 bp, Artificial Sequence
  derived and/or modified sequence
ttactttgtttccttttttatttacttttttggctatgtaaaactaaaagttcaaagacagagaaatcttgtctccaccccccactctttataggcaactaaaaatgttaagtttccaggatatccttccaattcctccccgaaaataagcatatacacataaatattcatattaaatataaatatatatttttatgtatttaagtaaatacataaaagcatatatgcttatttttgcttttgaatacagtgaatacttactacacttaaatatttaagtgaatacttaatacaacctgagactcattccaaagcaacacacgattatttcctgaatctttttaatggttgcattgtgttctactgtatggatgcaccattcccaatcagttccctattaacggatatttgggttatccctaacttttgctatgacaaatagcactgcaataaccttgtatacctattgtttccatgtgtggagctgcaccttcagaataaggttagggttagaagtataactgcaaggtataagaataaacacaagtaattttgtactccgtggaacttgaaccatttttccactcccaccaggaaaggtaatttcaacgtgtatttccattgtaagtgaggtggagcgactttctatgtttaaagaccattacggtattttttctgagaatcatctgttcatgtccttccccattttctcctttggcttttgcactttttgttttcaatttttgagagctcttgtgatacgagttgcaaagattttctccagaccgatctgattcactggaaatatactacgaccatctggaatgtactttaatcttatcctaataaatcaccttactacaagacactcctttggggatgaacaggtttgataaagccggctaaggacagaccaatcaaaagaattacgtgctcttctagtaagtgtttagagactgtttcacgttctccaggtaacaccgccattactcggcggtccagatggcagtcttacttcagggagtctactccacttgcaggacctctttgattgagttcactaaacctcacagggccgccttccccgtgttccagttagcaaggggccctcaacgccgcggacacagcgcaacctccgacgccagagaacaatagctcctcgatgcgtctccagagatgtcaaggaggaacgaacccagcggccaggagactgcgcctcacgactgatgagagggaaggcatcggtttctaagttctcaaaacttacaggtgagcttctgctaagagtaaacgcccgcggctcgccgcccacggcctctctcttgaggtggcacctggtcctccgacacgcggaagcatcacggatgagcgtcacgaacacagagcggccaatcacgcgccgccttcgcccagatccctccgcacgaggcagccccgcagccgcaggtggccccggcgagtacttccaccttcccttcccgtgatgccctggggctgacctccgacctcgctggcccgcccctcccctcggccgcttcccttactgagcttgctgagctccggggcccgcggagctcgcgccaggctcctgggaaaggacggggagtgttaccggggagcagctgctccattgtgcctcgaggccccgatcgggctaggccgacggcctccctcccttcacctttcctctcctggcggggttcggcggcgggcgagtgactgcggccacgcctgaaaggcgactctcctgattcaagatgaccaacgaagaacctcttcccaagaaggttcgattgagtgaaacagacttcaaagttatggcaagagatgagttaattctaagatggaaacaatatgaagcatatgtacaagctttggagggcaagtacacagatcttaactctaatgatgtaactggcctaagagagtctgaagaaaaactaaagcaacaacagcaggagtctgcacgcagggaaaacatccttgtaatgcgactagcaaccaaggaacaagagatgcaagagtgtactactcaaatccagtacctcaagcaagtccagcagccgagcgttgcccaactgagatcaacaatggtagacccagcgatcaacttgtttttcctaaaaatgaaaggtgaactggaacagactaaagacaaactggaacaagcccaaaatgaactgagtgcctggaagtttacgcctgatagccaaacagggaaaaagttaatggcgaagtgtcgaatgcttatccaggagaatcaagagcttggaaggcagctgtcccagggacgtattgcacaacttgaagcagagttggctttacagaagaaatacagtgaggagcttaaaagcagtcaggatgaactgaatgacttcatcatccagcttgatgaagaagtagagggtatgcagagtaccattctagttctgcagcagcagctgaaggagacacgccagcagttggctcagtaccagcagcagcagtctcaggcctctgccccaagtaccagcaggactacagcttctgaacctgtagaacagtcagaggccacaagtaaagactgcagtcgtctgacaaacggaccaagtaatggtagctcctcccgccagaggacgtctgggtctggatttcacagggagggcaacacaaccgaagatgactttccttcttctccagggaatggtaataagtcctccaacagctcagaggagagaactggcagaggaggtagtggttacgtaaatcaactcagtgcggggtatgaaagtgtagactctcccacgggcagtgaaaactctctcacacaccaatcaaatgacacagactccagtcatgaccctcaagaggagaaagcagtgagtgggaaaggtaatcgaactgtgggttcccgccacgttcagaatggcttggactcaagtgtaaatgtacagggttcagttttgtaatattttttcagcaaatttttatacagtgtcatttaatttgggagaggatactgtccagaaaattaatgcatacttttgtcacaatttgcctttttgtgggtgtacgttttggtttttttttgttgttttttttctttgttttttttttcttttctttttttttttttttttttttttttgcttcaatacttctgccgctttggaaattgtaacagttaattactttgaatgttgctaaaaggacattttgtgtagggtcaagttatttttatatgagttaatgtgaaattgtaaatggaaatttttccttaaaatacaacacaatgatgtctgtataaatctgtctgtttagaatctgtgctgtgtaagggcattcgtactcatgctgttactgtacttatgcaccattcagacttgttagagtagatgtgggtttatgactgccaagtttgcccagtacagtagttttttatcactaaaagttggactcattgatggagtcctgtagtagtttcagtgttagatacagttttttccaccatacatctgtgcattttctctttaggtgactgtttaagaaatttgtgtgcatagttactcagtttttatgaactgttgtatcctgttaatgcatattgctctgtgactccagtatatcttacctgtactgaccaaacctaaataaagatttttattgtaactccttaa

SEQ ID NO: 95477 - protein, 385 aa, Artificial Sequence
  derived and/or modified sequence
MYERHKRRYSLCDISKVDRTVDVVLLKINRENWCTIEPCPDAASLLASKQSPECENFLDVGLGRECTSKQGVLKRESGSDSDLFHSPSDDMDSIIFPKPEEEHLACDITGSSSSTDDTASLDRHSSHGSDVSLSQILKPNRSRDRQSLDGFYSHGMGAEGRESESEPADPGDVEEEEMDSITEVPANCSVLRSSMRSLSPFRRHSWGPGKNAASDAEMNHRSFSLEGLTGGAGVGNKPSSSLEVSSANAEELRHPFSGEERVDSLVSLSEEDLESDQREHRMFDQQICHRSKQQGFNYCTSAISSPLTKSISLMTISHPGLDNSRPFHSTFHNTSANLTESITEENYNFLPHSPSKKDSEWKSGTKVSRTFSYIKNKMSSSKKSK

SEQ ID NO: 95478 - DNA, 1245 bp, Artificial Sequence
  derived and/or modified sequence
atgtcgaacacctggaaatttttgtcgcatagtactgattccctcaataagatttccaaggttaacgaatccacagagagtctgaccgacgaagggaccgatatgaatgagggccaactgttgggcgattttgagatcgaatccaagcagttagaagcggaatcctggagcaggattatagattcaaaattcttgaagcaacaaaaaaaagatgttgtcaaacgccaggaggtcatatatgaacttatgcagaccgaattccatcacgtgcggaccctgaagatcatgagtggagtttacagtcagggaatgatggcagatctgctctttgagcaacagatggtggaaaaacttttcccgtgcctcgacgagctaatatcgattcactcacagttctttcagcggatactggagcggaagaaggaaagcctcgtggacaaaagcgagaaaaatttccttattaaacggatcggggatgtcctggttaatcagttctctggcgagaacgccgagagactgaagaagacgtacggtaaattttgcgggcagcacaatcagtctgtaaactattttaaggatctctatgctaaagataagagattccaggccttcgtgaaaaaaaaaatgtcatccagtgttgtgaggagactgggaatccctgaatgtatactgcttgtgacacaaagaattactaagtatcctgtgctcttccaaagaatactccagtgcacaaaagataatgaagtggaacaggaggacctggcacagtccttaagcctggtcaaggatgtgattggcgcagttgactcgaaagtcgctagctacgagaagaaagtgcgtctaaatgagatttacaccaagaccgatagcaagagcattatgagaatgaaatccggtcagatgtttgccaaagaagacctcaagagaaagaaactggtgcgagacggtagtgtgtttcttaagaatgctgccggccgactcaaggaagttcaagctgttctgctgaccgatattctcgtattcctgcaggagaaggaccaaaaatacattttcgcttctctagaccagaagagtacagttattagcctaaagaaattgattgttcgggaggttgcacatgaggagaaaggactttttctcatctccatgggcatgacggacccagagatggtggaggtgcacgcctcatccaaggaagagaggaatagctggatacagatcattcaggacacgataaacacctag

SEQ ID NO: 95479 - DNA, 1158 bp, Artificial Sequence
  derived and/or modified sequence
atgtatgagaggcacaagcggcggtattctctatgcgacatatctaaagttgataggaccgtggacgtcgtcctcctgaagattaatagggagaattggtgcaccatagaaccctgtcccgatgctgcgtctctacttgcctccaagcagagcccagagtgtgagaactttctggatgtggggctgggcagagagtgcactagcaagcagggggtgttgaaaagagaaagcggatctgactccgacctctttcactcgccttctgatgacatggactcaataatcttccccaaacctgaagaggaacacctcgcttgcgatatcacaggttcttcatcttcgaccgacgacaccgcttccctggatcgccactccagccacggctcggacgtgtccctgagtcaaattttaaagcccaacaggtcccgagatcgccaatccctggacggattctacagtcatggaatgggagccgaggggcgggagagcgaatctgagccggctgatcctggtgacgttgaggaggaggaaatggattcaatcacagaagtgcccgcaaattgcagtgtgctgagaagctcaatgcggtcactgtccccatttcggaggcattcatgggggccaggtaaaaatgctgcatctgacgctgagatgaaccatagaagcttttccttggagggtctaacgggaggagccggagtcgggaataaaccttctagcagtctggaagtttcttcagctaatgctgaagaactccggcaccccttctcgggggaagagagggtcgattccctggttagcctgtcggaagaagatcttgaaagtgaccagagagaacacagaatgttcgatcagcagatctgccaccgttctaagcagcagggattcaactactgtacaagcgctatctcatctccccttacgaagtcaatcagcctgatgactatatcccaccctgggttggataattcgaggccctttcatagcacttttcataataccagcgctaacctgaccgagtctattaccgaggagaattataacttcctcccccactccccctctaaaaaggacagcgagtggaagtcagggactaaagtgtctagaactttcagttacataaaaaacaaaatgtcaagctccaagaagtctaaatag

SEQ ID NO: 95480 - DNA, 1245 bp, Artificial Sequence
  derived and/or modified sequence
atgagcaacacctggaagttcctgagccacagcacagacagcctgaacaagatcagcaaggtgaatgaaagcacagagagcctgacagatgagggcacagacatgaatgaaggccagctgctgggggactttgaaattgagagcaagcagctggaggccgagagctggagccgcatcatcgacagcaagttcctgaagcagcagaagaaggatgtggtgaagaggcaggaggtgatctatgagctgatgcagacagagttccaccacgtgaggaccctgaagatcatgtctggagtgtacagccagggcatgatggctgacctgctgtttgagcagcagatggtggagaagctgttcccctgcctggatgagctgatcagcatccacagccagttcttccagaggatcctggagaggaagaaggagagcctggtggacaagtctgagaagaacttcctgatcaagagaattggagatgtgctggtgaaccagttcagcggggagaatgctgagcggctgaagaagacctacggcaagttctgtggccagcacaaccagagcgtgaactacttcaaggacctgtatgccaaggacaagcgcttccaggcctttgtgaagaagaagatgagcagctctgtggtgcggcggctgggcatccctgagtgcatcctgctggtgacccagaggatcaccaagtaccctgtgctcttccagaggatcctgcagtgcaccaaggacaatgaggtggagcaggaggacctggcccagagcctgagcctggtgaaggatgtgattggagctgtggacagcaaggtggccagctatgagaagaaggtgcggctgaatgagatctacaccaagacagacagcaagagcatcatgaggatgaagagcggccagatgtttgccaaggaggacctgaagaggaagaagctggtgagagatggctctgtgttcctgaagaatgctgctggccgcctgaaggaggtgcaggccgtgctgctgacagacatcctggtgttcctgcaggagaaggaccagaagtacatctttgccagcctggaccagaagagcaccgtcatcagcctgaagaagctgattgtgcgggaggtggcccacgaggagaagggcctcttcctgatctccatgggcatgacagatcctgagatggtggaggtgcacgccagcagcaaggaggagagaaattcctggatccagatcatccaggacaccatcaacacctag

SEQ ID NO: 95481 - DNA, 1158 bp, Artificial Sequence
  derived and/or modified sequence
atgtatgaaagacacaagaggcgctacagcctgtgtgacatcagcaaggtggacagaacagtggatgtggtgctgctgaagatcaaccgggagaactggtgcaccatcgagccctgcccagatgctgccagcctgctggccagcaagcagagcccagaatgtgagaacttcctggatgtgggcctgggcagagaatgtaccagcaagcagggcgtgctgaagcgggagagcggcagtgacagcgacctcttccacagccccagtgatgacatggacagcatcatcttccccaagccagaggaggagcacctggcctgtgacatcaccggcagcagcagcagcacagatgacacagccagcctggacagacacagcagccacggcagtgatgtgtccctgagccagatcctgaagcccaacagaagccgggaccggcagagcctggatggcttctacagccacggcatgggcgctgagggccgggagagcgagagcgagcctgctgaccctggagatgtggaggaggaggagatggacagcatcacagaggtgcctgccaactgcagcgtgctgcggagctccatgaggagcctgagccccttccgccgccacagctggggccctgggaagaatgctgccagtgatgctgagatgaaccacaggagcttcagcctggagggcctgactggaggagctggggtgggcaacaagcccagcagcagcctggaggtgagcagcgccaatgctgaggagctgcggcaccccttctctggagaggagcgggtggacagcctggtgtccctgtctgaggaggacctggagagtgaccagcgggagcacaggatgtttgaccagcagatctgccacaggagcaagcagcagggcttcaactactgcaccagcgccatcagcagccccctgaccaagagcatcagcctgatgaccatcagccaccctggcctggacaacagccggcccttccacagcaccttccacaacaccagcgccaacctgacagagagcatcacagaggagaactacaacttcctgccccacagccccagcaagaaggacagcgagtggaagagcggcaccaaggtgtccaggaccttctcctacatcaagaacaagatgagcagcagcaagaagagcaagtag

SEQ ID NO: 95482 - DNA, 1245 bp, Artificial Sequence
  derived and/or modified sequence
atgagcaacacctggaagttcctgagccacagcaccgacagcctgaataaaataagcaaggtcaatgagagcaccgaatccttgacagatgaggggacagacatgaacgagggccagctgctgggagattttgaaatcgaaagtaagcagcttgaggctgaaagctggtctcgaatcatcgactccaaatttctgaaacagcagaaaaaggacgtggtgaagaggcaagaggtcatttacgagctcatgcaaacggaattccaccatgtccgtacactgaagattatgagcggcgtatacagccaaggcatgatggccgatttgctgtttgagcagcagatggttgagaagctgtttccgtgtctcgacgagctgatctccatccatagccagttctttcagcggatcttggagcgaaagaaagagtcattggttgataaaagcgagaagaatttcctcattaaacggatcggggatgtgttggtgaatcagttctccggcgagaatgccgagagactgaagaagacatatggtaaattttgcggccagcacaaccagagtgtgaactactttaaagatctgtatgccaaagataagagatttcaggcattcgtgaaaaagaagatgtcttccagcgtggtgcggaggttgggaattccagaatgtattctgctggtcacccaacgcattaccaagtacccagtgctctttcagaggattttgcagtgcactaaggataatgaggtcgagcaggaggaccttgcccagtccttatcactcgtcaaagacgtaatcggcgccgtggactcaaaagtcgcttcttatgaaaagaaggtccgacttaatgaaatatacacaaagactgacagcaaatctatcatgcgtatgaagtccggacaaatgttcgcaaaggaggacctgaagaggaaaaagttagtgagagacgggtctgtgtttctcaaaaacgcagcgggccgcttgaaagaggtccaagcagtgctgctgacggatatcctggtcttcttgcaagagaaggatcaaaaatacatttttgcttccttggaccagaagagtacagtcatctccttaaagaaattaatcgtgcgggaagtagcccacgaggaaaaaggattgtttttgatctccatggggatgaccgacccggaaatggtggaagtccacgctagttctaaagaggagcgcaattcctggattcagatcattcaggacacgataaacacttag

SEQ ID NO: 95483 - DNA, 1158 bp, Artificial Sequence
  derived and/or modified sequence
atgtacgagcggcacaagcggcggtacagcctgtgcgacatcagcaaagttgatcgtaccgtggacgttgtcctgctgaagatcaaccgcgagaactggtgcactatcgagccctgccccgacgcagcttctctgctcgcctccaaacagagcccggagtgtgaaaatttcctggatgtcgggcttgggcgcgagtgtactagcaagcaaggcgttctcaaaagggaaagcggttccgattccgacctcttccattcaccaagcgatgacatggactccatcatatttcctaagccagaggaagaacatcttgcttgcgatattaccgggtctagctcgagtaccgacgacacagcctccctggaccggcacagcagccacggctccgatgtgtctctctcccaaatcctaaagcccaaccgcagcagagatcggcaatctttggacggcttctattcacatgggatgggggctgaagggagggagtcagaaagcgaaccagcagaccctggggatgtggaggaggaagagatggattcaattaccgaagtgccggccaactgtagcgtgctgaggagcagcatgaggtcgctatctcctttccgtcgccattcctggggaccgggcaagaatgcggcaagtgatgccgagatgaatcataggagcttctccctcgaagggctcaccggaggagcaggggtaggaaacaaaccctcttcttcccttgaagtgagctcggcgaacgcagaagagctcagacacccattcagtggggaggagcgggtagacagtttggtctcccttagtgaggaagacttggagagtgaccaaagagaacaccgcatgttcgaccagcagatctgtcaccggagcaagcagcagggcttcaattattgcactagtgcaatttcatctcccttgaccaaatctatcagtctgatgacaatttcccatcctggtcttgataatagcaggcccttccactcaacttttcataatacatctgctaatctgaccgagtccatcacagaggaaaactacaattttttgcctcactctccctctaaaaaggattccgaatggaagtccggaaccaaagtctcccggacatttagctatattaagaacaagatgtcttcaagcaaaaaaagtaaatag

SEQ ID NO: 95484 - DNA, 1245 bp, Artificial Sequence
  derived and/or modified sequence
atgtctaacacgtggaagtttctgagccattcaactgactccttgaataaaattagtaaagtgaatgagagcaccgagtccttaactgacgagggtaccgacatgaacgagggccaactactgggagactttgaaatagaaagcaagcaattggaggctgagtcttggtccaggataattgatagcaagtttctgaagcagcagaaaaaggacgtggtgaaaaggcaagaggtgatctatgagcttatgcagactgaattccatcatgtacgaactctcaagatcatgagtggagtttattcgcagggaatgatggcagatttgttgttcgagcagcagatggtcgagaagcttttcccatgccttgacgaacttatctctatacatagtcagttctttcagaggattctcgaacgtaagaaagagtcactagtggataagagcgagaagaacttcctcattaaaaggatcggagacgtgctcgttaaccagttctcaggtgagaatgcagagcgtcttaaaaagacatacggcaagttctgcggtcagcacaaccagagcgtgaactattttaaagatctgtacgcaaaagacaagcggtttcaggctttcgtgaaaaagaaaatgtcgtccagcgtagtgcgcaggctcggtatcccagagtgtatactgttagtcactcagagaattaccaagtatcctgtgctcttccagaggattctccagtgcacgaaggacaatgaagtggagcaagaggacctggcacagtctctgagcctcgtaaaagatgtgattggggctgtcgacagtaaagtggccagctatgagaagaaggtgagactaaacgaaatctataccaaaaccgacagtaagagtatcatgaggatgaagagcggccaaatgttcgctaaggaggatttaaagcggaaaaaactggtgcgggacgggtccgtgttcttgaaaaatgccgcagggagactgaaggaggttcaggccgtcctgcttactgacatcctggttttcctccaggaaaaggaccagaagtatattttcgcatccctggatcagaagtctactgtgatctcgctaaaaaagctaattgtgagagaagtggcacatgaggaaaagggcttatttctgataagtatggggatgaccgatcccgaaatggtggaagtgcatgcatcctccaaggaagagagaaattcgtggatacaaatcatccaggacacaataaatacatag

SEQ ID NO: 95485 - DNA, 1158 bp, Artificial Sequence
  derived and/or modified sequence
atgtatgagagacacaaacgaaggtattccctgtgcgacattagcaaggtggatagaacagtagacgtcgtgttgttgaagattaatcgggaaaattggtgcactatcgagccttgccctgacgcggctagccttctcgcaagtaagcaatcacctgagtgtgaaaatttcttggatgttggtcttggacgcgaatgtacatcaaaacaaggggtgctcaagagggaaagtggtagcgactctgatttatttcattccccttccgatgatatggactctatcatcttccccaaaccggaagaggagcacctagcctgcgatatcacagggtcttcctccagcactgacgacaccgcttctctcgatagacactcgtctcacggcagtgacgtgtctttatctcagatcctcaaacctaacagatcacgagaccgacagtctttggatgggttctactcccacggtatgggagcagaaggaagagagtcagagtctgagccagcagaccctggggatgtagaagaagaggagatggactcgattactgaagtgccggcaaattgcagtgtccttagatcttccatgcgtagcctatcacctttccgcaggcattcttgggggcctggaaagaatgccgcaagcgacgccgaaatgaatcaccgctctttcagcttggaggggctcacagggggagccggagttggaaataagcccagtagtagcctcgaggttagctcagcaaacgctgaagagctgaggcacccgttcagtggtgaagaacgtgtagactcattggtaagtctgtccgaagaagatttagaatccgatcagcgcgagcaccgcatgtttgatcaacaaatctgtcatcggtcaaaacagcaaggattcaactattgcacttccgccatttcttcacctctgactaaatcgatcagccttatgacaatatcacaccccggactggacaactctcggccttttcatagcacattccataatacatcggccaacctaactgaatctattaccgaggaaaactataattttctgccccattccccttctaagaaagacagcgaatggaaaagtggcacgaaggtttctcgcaccttttcgtacataaaaaacaaaatgtcatcgagcaaaaagtctaaatag

SEQ ID NO: 95486 - DNA, 5800 bp, Artificial Sequence
  derived and/or modified sequence
atgtatgaacggcacaagaggcgctacagcctctgtgacatctccaaggtggacaggactgtggacgtggtattgctgaagataaaccgagaaaactggtgtacaatagagccatgccctgatgcagcatctcttctggcttccaagcagagcccagaatgtgagaacttcctggatgttggactgggcagagagtgtacctcaaaacaaggtgtacttaaaagagaatctgggagtgattctgacctctttcactcacccagtgatgacatggacagcatcatcttcccaaagccagaggaagagcatttggcctgtgatatcaccggatccagttcatccaccgatgacacggcttcactggaccgacattcttctcatggcagtgatgtgtctctctcccagattttaaagccaaacaggtcaagagatcggcaaagccttgatggattctacagccatgggatgggagctgagggtcgagaaagtgagagtgagcctgctgacccaggcgacgtggaggaggaggagatggacagtatcactgaagtgcctgcaaactgctctgtcctaaggagctccatgcgctctctttctcccttccggaggcacagctgggggcctgggaaaaatgcagccagcgatgcagaaatgaaccaccggagtttcagtctagaaggcttgacaggaggagctggtgtcggaaacaagccatcctcatctctagaagtaagctctgcaaatgccgaagagctcagacacccattcagtggtgaggaacgggttgactctttggtgtcactttcagaagaggatctggagtcagaccagagagaacataggatgtttgatcagcagatatgtcacagatctaagcagcagggatttaattactgtacatcagccatttcctctccattgacaaaatccatctcattaatgacaatcagccatcctggattggacaattcacggcccttccacagtaccttccacaataccagtgctaatctgactgagagtataacagaagagaactataatttcctgccacatagcccctccaagaaagattctgaatggaagagtggaacaaaagtcagtcgtacattcagctacatcaagaataaaatgtctagcagcaagaagagcaaagaaaaggaaaaagaaaaagataagattaaggagaaggagaaagattctaaagacaaggagaaagataagaagactgtcaacgggcacactttcagttccattcctgttgtgggtcccatcagctgtagccagtgtatgaagcccttcaccaacaaagatgcctatacttgtgcaaattgcagtgcttttgtccacaaaggctgccgagaaagtctagcctcctgtgcaaaggtcaaaatgaagcagcccaaagggagccttcaggcacatgacacatcatcactgcccacggtcattatgagaaacaagccctcacagcccaaggagcgtcctcggtccgcagtcctcctggtggatgaaaccgctaccaccccaatatttgccaatagacgatcccagcagagtgtctcgctctccaaaagtgtctccatacagaacattactggagttggcaatgatgagaacatgtcaaacacctggaaattcctgtctcattcaacagactcactaaataaaatcagcaaggtcaatgagtcaacagaatcacttactgatgagggagtaggtacagacatgaatgaaggacaactactgggagactttgagattgagtccaaacagctggaagcagagtcttggagtcggataatagacagcaagtttctaaaacagcaaaagaaagatgtggtcaaacggcaagaagtaatatatgagttgatgcagacagagtttcatcatgtccgcactctcaagatcatgagtggtgtgtacagccaggggatgatggcggatctgctttttgagcagcagatggtagaaaagctgttcccctgtttggatgagctgatcagtatccatagccaattcttccagaggattctggagcggaagaaggagtctctggtggataaaagtgaaaagaactttctcatcaagaggataggggatgtgcttgtaaatcagttttcaggtgagaatgcagaacgtttaaagaagacatatggcaagttttgtgggcaacataaccagtctgtaaactacttcaaagacctttatgccaaggataagcgttttcaagcctttgtaaagaagaagatgagcagttcagttgttagaaggcttggaattccagagtgcatattgcttgtaactcagcggattaccaagtacccagttttattccaaagaatattgcagtgtaccaaagacaatgaagtggagcaggaagatctagcacagtccttgagcctggtgaaggatgtgattggagctgtagacagcaaagtggcaagttatgaaaagaaagtgcgtctcaatgagatttatacaaagacagatagcaagtcaatcatgaggatgaagagtggtcagatgtttgccaaggaagatttgaaacggaagaagcttgtacgtgatgggagtgtgtttctgaagaatgcagcaggaaggttgaaagaggttcaagcagttcttctcactgacattttagttttccttcaagaaaaagaccagaagtacatctttgcatcattggaccagaagtcaacagtgatctctttaaagaagctgattgtgagagaagtggcacatgaggagaaaggtttattcctgatcagcatggggatgacagatccagagatggtagaagtccatgccagctccaaagaggaacgaaacagctggattcagatcattcaggacacaatcaacaccctgaacagagatgaagatgaaggaattcctagtgagaatgaggaagaaaagaaaatgttggacaccagagcccgagaattaaaagaacaacttcaccagaaggaccaaaaaatcctactcttgttggaagagaaggagatgattttccgggacatggctgagtgcagcacccctctcccagaggattgctccccaacacatagccctagagttctcttccgctccaacacagaagaggctctcaaaggaggacctttaatgaaaagtgcaataaatgaggtggagatccttcagggtttggtgagtggaaatctgggaggcacacttgggccgactgtcagcagccccattgagcaagatgtggtcggtcccgtttccctgccccggagagcagagacctttggaggatttgacagccatcagatgaatgcttcaaaaggaggcgagaaggaagagggagatgatggccaagatcttaggagaacggaatcagatagtggcctaaaaaagggtggaaatgctaacctggtatttatgcttaaaagaaacagtgagcaggttgtccagagcgttgttcatctctacgagctcctcagcgctctgcagggtgtggtgctgcagcaggacagctacattgaggaccagaaactggtgctgagcgagagggcgctcactcgcagcttgtcccgcccgagctccctcattgagcaggagaagcagcgcagcctggagaagcagcgccaggacctggccaacctgcagaagcagcaggcccagtacctcgaggagaagcgcaggcgcgagcgtgagtgggaagctcgtgagagggagctgcgggagcgggaggccctcctggcccagcgcgaggaggaggtgcagcaggggcagcaggacctggaaaaggagcgggaggagctccagcagaagaagggcacataccagtatgacctggagcgactgcgtgctgcccagaaacagcttgagagggaacaggagcagctgcgccgggaggcagagcggctcagccagcggcagacagaacgggacctgtgtcaggtttcccatccacataccaagctgatgaggatcccatcgttcttccccagtcctgaggagcccccctcgccatctgcaccttccatagccaaatcagggtcattggactcagaactttcagtgtccccaaaaaggaacagcatctctcggacacacaaagataaggggccttttcacatactgagttcaaccagccagacaaacaaaggaccagaagggcagagccaggcccctgcgtccacctctgcctctacccgcctgtttgggttaacaaagccaaaggaaaagaaggagaaaaaaaagaagaacaaaaccagccgctctcagcccggtgatggtcccgcgtcagaagtatcagcagagggtgaagagatcttctgctgaccctcttcctctctgctgaggcagctgcctcctgatcctggccagcccacctctcctgctgtccccgcgtgcacaagtctcttacactggacgcccactgctcctcagcgtccagtcctcctgggcggccccaggtcctggacaataagcaacagatgatattgagtgtcgggtggggaaggaggcccagactctgcttcggccatgatttgtgactgcccaggactctcaggttgggctggccctactcaggattacactgaaagtaatggcctcgtaagtacaggtgatggttttggacacgtcaggaattcctaaaggctgaaagagtgtatccaagtaaggtctgaacctccgaatgccttttatttgggggaacacaaaaccaaacagcagatgttttggacttgatctgtgtacgtacatggggacctgtctgcatatacacacggggaatgccagaagaaggcccagtctgcaccaggcgtctggtcaacttagcacaagggcagtgcctggacggacccggagcccccgcatatcagcagttcacccagtactcctcagagactggtttccctctaaacccatcccgggcacataccacccgtgttttgcatgtatttctcatttcattttagggatgacaaacatttgtgaaaccagtgagagaaggcttgatgtgtataaaagacgtgatgtgcaccacctcgatctcggtgtttcaggcactaaagcaacaaaacaacccatagtatctcattctgtcatcagatccagaagaaatatcctggttttccagcatgtttacccacatgttttggccatggataaagtgaagaggcctactcaccattatccctgcagcgtgacaccttttgattgtcactgaccactcagaaggggccacggcctcctggctgtgttcctgagcccccgtcgtgcctctcccagacagcagctgtctggcccttgctgggtgagggcacaccactgccaggggtcagcctcgcacccaggccaggcagaagctgtgctctgaagctaggacagctggctgagaagtgggttcaggcgaagggtgaagccatgtgtagcagttcctgccagtgcagatctggagaggagctggcccggaaggcgtggttgtgaaagcgcccttcttatgttaggaggccttggcaaaattggatttcttcaaaaatacatgtaaaggtctgttgttgaattgtactctgcccctggaagcagatacagatggctgcctgctgctcggctttgcttttgcttttcccaccgtgttttcatctttgttcacttgaggctttccccagctggtgtgtgcaggacagttcatggtaatgttgccctctgaggccccgtacaccagaagggaggccctggaaaattttgtgcttccaacgtggccttcaattcttgcttttttgcccctcggaagcatggggcttttgagcacacttaaaaaaagaaa

SEQ ID NO: 95487 - DNA, 1245 bp, Artificial Sequence
  derived and/or modified sequence
atgagcaacacctggaagttcctgagccacagcaccgacagcctgaacaagatcagcaaggtgaacgagagcaccgagagcctgaccgacgagggcaccgacatgaacgagggccagctgctgggcgacttcgagatcgagagcaagcagctggaggccgagagctggagcagaatcatcgacagcaagttcctgaagcagcagaagaaggacgtggtgaagagacaggaggtgatctacgagctgatgcagaccgagttccaccacgtgagaaccctgaagatcatgagcggcgtgtacagccagggcatgatggccgacctgctgttcgagcagcagatggtggagaagctgttcccctgcctggacgagctgatcagcatccacagccagttcttccagagaatcctggagagaaagaaggagagcctggtggacaagagcgagaagaacttcctgatcaagagaatcggcgacgtgctggtgaaccagttcagcggcgagaacgccgagagactgaagaagacctacggcaagttctgcggccagcacaaccagagcgtgaactacttcaaggacctgtacgccaaggacaagagattccaggccttcgtgaagaagaagatgagcagcagcgtggtgagaagactgggcatccccgagtgcatcctgctggtgacccagagaatcaccaagtaccccgtgctgttccagagaatcctgcagtgcaccaaggacaacgaggtggagcaggaggacctggcccagagcctgagcctggtgaaggacgtgatcggcgccgtggacagcaaggtggccagctacgagaagaaggtgagactgaacgagatctacaccaagaccgacagcaagagcatcatgagaatgaagagcggccagatgttcgccaaggaggacctgaagagaaagaagctggtgagagacggcagcgtgttcctgaagaacgccgccggcagactgaaggaggtgcaggccgtgctgctgaccgacatcctggtgttcctgcaggagaaggaccagaagtacatcttcgccagcctggaccagaagagcaccgtgatcagcctgaagaagctgatcgtgagagaggtggcccacgaggagaagggcctgttcctgatcagcatgggcatgaccgaccccgagatggtggaggtgcacgccagcagcaaggaggagagaaacagctggatccagatcatccaggacaccatcaacacctag

SEQ ID NO: 95488 - DNA, 1158 bp, Artificial Sequence
  derived and/or modified sequence
atgtacgagagacacaagagaagatacagcctgtgcgacatcagcaaggtggacagaaccgtggacgtggtgctgctgaagatcaacagagagaactggtgcaccatcgagccctgccccgacgccgccagcctgctggccagcaagcagagccccgagtgcgagaacttcctggacgtgggcctgggcagagagtgcaccagcaagcagggcgtgctgaagagagagagcggcagcgacagcgacctgttccacagccccagcgacgacatggacagcatcatcttccccaagcccgaggaggagcacctggcctgcgacatcaccggcagcagcagcagcaccgacgacaccgccagcctggacagacacagcagccacggcagcgacgtgagcctgagccagatcctgaagcccaacagaagcagagacagacagagcctggacggcttctacagccacggcatgggcgccgagggcagagagagcgagagcgagcccgccgaccccggcgacgtggaggaggaggagatggacagcatcaccgaggtgcccgccaactgcagcgtgctgagaagcagcatgagaagcctgagccccttcagaagacacagctggggccccggcaagaacgccgccagcgacgccgagatgaaccacagaagcttcagcctggagggcctgaccggcggcgccggcgtgggcaacaagcccagcagcagcctggaggtgagcagcgccaacgccgaggagctgagacaccccttcagcggcgaggagagagtggacagcctggtgagcctgagcgaggaggacctggagagcgaccagagagagcacagaatgttcgaccagcagatctgccacagaagcaagcagcagggcttcaactactgcaccagcgccatcagcagccccctgaccaagagcatcagcctgatgaccatcagccaccccggcctggacaacagcagacccttccacagcaccttccacaacaccagcgccaacctgaccgagagcatcaccgaggagaactacaacttcctgccccacagccccagcaagaaggacagcgagtggaagagcggcaccaaggtgagcagaaccttcagctacatcaagaacaagatgagcagcagcaagaagagcaagtag

SEQ ID NO: 95489 - protein, 87 aa, Artificial Sequence
  derived and/or modified sequence
MQHRGFLLLTLLALLALTSAVAKKKADCKYKFENWGACDGGTGTKVRQGTLKKARYNAQCQETIRVTKPCTPKTKAKAKAKKGKGKD

SEQ ID NO: 95490 - DNA, 264 bp, Artificial Sequence
  derived and/or modified sequence
atgcagcacagaggcttcctgctgctgaccctgctggccctgctggccctgaccagcgccgtggccaagaagaaggccgactgcaagtacaagttcgagaactggggcgcctgcgacggcggcaccggcaccaaggtgagacagggcaccctgaagaaggccagatacaacgcccagtgccaggagaccatcagagtgaccaagccctgcacccccaagaccaaggccaaggccaaggccaagaagggcaagggcaaggactag

SEQ ID NO: 95491 - DNA, 459 bp, Artificial Sequence
  derived and/or modified sequence
atgcaacatcgcgggtttcttctcctgaccctcttagcactcctggccttaacaagtgccgtcgctaaaaaaaaagaggagggtgccctgcaatgctcagtgccaggagatcatcccagacaccaggccctacaccctcaagatcaatcaaaagggcagtcacaggagcgcgaagggaagggattagatgccaagcccgggtgccagggagctcccggcgtgacctggggcctggcccacgctctccccctacctgggcccagatgcgatcctccagtgccatctgtgtgcagcctcgctctgattaaccacgccctcccttgtccttcacactctcccgcacctccactgtcagcacaaagtggggaggggcagggaatattagggagcctgagccttccacaatcaaacgtctcccctcgagcgagattctgctcgagccctcagtttcactactag

SEQ ID NO: 95492 - DNA, 264 bp, Artificial Sequence
  derived and/or modified sequence
atgcaacataggggatttctattgcttactttgttagctttactcgcactgaccagtgcagtggctaagaagaaagcagattgcaaatacaaatttgaaaactggggggcttgcgatggcggtacagggacaaaagtgaggcagggcaccttgaaaaaggcccggtataacgcccagtgtcaggaaactatacgtgtcaccaaaccctgtacccccaagacgaaggccaaagcaaaggctaagaagggcaagggcaaagattag

SEQ ID NO: 95493 - DNA, 264 bp, Artificial Sequence
  derived and/or modified sequence
atgcagcaccggggcttcctgctgctgaccctgctggccctgctggccctgaccagcgctgtggccaagaagaaggctgactgcaagtacaagtttgagaactggggcgcctgtgatggcggcaccggcaccaaggtgcggcagggcaccctgaagaaggcccgctacaatgcccagtgccaggagaccatccgggtgaccaagccctgcacccccaagaccaaggccaaggccaaggccaagaagggcaagggcaaggactag

SEQ ID NO: 95494 - DNA, 606 bp, Artificial Sequence
  derived and/or modified sequence
agaccggttctggagacaaaaggggccgcggcggccggagcgggacgggcccggcgcgggagggagcgaagcagcgcgggcagcgagcgagatgcagcaccgaggcttcctcctcctcaccctcctcgccctgctggcgctcacctccgcggtcgccaaaaagaaagaagaaggcgcgctacaatgctcagtgccaggagaccatccgcgtcaccaagccctgcacccccaagaccaaagcaaaggccaaagccaagaaagggaagggaaaggactagacgccaagcctggatgccaaggagcccctggtgtcacatggggcctggcccacgccctccctctcccaggcccgagatgtgacccaccagtgccttctgtctgctcgttagctttaatcaatcatgccctgccttgtccctctcactccccagccccacccctaagtgcccaaagtggggagggacaagggattctgggaagcttgagcctcccccaaagcaatgtgagtcccagagcccgcttttgttcttccccacaattccattactaagaaacacatcaaataaactgactttttccccccaataaaagctcttcttttttaat

SEQ ID NO: 95495 - DNA, 686 bp, Artificial Sequence
  derived and/or modified sequence
agaccggttctggagacaaaaggggccgcggcggccggagcgggacgggcccggcgcgggagggagcgaagcagcgcgggcagcgagcgagatgcagcaccgaggcttcctcctcctcaccctcctcgccctgctggcgctcacctccgcggtcgccaaaaagaaagccgactgcaagtacaagtttgagaactggggtgcgtgtgatgggggcacaggcaccaaagtccgccaaggcaccctgaagaaggcgcgctacaatgctcagtgccaggagaccatccgcgtcaccaagccctgcacccccaagaccaaagcaaaggccaaagccaagaaagggaagggaaaggactagacgccaagcctggatgccaaggagcccctggtgtcacatggggcctggcccacgccctccctctcccaggcccgagatgtgacccaccagtgccttctgtctgctcgttagctttaatcaatcatgccctgccttgtccctctcactccccagccccacccctaagtgcccaaagtggggagggacaagggattctgggaagcttgagcctcccccaaagcaatgtgagtcccagagcccgcttttgttcttccccacaattccattactaagaaacacatcaaataaactgactttttccccccaataaaagctcttcttttttaatata

SEQ ID NO: 95496 - DNA, 264 bp, Artificial Sequence
  derived and/or modified sequence
atgcagcaccggggcttcctgctgctgaccctgctggccctgctggctctaacaagcgctgttgccaagaagaaggccgattgcaagtataaatttgaaaattggggcgcatgcgatggcggaaccgggacaaaagtgaggcagggcaccctaaaaaaagcgagatataatgcacagtgccaggaaactattcgcgttacaaaaccctgtacccctaagacgaaggcgaaggctaaggctaaaaagggtaagggaaaggattag

SEQ ID NO: 95497 - DNA, 264 bp, Artificial Sequence
  derived and/or modified sequence
atgcaacatcgcggattcctcttgctcactctgctcgctttacttgccctgacctcagccgtggctaaaaaaaaggccgactgtaaatacaagttcgaaaactggggtgcctgcgatggcggtacaggaacaaaagttcgtcagggcaccctgaagaaagctaggtataatgcgcagtgtcaagaaacgataagagttacgaaaccatgtacacccaaaacgaaagcaaaggccaaggcaaagaagggcaaaggaaaggactag

SEQ ID NO: 95498 - protein, 424 aa, Artificial Sequence
  derived and/or modified sequence
MENKKKDKDKSDDRMARPSGRSGHNTRGTGSSSSGVLMVGPNFRVGKKIGCGNFGELRLGKNLYTNEYVAIKLEPMKSRAPQLHLEYRFYKQLGSGDGIPQVYYFGPCGKYNAMVLELLGPSLEDLFDLCDRTFSLKTVLMIAIQLISRMEYVHSKNLIYRDVKPENFLIGRPGNKTQQVIHIIDFGLAKEYIDPETKKHIPYREHKSLTGTARYMSINTHLGKEQSRRDDLEALGHMFMYFLRGSLPWQGLKADTLKERYQKIGDTKRATPIEVLCENFPEEMATYLRYVRRLDFFEKPDYDYLRKLFTDLFDRKGYMFDYEYDWIGKQLPTPVGAVQQDPALSSNREAHQHRDKMQQSKNQVVSSTNGELNTDDPTAGRSNAPITAPTEVEVMDETNCQKVLNMWCCCFFKRRKRKTIQRHK

SEQ ID NO: 95499 - DNA, 1275 bp, Artificial Sequence
  derived and/or modified sequence
atggagaataagaaaaaagataaggataagtccgacgaccgcatggcgaggccctccggacggtccgggcacaatactcgaggaacgggcagctcctcctcaggagtgcttatggttgggccaaattttagggttggcaagaaaatcggctgtggcaactttggtgaactacgtcttggaaaaaacttatatacgaatgaatacgtggccattaagctggagcctatgaaaagcagggcacctcagctgcacctagaatataggttttacaagcagctggggagcggagacgggatacctcaagtgtattacttcggtccatgcggcaaatacaatgcaatggtgctggagctgctgggcccatctcttgaagatctgttcgatctctgcgaccgtactttctctctgaaaacagttctgatgattgcgatccagttaatatcacgcatggagtacgtccatagcaaaaacttaatctatcgcgacgtgaagcctgaaaattttctcataggacgtccaggcaacaaaacacaacaggtgatccacatcatcgactttggactggcgaaagagtacatagatcccgagacgaagaagcacattccctacagggagcacaagtctttgacaggaaccgccaggtacatgagcattaacacccatcttggtaaggaacagtcacggcgcgacgacctcgaagcgctcggtcacatgttcatgtatttcctgcgcggtagtctaccctggcagggacttaaggccgatactttgaaagagaggtaccaaaagattggtgatactaagcgcgctacccccatcgaggttctgtgcgagaattttcctgaggaaatggcgacttatctcagatatgtaagaaggctcgatttttttgagaaaccagactacgattacctgcgtaagctgtttaccgaccttttcgacagaaaaggatacatgttcgattatgaatacgactggatcggcaagcagctgccaacgcccgtcggagccgtacaacaggacccagctctgagcagcaatcgggaagcccatcagcatcgcgataagatgcagcaaagcaaaaatcaagtagtgtcttcaaccaacggagagctcaacacggatgaccccacagcaggaagatcaaacgccccgatcacagcacccactgaagtggaggtgatggacgagactaactgccagaaggtgctcaacatgtggtgttgctgcttctttaagcgcagaaagcgcaaaactattcaaaggcataagtag

SEQ ID NO: 95500 - DNA, 1275 bp, Artificial Sequence
  derived and/or modified sequence
atggagaacaagaagaaggacaaggacaagagtgatgacaggatggcccggcccagcggccgcagcggccacaacacccggggcaccggcagcagcagcagcggcgtgctgatggtgggccccaacttccgggtgggcaagaagattggctgcggcaactttggagagctgcggctgggcaagaacctgtacaccaatgaatatgtggccatcaagctggagcccatgaagagccgggccccccagctgcacctggagtaccgcttctacaagcagctgggcagcggagatggcatcccccaggtgtactacttcggcccctgtgggaagtacaatgccatggtgctggagctgctgggccccagcctggaggacctgtttgacctgtgtgacaggaccttcagcctgaagacagtgctgatgattgccatccagctgatcagcaggatggagtatgtgcacagcaagaacctgatctacagagatgtgaagccagagaacttcctgattggccggcccggcaacaagacccagcaggtgatccacatcatcgactttggcctggccaaggagtacattgatcctgagaccaagaagcacatcccctaccgggagcacaagagcctgaccggcacagcccgctacatgagcatcaacacccacctgggcaaggagcagagcagaagagatgacctggaggccctgggccacatgttcatgtacttcctgcggggcagcctgccctggcagggcctgaaggctgacaccctgaaggagcgctaccagaagatcggggacaccaagagggccacccccatcgaggtgctgtgtgagaacttccctgaggagatggccacctacctgcgctacgtgcggcggctggacttctttgagaagccagactatgactacctgaggaagctgttcacagacctgtttgacaggaagggctacatgtttgattatgaatatgactggattggcaagcagctgcccacccctgtgggcgctgtgcagcaggaccctgccctgagcagcaaccgggaggcccaccagcaccgggacaagatgcagcagagcaagaaccaggtggtgagcagcaccaatggagagctgaacacagatgaccccacagctggccgcagcaatgcccccatcacagcccccacagaggtggaggtgatggatgagaccaactgccagaaggtgctgaacatgtggtgctgctgcttcttcaagaggaggaagaggaagaccatccagaggcacaagtag

SEQ ID NO: 95501 - DNA, 1275 bp, Artificial Sequence
  derived and/or modified sequence
atggagaacaagaagaaggacaaggacaagagcgacgaccggatggctaggccatcagggcgatccggccacaacacgcgaggaacaggtagtagcagcagcggtgttctcatggtagggccgaacttcagagtcggaaaaaagattggctgtggaaattttggggaacttcgtctcgggaagaatctgtacaccaacgaatatgtcgctattaaactggagccgatgaaatcacgcgctccgcaactgcatctggaatatcgcttctacaaacagctcgggtccggtgacggaatcccacaggtgtattatttcggaccgtgcggcaagtataacgcaatggttttagagctgctggggccaagtctggaagatcttttcgatctctgcgatcggactttcagcttgaagaccgttttaatgatcgccatccaacttattagccggatggaatacgtgcatagcaagaacctgatatatcgagatgtcaaacccgaaaattttctcataggcagaccgggcaataagacgcagcaggtgatccacataatcgactttggcctcgctaaggagtacatcgacccggagaccaaaaagcacattccttaccgcgagcacaaatccctgactggaaccgcaagatacatgtcgatcaatacccacctgggaaaggagcagtcacggagagacgaccttgaagcactagggcacatgttcatgtacttcctgaggggctcactgccgtggcaggggctcaaggcagacactctgaaggagcgataccaaaagattggtgacacaaagagagccacacccatcgaggtgttatgtgagaacttccccgaggaaatggccacgtacctgcggtacgttcgtcggctagacttcttcgagaaaccagactacgattatctccgaaagctgttcacagatctgttcgatcgaaaaggctacatgtttgattatgagtatgactggattggcaaacaactgcctacccccgtcggggctgtacaacaagatcccgctctgagctcgaacagagaggcccaccagcacagagacaagatgcagcagtcaaagaaccaggtcgttagctccactaacggggaactgaataccgatgatcctacggctgggagaagcaacgctcccatcacagcccctaccgaggtcgaagtcatggacgagacaaattgccagaaagtgctgaatatgtggtgctgctgctttttcaagaggcgtaagagaaagactatacagcggcacaaatag

SEQ ID NO: 95502 - DNA, 1275 bp, Artificial Sequence
  derived and/or modified sequence
atggagaacaaaaaaaaagataaagataaaagtgatgatcggatggcccgaccatccggtcgatctgggcacaacacccgcggaactggatcttcctcaagtggagtgctgatggtaggccctaactttcgagtgggcaaaaagatcggatgtggcaactttggggagctgaggctcggaaagaatttgtacaccaatgagtatgtagcaattaagctcgaacccatgaaaagtcgcgcaccgcagctgcaccttgagtatcggttttacaagcagctgggctcaggcgatggcattcctcaggtctactatttcggaccatgtggtaaatacaatgcaatggtgctggaattactcggcccatccctggaggatctgtttgatctgtgtgaccggactttttccctgaaaacagttctgatgattgccatccagctcatcagccgcatggaatacgtgcacagtaaaaacctgatctatcgggacgtgaagcccgaaaactttctcatcgggagacccggaaataagacacagcaagtgattcacattatcgacttcggactagcgaaagagtacatcgaccccgaaaccaagaaacatattccttatcgggagcacaaatccctgacagggactgctcgatacatgagtatcaacacacaccttggaaaggagcaatcccgacgtgatgatttggaagccctgggccatatgttcatgtactttcttcgaggcagtctgccatggcaagggcttaaggccgacacgttaaaggagcggtatcagaaaatcggcgataccaagcgcgcaacccctatcgaggtcctatgcgaaaatttcccggaagagatggctacttatctacgatatgtccggagacttgacttcttcgaaaaacctgactacgactatctgcgaaagctgttcactgatcttttcgatagaaagggctacatgttcgactatgaatacgattggatcgggaagcagctccctacccccgtgggggctgtgcaacaggaccccgcactctcaagcaaccgggaggcccaccaacaccgggataaaatgcagcaatctaaaaaccaagtggtgagctctacaaatggggagctcaacacagacgaccccactgccggtcggtccaatgcacccatcaccgctccaacagaggttgaagtgatggatgaaactaattgtcagaaggtcttaaacatgtggtgctgctgcttcttcaaacgacgtaagcgcaagacaatccagcgtcataaatag

SEQ ID NO: 95503 - DNA, 1979 bp, Artificial Sequence
  derived and/or modified sequence
ctctctatcaatatcagctcacatcattgaaaagataattttgaagacatgttttgctgaaaagacactaagaaaaattttacgaatgggatgaacatgctccagttaattgactacctactgcaatttgaatgttaacattacccatctggtacagttacctagtgatgtacctattttcacaataccctgtttcagtgtgcttgtcttgattaaagaattcaaagtggagtaccgcaaacttgatatggaaaataaaaagaaagacaaggacaaatcagatgatagaatggcacgacctagtggtcgatcgggacacaacactcgaggaactgggtcttcatcgtctggagttttaatggttggacctaactttagagttggaaaaaaaattggatgtggcaattttggagaattacgattagggaaaaatttatacacaaatgaatatgtggcaattaagttggagcccatgaaatcaagagcaccacagctacatttggaatacagattctataagcagttaggatctggagatggtatacctcaagtttactatttcggcccttgtggtaaatacaatgctatggtgctggaactgctgggacctagtttggaagacttgtttgacttgtgtgacagaacattttctcttaaaacagttctcatgatagctatacaactgatttctcgcatggaatatgtccattcaaagaacttgatatacagagatgtaaaacctgagaacttcttaataggacgaccaggaaacaaaacccagcaagttattcacattatagattttggtttggcaaaggaatatattgatccggagacaaagaaacacataccatacagagaacacaagagccttacaggaacagctagatatatgagcataaacacacatttaggaaaagaacaaagtagaagagacgatttagaagctttaggtcatatgttcatgtattttctgagaggcagtcttccttggcaaggcttaaaggctgacacattaaaggagaggtatcagaaaattggagatacaaaacgggctacaccaatagaagtgttatgtgaaaattttccagaagaaatggcaacatatcttcgttatgtaagaaggctagatttttttgaaaaaccagactatgactacttaagaaagctttttactgacttgtttgatcgaaaaggatatatgtttgattatgaatatgactggattggtaaacagttgcctactccagtgggtgcagttcagcaagatcctgctctgtcatcaaacagagaagcacatcaacacagagataagatgcaacaatccaaaaaccaggttgtaagttctacaaatggagagttaaacacagatgaccccaccgcaggacgttcaaatgcacccatcacagcccctactgaagtagaagtgatggatgaaaccaactgccagaaagtgttgaacatgtggtgctgctgttttttcaaacgaaggaaaaggaaaaccatacagcgccacaaatgactctggacacagacagatcctggggagttacttacatgttcatctgctgtcttgtgattaaaatcatctctgtagtgaccacgtatattttcaaggactcactcttagaaacaaaaatgtcatactttcatacttcattttgtggttgtcttacattctttttctttttttttttttctctaatttaacctttatggaagctttaaagttttgtcaaaacatgagtgctttgcccatcagtgaatggaatggaccaatgaggtggtatcaatgaatatagttccatagaacattttccagaagttcttctgttgtagaaagcagtacagtatcttaagtgtcaaccagttatatacctaatctggttttttataacttctgtaagagcataatcaaacaggaattttcttttctcagtggataatacaacagagaaaacagagttgcccaaatattt

SEQ ID NO: 95504 - DNA, 1275 bp, Artificial Sequence
  derived and/or modified sequence
atggagaacaagaagaaggacaaggacaagagcgacgacagaatggccagacccagcggcagaagcggccacaacaccagaggcaccggcagcagcagcagcggcgtgctgatggtgggccccaacttcagagtgggcaagaagatcggctgcggcaacttcggcgagctgagactgggcaagaacctgtacaccaacgagtacgtggccatcaagctggagcccatgaagagcagagccccccagctgcacctggagtacagattctacaagcagctgggcagcggcgacggcatcccccaggtgtactacttcggcccctgcggcaagtacaacgccatggtgctggagctgctgggccccagcctggaggacctgttcgacctgtgcgacagaaccttcagcctgaagaccgtgctgatgatcgccatccagctgatcagcagaatggagtacgtgcacagcaagaacctgatctacagagacgtgaagcccgagaacttcctgatcggcagacccggcaacaagacccagcaggtgatccacatcatcgacttcggcctggccaaggagtacatcgaccccgagaccaagaagcacatcccctacagagagcacaagagcctgaccggcaccgccagatacatgagcatcaacacccacctgggcaaggagcagagcagaagagacgacctggaggccctgggccacatgttcatgtacttcctgagaggcagcctgccctggcagggcctgaaggccgacaccctgaaggagagataccagaagatcggcgacaccaagagagccacccccatcgaggtgctgtgcgagaacttccccgaggagatggccacctacctgagatacgtgagaagactggacttcttcgagaagcccgactacgactacctgagaaagctgttcaccgacctgttcgacagaaagggctacatgttcgactacgagtacgactggatcggcaagcagctgcccacccccgtgggcgccgtgcagcaggaccccgccctgagcagcaacagagaggcccaccagcacagagacaagatgcagcagagcaagaaccaggtggtgagcagcaccaacggcgagctgaacaccgacgaccccaccgccggcagaagcaacgcccccatcaccgcccccaccgaggtggaggtgatggacgagaccaactgccagaaggtgctgaacatgtggtgctgctgcttcttcaagagaagaaagagaaagaccatccagagacacaagtag

SEQ ID NO: 95505 - DNA, 675 bp, Artificial Sequence
  derived and/or modified sequence
atgctcgcaattagccgaaatcagaaattgctccaggctggagaggagaatcaggtcctggaactactaatccatcgagacggagaattccaggagctcatgaagttagccttaaaccagggcaagatccaccacgagatgcaggtgctggagaaggaagtcgagaagagggacagtgatattcagcaattgcagaagcagttgaaggaggccgagcagattttagccacagcagtctatcaagcgaaggagaaactgaaatccatcgagaaagccagaaagggagccatctcatctgaagagatcatcaaatacgctcatcgcataagcgcaagtaatgccgtgtgcgcccctctgacctgggtccccggggaccccaggcgtccctacccgacagacttggaaatgaggtcgggcctgctggggcaaatgaataatccgtccacaaatggagtcaatggccacctcccaggcgatgcactggcagccggccggttaccggatgtgctggctccccagtacccatggcagagcaacgatatgtcgatgaacatgctgccacctaatcacagctccgactttttgctggaacctccaggacataacaaggagaacgaggatgacgtcgaaatcatgtcgacggactcatctagttcttcttctgagagcgactag

SEQ ID NO: 95506 - DNA, 675 bp, Artificial Sequence
  derived and/or modified sequence
atgctggccatcagcaggaaccagaagctgctgcaggccggggaggagaaccaggtgctggagctgctgatccacagagatggagagttccaggagctgatgaagctggccctgaaccagggcaagatccaccacgagatgcaggtgctggagaaggaggtggagaagagggacagcgacatccagcagctgcagaagcagctgaaggaggccgagcagatcctggccacagctgtgtaccaggccaaggagaagctgaagagcattgagaaggccaggaagggggccatcagcagcgaggagatcatcaagtatgcccaccgcatcagcgccagcaatgctgtgtgtgcccccctgacctgggtgcctggggacccccggcggccctaccccacagacctggagatgaggagcggcctgctgggccagatgaacaaccccagcaccaacggggtgaatggccacctgcctggagatgccctggccgccggccgcctgcctgatgtgctggccccccagtacccctggcagagcaatgacatgtccatgaacatgctgccccccaaccacagcagtgacttcctgctggagcccccaggccacaacaaggaaaatgaagatgatgtggagatcatgagcacagacagcagcagcagcagcagcgagagtgactag

SEQ ID NO: 95507 - DNA, 675 bp, Artificial Sequence
  derived and/or modified sequence
atgctggccatcagccggaaccagaagctgctgcaggccggcgaggagaaccaggtgctcgaattattaatccacagagacggggagttccaggaactcatgaaacttgctctgaatcaaggtaaaatccatcacgaaatgcaagtgctggaaaaggaagtggaaaagcgtgactcggatattcagcagctgcagaagcagctgaaggaggccgaacagatcctcgcgacggcagtctaccaggctaaggagaagcttaagtcgatcgagaaagccaggaagggagccattagcagtgaggagatcattaagtatgctcataggatcagcgcctctaacgctgtatgtgcacctctcacgtgggtgcctggagacccgaggcgcccctatcccactgacctggaaatgcggtccgggcttttgggccagatgaataatccctctaccaacggcgtcaacggccacctgccaggggatgccttggcagcgggtaggctacccgacgttttggccccgcagtacccttggcagagcaatgatatgagcatgaatatgctgcctcccaatcactcatcagatttcctgttggaaccaccaggtcacaacaaggaaaacgaagatgatgtcgaaatcatgtcaaccgactctagttcctctagttcagagtccgactag

SEQ ID NO: 95508 - DNA, 675 bp, Artificial Sequence
  derived and/or modified sequence
atgctagctatttcccgcaatcagaaacttttgcaggcgggtgaagaaaatcaggtcctggagttgttaatccatagagacggggaattccaagagctaatgaagctagctttgaaccaggggaaaattcaccacgagatgcaggtgctggaaaaagaagtggagaagagggactctgatatccaacagctacaaaaacaactcaaagaggccgagcagatccttgccacagctgtctaccaagccaaagagaaactcaaatcaatcgaaaaagctcggaagggcgctattagttcagaggagattatcaaatacgcccatcgtatatcagcgagtaacgctgtgtgcgccccacttacctgggttcctggagatcctcgacgcccttaccccacggacttggagatgcgcagcgggctgctgggtcagatgaataatccctctactaatggagtgaacggccacttgcctggcgacgcattggcagccggtagactgcctgacgttctggcccctcaatacccttggcaatccaatgatatgtcaatgaacatgctgccccctaaccactccagcgactttctgctcgaacctccgggacacaacaaagagaacgaggatgatgtggaaatcatgtctacagattcttcaagctcatcctctgagagtgattag

SEQ ID NO: 95509 - DNA, 675 bp, Artificial Sequence
  derived and/or modified sequence
atgctggccatcagcagaaaccagaagctgctgcaggccggcgaggagaaccaggtgctggagctgctgatccacagagacggcgagttccaggagctgatgaagctggccctgaaccagggcaagatccaccacgagatgcaggtgctggagaaggaggtggagaagagagacagcgacatccagcagctgcagaagcagctgaaggaggccgagcagatcctggccaccgccgtgtaccaggccaaggagaagctgaagagcatcgagaaggccagaaagggcgccatcagcagcgaggagatcatcaagtacgcccacagaatcagcgccagcaacgccgtgtgcgcccccctgacctgggtgcccggcgaccccagaagaccctaccccaccgacctggagatgagaagcggcctgctgggccagatgaacaaccccagcaccaacggcgtgaacggccacctgcccggcgacgccctggccgccggcagactgcccgacgtgctggccccccagtacccctggcagagcaacgacatgagcatgaacatgctgccccccaaccacagcagcgacttcctgctggagccccccggccacaacaaggagaacgaggacgacgtggagatcatgagcaccgacagcagcagcagcagcagcgagagcgactag

SEQ ID NO: 95510 - protein, 330 aa, Artificial Sequence
  derived and/or modified sequence
MAAAAGRSLLLLLSSRGGGGGGAGGCGALTAGCFPGLGVSRHRQQQHHRTVHQRIASWQNLGAVYCSTVVPSDDVTVVYQNGLPVISVRLPSRRERCQFTLKPISDSVGVFLRQLQEEDRGIDRVAIYSPDGVRVAASTGIDLLLLDDFKLVINDLTYHVRPPKRVEMGFCHVGQNGFELLTSSYLPASASQSAEIIAVRIEISRKAEKRTTLVLWGGLAYMATQFGILARLTWWEYSWDIMEPVTYFITYGSAMAMYAYFVMTRQEYVYPEARDRQYLLFFHKGAKKSRFDLEKYNQLKDAIAQAEMDLKRLRDPLQVHLPLRQIGEKD

SEQ ID NO: 95511 - DNA, 993 bp, Artificial Sequence
  derived and/or modified sequence
atggccgccgcagctggcaggagtctgctcctcctgctcagctcaagaggtggaggcggcggcggcgcaggagggtgcggggcactcacagcagggtgctttcccggactgggagtgtctaggcaccgccagcagcagcaccaccgtactgtacatcagcgcattgcttcatggcagaacctgggagcagtatactgctccaccgtagtgccatcggacgatgtgactgtagtgtaccaaaatggactgcccgtaatttctgtgaggctgccaagccgtcgcgagcgttgccagttcaccctgaagccaattagtgatagtgttggcgtctttctgagacagctgcaggaggaggaccgtgggattgaccgagtcgcaatttatagcccggacggcgtacgtgttgccgcatccaccggcatcgatctgctgttgctggatgactttaagctggtcataaatgacctcacatatcatgttcgtcccccaaagagagttgaaatggggttctgccatgttggccagaacggttttgagttacttaccagcagctatctccccgccagtgccagccagtcagctgaaattattgccgtcagaattgaaatcagccgtaaggcagaaaaacggactactctagtgctgtgggggggcctggcatacatggctacccaattcgggatactggccaggctgacttggtgggagtacagctgggatatcatggagccggtcacatacttcattacatatggtagcgcgatggctatgtacgcctatttcgtgatgacacggcaggagtacgtctaccccgaggcacgtgacagacagtatctgctcttttttcacaaaggcgcaaagaagagcaggtttgacctggagaagtataaccaactgaaggacgcgatagcacaggccgagatggatctcaaacggctgcgggatcctttgcaagtccatctgcccctccgccagatcggagaaaaagactag

SEQ ID NO: 95512 - DNA, 993 bp, Artificial Sequence
  derived and/or modified sequence
atggctgctgctgctggccgcagcctgctgctgctgctgagcagcagaggaggcggcggcggcggggccggcggctgtggggccctgacagctggctgcttccctggcctgggcgtgagccgccaccggcagcagcagcaccacaggacagtgcaccagagaattgcctcctggcagaacctgggcgctgtgtactgcagcacagtggtgcccagtgatgatgtgacagtggtgtaccagaatggcctgcccgtcatctctgtgcggctgcccagcagaagagagcgctgccagttcaccctgaagcccatcagtgacagcgtgggcgtcttcctgcggcagctgcaggaggaggaccggggcatcgacagagtggccatctacagcccagatggagtgcgggtggccgccagcactggaattgacctgctgctgctggatgacttcaagctggtgatcaatgacctgacctaccacgtgcggccccccaagagggtggagatgggcttctgccacgtgggccagaatggatttgagctgctgaccagcagctacctgcctgccagcgccagccagagcgctgagatcatcgctgtgagaattgagatcagcaggaaggccgagaagaggaccaccctggtgctgtggggcggcctggcctacatggccacccagtttggcatcctggcccggctgacctggtgggagtacagctgggacatcatggagcctgtgacctacttcatcacctacggcagcgccatggccatgtatgcctactttgtgatgacccggcaggagtatgtgtacccagaggcccgggaccggcagtacctgctcttcttccacaagggggccaagaagagcagatttgacctggagaagtacaaccagctgaaggatgccatcgcccaggccgagatggacctgaagaggctgcgggaccccctgcaggtgcacctgcccctgcggcagatcggggagaaggactag

SEQ ID NO: 95513 - DNA, 2874 bp, Artificial Sequence
  derived and/or modified sequence
agttgagagatggcggccgccgcaggtagatcgctcctgctgctcctctcctctcggggcggcggcggcgggggcgccggcggctgcggggcgctgactgccggctgcttccctgggctgggcgtcagccgccaccggcagcagcagcaccaccggacggtacaccagaggatcgcttcctggcagaatttgggagctgtttattgcagcactgttgtgccctctgatgatgttacagtggtttatcaaaatgggttacctgtgatatctgtgaggctaccatcccggcgtgaacgctgtcagttcacactcaagcctatctctgactctgttggtgtatttttacgacaactgcaagaagaggatcggggaattgacagagttgctatctattcaccagatggtgttcgcgttgctgcttcaacaggaatagacctcctcctccttgatgactttaagctggtcattaatgacttaacataccacgtacgaccaccaaaaagagtagagatggggttttgccatgttggccagaatggttttgaactcctgacctcaagttatctacctgcctcagcctcccaaagtgccgagattatagccgtacgaattgagattagcagaaaagctgagaagaggaccactttggtgctatggggtggccttgcctacatggccacacagtttggcattttggcccggcttacctggtgggaatattcctgggacatcatggagccagtaacatacttcatcacttatggaagtgccatggcaatgtatgcatattttgtaatgacacgccaggaatatgtttatccagaagccagagacagacaatacttactatttttccataaaggagccaaaaagtcacgttttgacctagagaaatacaatcaactcaaggatgcaattgctcaggcagaaatggaccttaagagactgagagacccattacaagtacatctgcctctccgacaaattggtgaaaaagattgatctgcaaaaagcctctgaatcctggcagaaggaacacctgtttgcctttttaattaaagcattgcaggtggaagctgggagccatgtggggggtagagcgtttttacctttaattataaaacaaaaacagaaaggatctgagggaagaagggaatgttaaaacctgaggatcaggcattgtggaatataagctcaaagggcttagtgaatattgtcttaaccaagtatctcagtttctggatgaaaatgatgcagttatatagttgagagattcataaagagaaaacaatgctgggggtgttcgtttcttgcatcttctttgcagagtcagcaaaagagtaacacaccagcaccccactcgactctatttgtttttaatttaactgtccctatttttgacataggagtaaataaatatactagaaaagcaaattctcatgatatgctaaaatatcattagcatttattttaaattggacccagtctctgcagagttaccaggaatctttccttccagcatccctttactgaccacctacctgtacctcttggttacactcattttttccatttgataattggaaccaacttataactgtttaataattgacactttagattatctcttaataccttcttaaatgtctatatatcccagtgctctggatcagtgtctaaaaatcactggcaacactgcatgaggttgttggttttgttttgttttattaattagtctttcacaggaggaataattgccctcctttatatacttatctattgataatcccctctccctccagaacacaaatcagagggaaagggggtgttcagctgtactaccaaatcaggaagatgtaaggtttacaaattggctaagaatcatggctctgtagccatttcaaccagaataattttattgctaatctgctttgtgtgacagcattccaggccagccagatgggactgccttgtctggaggctttgttcatctcgaaggacacacacttccacactgtttgtgagccctcccacctccacaacttcagttgtaaatcaagtgtgtggatctcaaagggtgcaatttatctttatataggaatacatttctagggcttccttcaagcccactctcttcaccctattttttcttatcttaaattgagagaaagagaattaatcttatactttgtcaaaacattttctaccatatttccagatgacatctgcgcttgaagagtcaaaggaatctgtgtctaatatcctgtttttaactgctgtaggggcaggatggaaaggatgatgggggctgccacaccactgattggccttttctttcacgtgattcatccttcctcattgtggcaaggagtttctttctctttttcttcctcctttgggatcattgtgtatgaaaagaaaaactttaaatgacaaacccagactccaggtgccttgcaaaggttgaaggccagccaggattgctgctgctgctgctactcctgccaacacccctttcattggcatgacggaatgaaaggatgcatgtctccacttcctgaccctccgcccacttccttctccctccaccacccccagtcgtcagctccttccctcatttatttttgttaagttgtgtgaattatttttaacccatttatcctgtttgtgcatagggtttttaagaagaaacagcacagtgcaacgagcaaatctttttggggtgtgtgggaagcaagggagggaggacatggagaaaagttctttaaacaaatagcaaactattgaacatgtgtaaaatcctgtatcatttatgaaatatgtataaaaagcaatgtaccttctggaacaataaatacttattcaatttttgaa

SEQ ID NO: 95514 - DNA, 993 bp, Artificial Sequence
  derived and/or modified sequence
atggccgccgccgccggccggagcctgctgctgctgctgagcagccgggggggcggaggaggaggagctggaggctgcggggcgctaactgctgggtgcttccccggacttggtgtgtcacggcatagacaacaacagcatcatagaacagttcaccagcggattgcttcatggcagaaccttggcgcggtttactgctctaccgtggtacccagcgacgacgtgactgtggtgtatcagaatggcctgcctgtcatcagtgttaggcttccttccagaagggagcggtgccaatttactctcaagcccatatcggattcagtcggcgtgtttcttcggcaacttcaggaggaggatcggggtatcgacagagtggccatttacagtcctgatggagtgcgggtagccgcctccacgggcatcgacctgttactattggatgacttcaagctggtgataaatgacctgacttaccacgtccgaccccctaaaagagtggagatgggattttgccacgtgggtcagaatgggtttgaactgctcacctcttcttacttgcccgccagtgcgagccagtcagccgaaattatcgctgtgagaatcgagatctcccgaaaagctgaaaaaagaacgacattggtcctatggggaggacttgcctacatggccacacagttcggaatcctggcacgcctgacatggtgggagtattcctgggatataatggagcccgtgacgtatttcattacatacggtagcgcgatggcaatgtacgcctacttcgtgatgacgcgccaggaatacgtgtatcctgaggctagggatcggcagtatctgctgtttttccataaaggggctaagaaaagtcgctttgatctcgagaagtacaaccaattgaaagatgcaattgctcaagctgaaatggatctgaaacgactgcgcgaccctctgcaggttcatttaccactgcgtcagatcggggagaaggattag

SEQ ID NO: 95515 - DNA, 993 bp, Artificial Sequence
  derived and/or modified sequence
atggccgcagccgcaggtcggagtctgctgttactgcttagctctcgcggaggtgggggtggcggtgccggtggctgtggcgctttaaccgcgggttgtttccctggcctgggtgtgagccggcacagacagcagcagcaccaccggaccgtgcaccagcgtatagcctcgtggcagaatctaggtgctgtctactgctcaacagtcgtcccatcagacgatgtaacagtggtgtaccagaacgggctaccggttatcagtgttaggctacccagcaggcgggaaagatgccagttcactctaaagccaatttccgactctgtgggcgtgttcctacggcaactgcaggaagaagatcggggtattgatcgtgttgccatctactctccggatggcgtacgggtcgccgcttccaccgggatagatttattgctgctggatgatttcaagctcgtcatcaatgacctgacatatcacgtgcggccaccaaaaagagtcgagatgggtttttgtcatgtggggcagaacggtttcgaacttctgacaagttcttaccttcctgcaagtgctagccagtctgccgagatcatcgcagtacggattgagatctcccgcaaggccgaaaagaggactacactggtactctggggtgggcttgcgtatatggctactcaattcggtatactggctcgtttgacctggtgggagtactcttgggacatcatggagcctgtcacttatttcataacctacggctcagcaatggctatgtatgcatactttgtcatgaccagacaagagtacgtttacccagaagccagggatcgtcagtacctcctttttttccacaaaggagcaaagaaatctcgttttgacctcgagaagtataaccagctgaaagatgctatagcccaggcagaaatggatctcaaacgtctcagggacccacttcaggtgcacctcccactgagacagatcggcgaaaaggattag

SEQ ID NO: 95516 - DNA, 993 bp, Artificial Sequence
  derived and/or modified sequence
atggccgccgccgccggcagaagcctgctgctgctgctgagcagcagaggcggcggcggcggcggcgccggcggctgcggcgccctgaccgccggctgcttccccggcctgggcgtgagcagacacagacagcagcagcaccacagaaccgtgcaccagagaatcgccagctggcagaacctgggcgccgtgtactgcagcaccgtggtgcccagcgacgacgtgaccgtggtgtaccagaacggcctgcccgtgatcagcgtgagactgcccagcagaagagagagatgccagttcaccctgaagcccatcagcgacagcgtgggcgtgttcctgagacagctgcaggaggaggacagaggcatcgacagagtggccatctacagccccgacggcgtgagagtggccgccagcaccggcatcgacctgctgctgctggacgacttcaagctggtgatcaacgacctgacctaccacgtgagaccccccaagagagtggagatgggcttctgccacgtgggccagaacggcttcgagctgctgaccagcagctacctgcccgccagcgccagccagagcgccgagatcatcgccgtgagaatcgagatcagcagaaaggccgagaagagaaccaccctggtgctgtggggcggcctggcctacatggccacccagttcggcatcctggccagactgacctggtgggagtacagctgggacatcatggagcccgtgacctacttcatcacctacggcagcgccatggccatgtacgcctacttcgtgatgaccagacaggagtacgtgtaccccgaggccagagacagacagtacctgctgttcttccacaagggcgccaagaagagcagattcgacctggagaagtacaaccagctgaaggacgccatcgcccaggccgagatggacctgaagagactgagagaccccctgcaggtgcacctgcccctgagacagatcggcgagaaggactag

SEQ ID NO: 95517 - protein, 302 aa, Artificial Sequence
  derived and/or modified sequence
MVHQRIASWQNLGAVYCSTVVPSDDVTVVYQNGLPVISVRLPSRRERCQFTLKPISDSVGVFLRQLQEEDRGIDRVAIYSPDGVRVAASTGIDLLLLDDFKLVINDLTYHVRPPKRDLLSHENAATLNDVKTLVQQLYTTLCIEQHQLNKERELIERLEDLKEQLAPLEKVRIEISRKAEKRTTLVLWGGLAYMATQFGILARLTWWEYSWDIMEPVTYFITYGSAMAMYAYFVMTRQEYVYPEARDRQYLLFFHKGAKKSRFDLEKYNQLKDAIAQAEMDLKRLRDPLQVHLPLRQIGEKD

SEQ ID NO: 95518 - DNA, 909 bp, Artificial Sequence
  derived and/or modified sequence
atggtgcaccaacgaattgccagttggcaaaacctgggcgccgtgtattgttccacagttgtcccatctgatgacgtaaccgtcgtgtaccaaaacggcctgccagtcatctccgttaggctgccaagcaggcgtgagcggtgtcagttcacactcaagcccatctcagactctgtaggagtgtttttgcgccagttacaagaagaggataggggcatcgatcgggttgcaatctacagccctgatggcgttcgggtcgcagccagtaccggcattgatctcctgctcctagatgattttaagctcgtcattaacgatctgacttaccatgtccggccccccaaaagagacctgcttagccatgagaatgcagctacactgaacgatgtcaagacactggttcagcagttgtacacaactctttgcatcgagcaacatcagctgaataaagagcgagagctgatagaaagactcgaagaccttaaagaacaactggcacctctggagaaagtgcgtattgaaattagcaggaaagctgagaagcgcactaccctggtcctctggggcggactggcctatatggccacacagttcggcattctcgctaggttgacatggtgggagtattcctgggatatcatggagccagtgacatatttcattacctatggctccgcgatggctatgtacgcctactttgtcatgacgagacaggaatatgtgtaccctgaagcgcgggatagacagtatcttctcttctttcacaaaggtgctaaaaaatctagattcgaccttgagaaatataaccagctgaaggacgccatcgcacaggcagagatggatctgaaaagactgcgggacccactccaagtccaccttcccctgcggcagatcggtgaaaaagactag

SEQ ID NO: 95519 - DNA, 909 bp, Artificial Sequence
  derived and/or modified sequence
atggtgcaccagagaattgcctcctggcagaacctgggcgctgtgtactgcagcacagtggtgcccagtgatgatgtgacagtggtgtaccagaatggcctgcctgtgatctctgtgcggctgcccagccggcgggagcgctgccagttcaccctgaagcccatcagtgacagcgtgggcgtcttcctgcggcagctgcaggaggaggaccggggcatcgacagagtggccatctacagcccagatggagtgcgggtggccgccagcacaggcatcgacctgctgctgctggatgacttcaagctggtgatcaatgacctgacctaccacgtgcggccccccaagagggacctgctgagccatgaaaatgctgccaccctgaatgatgtgaagaccctggtgcagcagctgtacaccaccctgtgcatcgagcagcaccagctgaacaaggagcgggagctgattgagcggctggaggacctgaaggagcagctggcccccctggagaaggtgagaattgagatcagcaggaaggccgagaagaggaccaccctggtgctgtggggcggcctggcctacatggccacccagtttggcatcctggcccggctgacctggtgggagtacagctgggacatcatggagcctgtgacctacttcatcacctacggcagcgccatggccatgtatgcctactttgtgatgacccggcaggagtatgtgtacccagaggcccgggaccggcagtacctgctcttcttccacaagggggccaagaagagcagatttgacctggagaagtacaaccagctgaaggatgccatcgcccaggccgagatggacctgaagaggctgcgggaccccctgcaggtgcacctgcccctgcggcagatcggggagaaggactag

SEQ ID NO: 95520 - DNA, 3224 bp, Artificial Sequence
  derived and/or modified sequence
cttcgttcttaacagccctgccccaaggctccctgaacggagccagatggaagttgtcccctttccctcctcctccgggcgggttggggagttctgagttgccgcggccgccttgtgtgtgccaggagagtggcagtgccatgctgctgggagctgccccggagagcagcccaggaccccggcggggccgcccctcgtcctctctcgtccccgaggggtcgggcaggaaggaaaatcaaactttattcccctctgtgacttcctctgtgtgtgtgcatggggaaccggctccctcgagatggatgctgcattgcttcaggaggcaagcttcatcctcttgggtccttaaaggtgcttttgggggtcctttcgagggctactgtataagcgtgttcacgcgtgcctgaagcgggaagggtggtcagcaggcacaggagaagcgaatatggtacaccagaggatcgcttcctggcagaatttgggagctgtttattgcagcactgttgtgccctctgatgatgttacagtggtttatcaaaatgggttacctgtgatatctgtgaggctaccatcccggcgtgaacgctgtcagttcacactcaagcctatctctgactctgttggtgtatttttacgacaactgcaagaagaggatcggggaattgacagagttgctatctattcaccagatggtgttcgcgttgctgcttcaacaggaatagacctcctcctccttgatgactttaagctggtcattaatgacttaacataccacgtacgaccaccaaaaagagacctcttaagtcatgaaaatgcagcaacgctgaatgatgtaaagacattggtccagcaactatacaccacactgtgcattgagcagcaccagttaaacaaggaaagggagcttattgaaagactagaggatctcaaagagcagctggctcccctggaaaaggtacgaattgagattagcagaaaagctgagaagaggaccactttggtgctatggggtggccttgcctacatggccacacagtttggcattttggcccggcttacctggtgggaatattcctgggacatcatggagccagtaacatacttcatcacttatggaagtgccatggcaatgtatgcatattttgtaatgacacgccaggaatatgtttatccagaagccagagacagacaatacttactatttttccataaaggagccaaaaagtcacgttttgacctagagaaatacaatcaactcaaggatgcaattgctcaggcagaaatggaccttaagagactgagagacccattacaagtacatctgcctctccgacaaattggtgaaaaagattgatctgcaaaaagcctctgaatcctggcagaaggaacacctgtttgcctttttaattaaagcattgcaggtggaagctgggagccatgtggggggtagagcgtttttacctttaattataaaacaaaaacagaaaggatctgagggaagaagggaatgttaaaacctgaggatcaggcattgtggaatataagctcaaagggcttagtgaatattgtcttaaccaagtatctcagtttctggatgaaaatgatgcagttatatagttgagagattcataaagagaaaacaatgctgggggtgttcgtttcttgcatcttctttgcagagtcagcaaaagagtaacacaccagcaccccactcgactctatttgtttttaatttaactgtccctatttttgacataggagtaaataaatatactagaaaagcaaattctcatgatatgctaaaatatcattagcatttattttaaattggacccagtctctgcagagttaccaggaatctttccttccagcatccctttactgaccacctacctgtacctcttggttacactcattttttccatttgataattggaaccaacttataactgtttaataattgacactttagattatctcttaataccttcttaaatgtctatatatcccagtgctctggatcagtgtctaaaaatcactggcaacactgcatgaggttgttggttttgttttgttttattaattagtctttcacaggaggaataattgccctcctttatatacttatctattgataatcccctctccctccagaacacaaatcagagggaaagggggtgttcagctgtactaccaaatcaggaagatgtaaggtttacaaattggctaagaatcatggctctgtagccatttcaaccagaataattttattgctaatctgctttgtgtgacagcattccaggccagccagatgggactgccttgtctggaggctttgttcatctcgaaggacacacacttccacactgtttgtgagccctcccacctccacaacttcagttgtaaatcaagtgtgtggatctcaaagggtgcaatttatctttatataggaatacatttctagggcttccttcaagcccactctcttcaccctattttttcttatcttaaattgagagaaagagaattaatcttatactttgtcaaaacattttctaccatatttccagatgacatctgcgcttgaagagtcaaaggaatctgtgtctaatatcctgtttttaactgctgtaggggcaggatggaaaggatgatgggggctgccacaccactgattggccttttctttcacgtgattcatccttcctcattgtggcaaggagtttctttctctttttcttcctcctttgggatcattgtgtatgaaaagaaaaactttaaatgacaaacccagactccaggtgccttgcaaaggttgaaggccagccaggattgctgctgctgctgctactcctgccaacacccctttcattggcatgacggaatgaaaggatgcatgtctccacttcctgaccctccgcccacttccttctccctccaccacccccagtcgtcagctccttccctcatttatttttgttaagttgtgtgaattatttttaacccatttatcctgtttgtgcatagggtttttaagaagaaacagcacagtgcaacgagcaaatctttttggggtgtgtgggaagcaagggagggaggacatggagaaaagttctttaaacaaatagcaaactattgaacatgtgtaaaatcctgtatcatttatgaaatatgtataaaaagcaatgtaccttctggaacaataaatacttattcaatttttg

SEQ ID NO: 95521 - DNA, 909 bp, Artificial Sequence
  derived and/or modified sequence
atggtgcaccagcggatcgccagctggcagaacctgggcgccgtgtattgctctaccgtggtcccatccgatgacgttaccgtagtttaccagaacggtctgccggtcataagcgtaagactccccagcagacgggaaaggtgccagtttacgctcaagccaattagtgattcagttggtgtcttcttaagacagctgcaagaagaggatagagggatcgaccgtgtagccatctactctcccgacggcgtccgcgtcgctgctagcacaggaatagatctgttgcttctcgatgactttaagctagtcatcaacgacctgacataccatgttagaccgcccaagagggatctgctctcccacgaaaatgctgctaccctcaacgatgtgaaaacgctggtacagcagctgtataccaccctgtgtattgaacagcatcagctgaataaagagagagagctgatagagcgactggaggacctcaaggagcaattagccccacttgagaaagtgcgaatcgaaatttctagaaaagccgaaaaacggacaaccctggttctttggggcggactggcctatatggctactcagtttggcatactagccaggctgacgtggtgggagtacagctgggacatcatggagccggtgacctacttcattacctacggtagtgcaatggccatgtatgcttacttcgtgatgacgagacaggagtatgtatatccagaggcgcgggatcgtcagtacctgctcttctttcacaaaggcgctaagaagagccgatttgatcttgagaaatacaaccagcttaaagacgcaatagcccaagccgagatggacctcaaacggttgagagaccccctgcaagtgcacctgcccctaagacagataggcgagaaggattag

SEQ ID NO: 95522 - DNA, 909 bp, Artificial Sequence
  derived and/or modified sequence
atggtgcatcagagaattgctagctggcagaatctgggtgctgtctactgttcgacggtcgtgccttccgacgatgtcaccgtcgtgtaccagaatggtctccctgtgatttctgtcagactgcctagccgtcgcgagcgatgtcagttcacattgaaacctataagcgacagtgtgggcgtgttcctgaggcaactgcaggaagaggacagaggtattgatcgggtggccatctacagccccgacggtgtcagggtcgcagcttccaccgggatcgacctgctgctattggacgatttcaagcttgtcataaacgacttaacctaccacgttcgaccccctaagagagacctgttaagtcacgagaacgcagctaccctcaatgacgtgaagaccttggtccaacaactgtacacaaccctctgcattgagcaacatcaactgaataaggaaagagaacttatagagaggctggaagacttaaaagagcagttggctcccctagagaaagtgagaattgagatttcaagaaaagcagagaaaagaactactctggttctctggggaggtctggcgtatatggcaacacagtttggcatattggctaggctgacctggtgggagtactcttgggacattatggagccagtgacatacttcataacttatgggtcagcgatggcaatgtacgcttatttcgtgatgacccggcaggaatacgtgtatcccgaggcacgggatcgccagtatcttctgtttttccataagggggctaagaaaagcagattcgacctcgaaaaatacaatcagcttaaggacgcaatcgcacaggccgagatggatcttaagcgcctaagggatcctctgcaagttcacttgccgctgcggcagatcggcgaaaaagactag

SEQ ID NO: 95523 - DNA, 909 bp, Artificial Sequence
  derived and/or modified sequence
atggtgcaccagagaatcgccagctggcagaacctgggcgccgtgtactgcagcaccgtggtgcccagcgacgacgtgaccgtggtgtaccagaacggcctgcccgtgatcagcgtgagactgcccagcagaagagagagatgccagttcaccctgaagcccatcagcgacagcgtgggcgtgttcctgagacagctgcaggaggaggacagaggcatcgacagagtggccatctacagccccgacggcgtgagagtggccgccagcaccggcatcgacctgctgctgctggacgacttcaagctggtgatcaacgacctgacctaccacgtgagaccccccaagagagacctgctgagccacgagaacgccgccaccctgaacgacgtgaagaccctggtgcagcagctgtacaccaccctgtgcatcgagcagcaccagctgaacaaggagagagagctgatcgagagactggaggacctgaaggagcagctggcccccctggagaaggtgagaatcgagatcagcagaaaggccgagaagagaaccaccctggtgctgtggggcggcctggcctacatggccacccagttcggcatcctggccagactgacctggtgggagtacagctgggacatcatggagcccgtgacctacttcatcacctacggcagcgccatggccatgtacgcctacttcgtgatgaccagacaggagtacgtgtaccccgaggccagagacagacagtacctgctgttcttccacaagggcgccaagaagagcagattcgacctggagaagtacaaccagctgaaggacgccatcgcccaggccgagatggacctgaagagactgagagaccccctgcaggtgcacctgcccctgagacagatcggcgagaaggactag

SEQ ID NO: 95524 - protein, 203 aa, Artificial Sequence
  derived and/or modified sequence
MAPALLLIPAALASFILAFGTGVEFVRFTSLRPLLGGIPESGGPDARQGWLAALQDRSILAPLAWDLGLLLLFVGQHSLMAAERVKAWTSRYFGVLQRSLYVACTALALQVYYHVLGLGEPLALKSPRALRLFSHLRHPVCVELLTVLWVVPTLGTDRLLLAFLLTLYLGLAHGLDQQDLRYLRAQLQRKLHLLSRPQDGEAE

SEQ ID NO: 95525 - DNA, 612 bp, Artificial Sequence
  derived and/or modified sequence
atggcccccgccctgctgctgatccccgccgccctggccagcttcatcctggccttcggcaccggcgtggagttcgtgagattcaccagcctgagacccctgctgggcggcatccccgagagcggcggccccgacgccagacagggctggctggccgccctgcaggacagaagcatcctggcccccctggcctgggacctgggcctgctgctgctgttcgtgggccagcacagcctgatggccgccgagagagtgaaggcctggaccagcagatacttcggcgtgctgcagagaagcctgtacgtggcctgcaccgccctggccctgcaggtgtactaccacgtgctgggcctgggcgagcccctggccctgaagagccccagagccctgagactgttcagccacctgagacaccccgtgtgcgtggagctgctgaccgtgctgtgggtggtgcccaccctgggcaccgacagactgctgctggccttcctgctgaccctgtacctgggcctggcccacggcctggaccagcaggacctgagatacctgagagcccagctgcagagaaagctgcacctgctgagcagaccccaggacggcgaggccgagtag

SEQ ID NO: 95526 - DNA, 612 bp, Artificial Sequence
  derived and/or modified sequence
atggctcctgctctcctcttgattcctgccgctttagcctcattcatacttgcgtttgggacaggcgttgagtttgtgcggttcacgagccttaggccgcttctcggcggcatccccgagtctgggggacccgacgctcggcagggctggcttgccgctctacaggataggtccattctcgctcccctagcctgggatctgggtttgcttcttctgtttgtagggcagcattcactcatggccgcggaaagagtgaaagcctggacaagccgctatttcggggttcttcaacggtctctttacgtagcctgtaccgccctggccttgcaggtgtattatcatgtcctgggactcggcgaaccactcgccctgaagtccccgagagccctcagactgttttcccacctgaggcaccccgtgtgcgtcgagctgctgaccgtgctgtgggttgtacctaccttggggacggaccgcctgttgctggccttcctcctcaccctatacctgggactagctcatggactggatcagcaggacctaagatacttgcgtgctcagctgcaaaggaagctgcacctgcttagtcgaccccaggatggagaagcagaatag

SEQ ID NO: 95527 - DNA, 612 bp, Artificial Sequence
  derived and/or modified sequence
atggcacccgctctgctgctgattcccgcggcactcgcatcctttattttggccttcggcacgggagtggaattcgtgaggttcacctctctcagaccgcttcttggaggaatccctgagagtgggggaccagatgctcgccagggatggctggccgctctgcaggaccgttctattctggcccccctggcttgggacttggggttgctgctactgtttgtgggacaacattctctgatggctgctgagcgagttaaggcatggacttctcggtacttcggagttctccagcggagcctgtatgtggcttgcactgccttagctctgcaggtgtattaccacgtcctgggactcggagagcctttggccctaaagtcgcccagggctctccgcctgttcagccatttacggcacccggtctgtgtggaattgctcaccgtgctgtgggtggttcctacactgggcaccgaccgcctcctgttagcctttctcctcaccttatacctgggattagcacacggcctggaccagcaggatttgcgctacttgcgagctcagctgcagcgaaagctgcacctcctgtcgaggcctcaggatggagaggcagagtag

SEQ ID NO: 95528 - DNA, 612 bp, Artificial Sequence
  derived and/or modified sequence
atggcacccgccctcctcctgatcccagcggctctggctagctttatcttggcgttcggcactggcgtggaattcgtaagattcactagtctgcgccctctgctcggaggtattccagaatccggggggccagacgcaagacaaggatggctcgcggctctgcaggacaggtccattctcgctcccctggcatgggacctggggctgctcctgcttttcgttgggcagcattcattgatggctgcagaaagggtgaaggcctggacatctcggtacttcggtgtcctgcaaaggagcttgtacgtcgcttgtaccgcactggcgctgcaggtgtattaccacgttttgggcttgggggagccgctggccctgaagagtcctagggccttgcgcctgttcagtcaccttagacaccccgtctgtgtcgagctactgactgtgttgtgggtagtccccactctcgggacggacagattgctgttggccttcctccttacgctctatctggggttagcacacggattggaccagcaggatctccggtatcttagagcccagctgcagagaaagctacatctgttgagcaggccacaagacggagaggcagagtag

SEQ ID NO: 95529 - DNA, 612 bp, Artificial Sequence
  derived and/or modified sequence
atggcaccggctctgctcctgattccagccgctttagcttcattcatcctggcctttggcaccggggtggagtttgtgcgttttacttccctgcgcccattactcgggggaattcccgaatccggcggcccagacgctcggcagggctggctggctgctctgcaggacaggtccattctggccccgctggcatgggatctgggcctgcttctactgttcgtgggtcagcattctctcatggctgctgagcgagtaaaggcctggacatccagatactttggggtcctgcagagatccctctacgtagcatgtaccgcactagcattacaggtctactaccatgtcctcggtcttggcgagccactcgctcttaaatcccctagggccttaagactgttttcgcacctgagacacccagtatgtgtggaactcctgaccgttctttgggtggtacccaccctgggtaccgatagactgctgctggccttcctgctgacactctacctcggcctggcacatggtctcgaccagcaagacctgcgatacctgcgagcacagcttcagcgcaaacttcatttactgtctcggcctcaggacggagaggcggagtag

SEQ ID NO: 95530 - DNA, 612 bp, Artificial Sequence
  derived and/or modified sequence
atggcgcccgctctgctcctgatcccggccgccctggcaagttttatacttgccttcgggaccggagtagaatttgttcggtttactagcttgcgaccccttctggggggaatccctgagtcaggcggcccggacgctagacaggggtggctcgctgccttgcaggacagatctattttggcccccctggcatgggacttggggctgcttctgctttttgtcggtcagcactcattaatggcggccgaacgtgtgaaagcctggacgtctagatacttcggcgttctgcagagaagcctgtatgtggcatgtaccgccctggccctgcaagtgtactaccacgtcctcggcctaggggagcctttagccttgaagagcccgagagcccttagacttttcagtcacctccgtcaccctgtctgcgtcgagcttctgactgtgctatgggttgtcccaaccctcggaactgaccgtctactgctcgctttcctcctgacattgtatctggggctggcccatggccttgatcaacaagatctgaggtacttacgggctcaactgcaacggaagttacatctcctaagtcgaccacaggatggagaagccgagtag

SEQ ID NO: 95531 - DNA, 612 bp, Artificial Sequence
  derived and/or modified sequence
atggcgcccgccttattgcttatccctgcagccctggccagcttcattctggcattcgggaccggcgttgagtttgtacggtttacttcactgaggcccctactgggcggcatccctgagagtgggggtcccgatgctaggcaaggctggttggcagcgctgcaggataggagcatcctggcccccttggcctgggatctgggcctgctgctgcttttcgtcgggcagcattcgcttatggctgccgaacgcgtgaaggcttggacttcccggtacttcggcgtcctgcagagatccctttacgtggcttgcactgcccttgccctccaggtgtattatcacgtgctgggcttgggcgaaccactggcattgaaatctccacgcgccctgagacttttcagtcacctgcgccaccctgtgtgtgtggagctattaaccgtcctatgggtggtgcccacactggggaccgataggctgttattggcttttctgttaactctgtatctgggacttgcccatggactggaccagcaagacctgaggtatttgagagcacagctgcagagaaaactgcacttgttgagtcgaccacaagacggggaggccgagtag

SEQ ID NO: 95532 - DNA, 612 bp, Artificial Sequence
  derived and/or modified sequence
atggccccagccttgctgcttataccggcagcactcgcctcctttatcctggcttttgggactggagtcgagttcgtgaggtttacgtcactgagaccgttgctgggcgggattcctgaatcaggaggccccgatgcccggcagggctggcttgcggctctgcaagatcgctcaatcctcgcccctttagcctgggacctgggcttattgctgctattcgtgggccagcattccctgatggctgcagagagagtgaaagcctggacttcgcgctacttcggtgtactgcagagatcgctgtacgtcgcttgtaccgcacttgctcttcaagtgtactaccatgtattaggacttggcgagccactggcattaaaaagcccacgggccctcagattgttctcccacctccgccaccccgtgtgtgtggaacttctgacagtgctgtgggtggttccgactctcgggaccgatcgacttctgctggccttcctcctgactttgtacctggggctcgcccacggcttggatcagcaagacttgaggtacctccgagctcaacttcagaggaaattgcatttgctgtcgcggccgcaggacggtgaggccgaatag

SEQ ID NO: 95533 - DNA, 612 bp, Artificial Sequence
  derived and/or modified sequence
atggccccagccctgctgctgatcccagctgccctggccagcttcatcctggcctttggaactggagtggagtttgtgcgcttcaccagcctgcggcccctgctgggcggcatccctgagagcggcggcccagatgcccggcagggctggctggccgccctgcaggacaggagcatcctggcccccctggcctgggacctgggcctgctgctgctgtttgtgggccagcacagcctgatggctgctgagcgggtgaaggcctggaccagccgctactttggagtgctgcagaggagcctgtatgtggcctgcacagccctggccctgcaggtgtactaccacgtgctgggcctgggggagcccctggccctgaagagcccccgggccctgcggctcttcagccacctgcggcaccctgtgtgtgtggagctgctgactgtgctgtgggtggtgcccaccctgggcacagaccggctgctgctggccttcctgctgaccctgtacctgggcctggcccacggcctggaccagcaggacctgcgctacctgcgggcccagctgcagaggaagctgcacctgctgagccggccccaggatggagaggccgagtag

SEQ ID NO: 95534 - DNA, 1228 bp, Artificial Sequence
  derived and/or modified sequence
ccatggcccctgcactgctcctgatccctgctgccctcgcctctttcatcctggcctttggcaccggagtggagttcgtgcgctttacctcccttcggccacttcttggagggatcccggagtctggtggtccggatgcccgccagggatggctggctgccctgcaggaccgcagcatccttgcccccctggcatgggatctggggctcctgcttctatttgttgggcagcacagcctcatggcagctgaaagagtgaaggcatggacatcccggtactttggggtccttcagaggtcactgtatgtggcctgcactgccctggccttgcaggtatactaccatgtgctggggctgggcgagcctctggccctgaagtctccccgggctctcagactcttctcccacctgcgccacccagtgtgtgtggagctgctgacagtgctgtgggtggtgcctaccctgggcacggaccgtctcctccttgctttcctccttaccctctacctgggcctggctcacgggcttgatcagcaagacctccgctacctccgggcccagctacaaagaaaactccacctgctctctcggccccaggatggggaggcagagtgaggagctcactctggttacaagccctgttcttcctctcccactgaattctaaatccttaacatccaggccctggctgcttcatgccagaggcccaaatccatggactgaaggagatgccccttctactacttgagactttattctctgggtccagctccataccctaaattctgagtttcagccactgaactccaaggtccacttctcaccagcaaggaagagtggggtatggaagtcatctgtcccttcactgtttagagcatgacactctccccctcaacagcctcctgagaaggaaaggatctgccctgaccactcccctggcactgttacttgcctctgcgcctcaggggtccccttctgcaccgctggcttccactccaagaaggtggaccagggtctgcaagttcaacggtcatagctgtccctccaggccccaaccttgcctcaccactcccggccctagtctctgcacctccttaggccctgcctctgggctcagaccccaacctagtcaaggggattctcctgctcttaactcgatgacttggggctccctgctctcccgaggaagatgctctgcaggaaaataaaagtcagcctttttctacata

SEQ ID NO: 95535 - DNA, 612 bp, Artificial Sequence
  derived and/or modified sequence
atggcccccgccctgctgctgatccccgccgccctggccagcttcattcttgcgtttggaactggtgtggaatttgtgcgcttcacgtcccttcgacccctcctgggtgggatcccagagtcgggcggcccagacgcccgccaggggtggttggctgccttacaggatcgctctatcctcgcacctctcgcttgggatctcggactactccttttgttcgtgggccagcacagcttgatggccgccgagagggtcaaagcttggacttctcgctacttcggggtgcttcagcggtcactatacgttgcgtgtaccgctttggcacttcaagtgtactaccacgtccttggcctcggagaacctctcgcactgaagagccccagggcccttcgcttgttcagtcatctccgccatcccgtatgtgtggagcttctgactgttctgtgggtggtacctaccctgggaacggaccggctcctccttgcctttcttttgactctctacttgggtcttgcccatggcctcgaccagcaggacttaaggtatctccgcgcccagctgcaacgcaaactgcatctgttaagccggccgcaggacggagaggctgaatag

SEQ ID NO: 95536 - DNA, 612 bp, Artificial Sequence
  derived and/or modified sequence
atggcccccgccctgctgctgatccccgccgccctggccagcttcattctggcctttggcaccggagtggagttcgtcagattcacatcacttaggccactgttaggaggtattcctgaaagcggcggacctgacgccaggcagggctggttggcggcgctccaggatcgatctattttagctccacttgcctgggatctcggactcttacttctgttcgttggccagcactcactcatggctgctgagagagtaaaggcatggactagcaggtacttcggcgtgctgcagaggagcctgtacgtggcttgcacagccctcgcactccaggtctattatcacgtgctggggcttggcgaaccacttgctttgaagtcacctcgcgcattgcgtctattttcacacttacggcacccagtttgtgttgagttactcaccgtgctgtgggtggtgcccactctggggacagacagactgcttctggcttttctgttaaccttatatctgggtttggcccatgggcttgatcagcaagatcttcgctacctcagggcccagctacagcgaaagcttcacctcttgtctaggccccaggacggcgaggctgaatag

SEQ ID NO: 95537 - DNA, 612 bp, Artificial Sequence
  derived and/or modified sequence
atggcccccgccctgctgctgatccccgccgccctggccagcttcattctggcttttggaaccggagtcgagtttgtaaggttcacatcacttcgccccctgctgggtggcattccagagagcggcggccctgatgccagacaaggctggttggccgctctgcaggatagatctatactagcccccttagcctgggatttgggtctgctactcctcttcgtgggacagcacagcttgatggctgccgagcgggtcaaggcctggaccagtcgatactttggagtgctccagcggagtctttatgtggcatgtactgccctggccttgcaagtctattaccatgtcctcgggctgggtgaaccactagcgcttaaatccccccgagccctgagactgttcagccacttgcgccaccccgtctgcgtggaactgctcactgtgctgtgggtcgttcctacacttggaacagatcggctcctgctcgcctttctgcttaccctttacttaggcctggcacatggattggatcagcaggacttgcgctacctcagggcccaactgcagcgcaagctgcacttgctgtctaggccccaggatggcgaggctgagtag

SEQ ID NO: 95538 - DNA, 612 bp, Artificial Sequence
  derived and/or modified sequence
atggcccccgccctgctgctgatccccgccgccctggccagcttcatcctcgctttcggtacgggtgtcgagttcgtgagatttacttccttacggcccctgttgggaggtatccctgaatccgggggcccggatgctagacaggggtggctcgcagcactgcaggataggtccatcctggctccactggcttgggatttggggttactgctgctgttcgtgggtcagcattccttaatggccgcagagagggtgaaagcctggacctccagatattttggtgttctgcagaggtcactctacgtggcctgcaccgctctcgctttacaggtgtactatcacgttttgggcctcggagaacccctggccctgaaatctcccagagccctccgcctcttttcacatctgagacaccctgtgtgcgtggagctcctaaccgtcctatgggtagtgcctactctcggcaccgatcgattgctcttggctttcctgctcacgctgtacctaggactggcacatgggctcgaccagcaggacctccgctatctccgagcccagctgcagaggaagttacacttactgagccggccacaggacggagaagcagagtag

SEQ ID NO: 95539 - DNA, 612 bp, Artificial Sequence
  derived and/or modified sequence
atggcccccgccctgctgctgatccccgccgccctggccagcttcattcttgcttttgggaccggtgtggagttcgtgagattcactagtctgcgtccattgctgggtggaatcccagaatctggaggtccggatgcgcggcagggctggctcgctgcactgcaggacaggagcatcttggccccgcttgcttgggatctcggtctgctgttactcttcgtgggccagcacagcctgatggcagccgaaagggtgaaggcttggacgagcaggtactttggcgtgctgcagaggtccctttatgtcgcctgcactgccctagccctgcaagtgtactaccacgtgcttgggttaggcgagcccttggctctcaaatctcctcgagcactccgcctcttctcgcacctgaggcaccctgtgtgtgtggagctgttgaccgtactatgggtagtaccaaccttgggtactgatagactactgctggctttcctcctgaccttgtacctgggactggcacatgggcttgaccagcaagaccttaggtatctccgggcgcagctccagaggaagctgcacctcttatcccgacctcaagatggcgaagcggagtag

SEQ ID NO: 95540 - DNA, 612 bp, Artificial Sequence
  derived and/or modified sequence
atggcccccgccctgctgctgatccccgccgccctggccagcttcattcttgcttttggaacaggggtagaatttgtgaggtttacctcattgcggcccctgctcggtggaatccccgagtctggcgggccagatgccaggcaaggctggttagcagccctacaggatcgtagcattctggcacctctcgcctgggacctcggccttctgctgctctttgtgggacaacactccctgatggcagccgaacgagttaaggcctggacctcaaggtacttcggcgttctgcagcgctcactttacgtggcttgtaccgcattggcactgcaagtgtactaccatgtgctcggtctgggggagcctctcgcactaaaatccccccgggcccttcgattgttcagtcatttgcggcatcccgtctgcgtcgagctgctcaccgtgctgtgggtggtacccacgctgggtacggataggctgctcctggcgtttctactcaccctgtacctgggtctggcgcacggtctggatcagcaggatcttcggtatctgcgcgcccagcttcagcgcaaactgcatttgctgagtcgcccccaagatggtgaggcagagtag

SEQ ID NO: 95541 - DNA, 612 bp, Artificial Sequence
  derived and/or modified sequence
atggcccccgccctgctgctgatccccgccgccctggccagcttcattttggcattcgggaccggggtggaattcgtccggttcacctctcttcggccactgctaggcgggatcccagagagcggaggtccggacgcacgccagggatggctggccgccttacaggataggtccatactcgcgcccttagcttgggatctgggcttgctcctgctgttcgtaggtcagcattccctgatggccgccgaacgcgtgaaggcttggaccagccgttattttggtgttcttcaacgtagcctgtatgttgcctgtaccgctctcgccctacaggtgtactatcatgtgctgggcctaggtgagccacttgctctcaagtccccgcgcgctctcaggctcttctcccatttaagacatccagtgtgtgtcgaattactgacagtcttgtgggttgttccaaccctcggtactgatcgactcctcctagcgtttctattaacattgtatctgggtctggcccacggcctcgatcagcaggatctccggtacttgcgagcacagctacaacgcaaactacacctgttgtcccgcccccaagacggagaagcggagtag

SEQ ID NO: 95542 - DNA, 612 bp, Artificial Sequence
  derived and/or modified sequence
atggctccggctctgctgctaattcccgctgcactggcatcattcatcctggctttcggtaccggggtcgagttcgtccgttttactagccttcggcctctgctgggtggtatcccagaatcgggcggacccgacgctaggcagggctggctggcggcactacaggatagaagcatactagctcccttggcatgggatcttggcctgctcctcctttttgtgggacaacacagcctcatggctgctgagagggtcaaagcatggacctctaggtactttggcgttctgcagcgaagcctgtacgtagcttgcaccgccttggcactgcaggtctattaccatgtgcttggactgggcgagcccctggccctaaagtctcctcgcgcattaagacttttctctcacctgagacatcctgtatgcgtcgaactcctgactgtgctgtgggtcgtgccgactctcggcactgatagactgctattagcatttttgctaacactgtacctcggtctggcccacggcctggatcagcaggacctacggtatctgagagcccagctccaacggaagttacaccttcttagtagaccccaggacggagaagccgaatag

SEQ ID NO: 95543 - DNA, 612 bp, Artificial Sequence
  derived and/or modified sequence
atggctcctgccctgctgttgattccagccgcattggcctcatttatcttggccttcggcaccggtgtcgagtttgtgcgcttcacctccctgcgaccactgttgggaggcatccccgaatctggtggccctgacgccagacagggatggcttgctgccctccaagaccggagtatcttggcgccactcgcctgggacctaggactgcttttactcttcgtcggccagcattccctgatggccgctgaacgcgtcaaagcctggacctcccgctacttcggtgtcctgcagcgatcactatacgtcgcatgtactgcactggctctgcaggtctattatcacgtgctggggctcggggagccccttgccctcaagtccccgcgtgcattacggctcttctcacatctaaggcaccccgtgtgcgtcgaactattgacagttctttgggtggtgcctacgctcggtaccgataggcttctcctggcattcttgctgactctttatctgggcctcgcccacggattggaccagcaagacctgcggtacctgcgggctcagctccagaggaaattacatctcctgtcaaggccacaggatggcgaagcggaatag

SEQ ID NO: 95544 - DNA, 612 bp, Artificial Sequence
  derived and/or modified sequence
atggcacctgcgctgttgctgatcccggcagccctggcaagcttcatcctcgcctttgggaccggggtcgagtttgttcggttcactagcttgcggcctctgttgggaggcatcccagaaagtggtggcccagatgcaagacagggttggctggctgctttgcaggaccgaagtatcctggcgccacttgcatgggacttgggattactactgctgtttgtggggcagcattccttaatggctgcagaacgcgtaaaagcatggacctctcgttactttggggtcctacagcgatccctgtatgttgcatgtaccgcgctcgccctgcaggtttactatcacgtgctcgggttgggagagccactggccttgaaaagtcccagggcactgaggctattcagccacttgcgccacccagtatgtgtggaattgctgacagtattgtgggtggtgccaacactcggtactgacagactgcttctggcgtttctattgactctctacctgggattggcccatggcctggaccagcaggatttgcgctatctgcgggcacagctgcagaggaagctacatctgcttagcaggcctcaggacggagaggcggagtag

SEQ ID NO: 95545 - DNA, 612 bp, Artificial Sequence
  derived and/or modified sequence
atggcgcctgccctactccttatcccggctgcactggcttctttcatcctggcctttggcacgggagtcgagtttgtcagatttacgtccctgcgtcccttactcggcggaattccagaaagcggaggccctgatgctaggcaggggtggctcgcagccctgcaagaccggtctatcctcgccccactggcttgggatctggggctgcttcttctcttcgttggccaacactccctgatggcggcagagagagtgaaggcatggactagtcgttattttggcgtgctgcagagatctctgtacgtggcctgtacagccctggctctgcaggtgtattaccatgttcttggactgggagaaccactggcactgaagtctcccagagctcttcgtctctttagtcacctccgccatccagtgtgtgtggaactcttgacagtgctgtgggtggtacctaccctgggaactgatcggcttctgctggcattcctgctgacactgtaccttgggctggctcacggccttgatcagcaggatctaagatatctacgagcccagctgcagcggaaactacatctcctgtcacggccacaggatggtgaggccgagtag

SEQ ID NO: 95546 - DNA, 612 bp, Artificial Sequence
  derived and/or modified sequence
atggcacctgccctgctcctgataccagccgctctagctagcttcattctggcattcggaaccggtgtagaatttgtgcggtttacaagcctgcggcctctactcggagggataccagagagcggtggccctgacgccaggcagggttggctagccgctttgcaagaccggtcgatcttggcccctcttgcatgggacctaggtctgctcctcctgttcgttggccagcactctctaatggctgcagaacgcgtgaaggcttggaccagtcggtatttcggagtgttgcaacgatcactctatgtggcgtgtactgcccttgccctgcaagtgtactatcatgtgcttggcctcggtgagcctttagcattaaagtcccctcgtgccctaagactctttagccacctgagacaccctgtttgtgtcgagctgctgaccgtgctatgggttgtcccaaccctcggaacagatcgtcttttgttggcgttcttgcttaccctgtatctcggtctcgcccacggattggaccagcaggatctccgatacctcagggcgcagctgcagcggaagctgcaccttttgagtcggccacaagacggagaggccgagtag

SEQ ID NO: 95547 - DNA, 612 bp, Artificial Sequence
  derived and/or modified sequence
atggcccctgccctgctgttaattcctgcagccctggctagcttcatcctcgcctttgggacgggagtcgaattcgtaagattcacaagtttgcggcctctgttggggggtattcctgaaagtggtgggccagacgctagacaaggatggcttgcagccctgcaggatagaagcattctagccccactggcctgggacttagggctccttttgttatttgtaggccaacactcgctgatggccgcagaaagagttaaagcctggacaagccgatactttggtgtcctccagcgctccctttacgtggcctgtacagctctcgccctccaggtatactaccatgtattgggactcggtgaaccactggccctcaagtcgcctcgcgctctcagactgtttagtcacttgagacaccctgtttgtgtggagctattgaccgtcctttgggtcgtgcccacccttggaacggataggctcctgcttgcatttttacttaccttgtaccttgggctggcacatgggcttgatcagcaggacttgcgatatcttcgggcacagttgcaaaggaaactgcaccttcttagtagaccccaggacggggaagcagagtag

SEQ ID NO: 95548 - DNA, 612 bp, Artificial Sequence
  derived and/or modified sequence
atggcccctgcgctgcttctaattcctgcggcattggccagttttatccttgcattcggaacaggggtggaatttgtgcgatttaccagcctcaggcccctgctggggggtatcccagagagcgggggtccggacgctcgccagggctggctcgcggctctccaagaccgaagtatcttggcgccactggcctgggatctcggattactgcttctatttgtgggccaacactctctgatggccgctgagcgagttaaagcgtggacaagcaggtatttcggcgtgctacagcgctcactctacgttgcctgcaccgcgctggcgcttcaggtctattaccacgtgctggggttgggagaacctctggcactgaaaagtcctcgagccttaagattattctcccacttgcgccatcccgtatgcgtggaactactcactgtattgtgggtagtacccacactgggcacagacagactgttactagctttcttactcaccctgtacctcgggctggcccatggcctggaccagcaagacttgagatatttaagggcgcagttacagagaaagctacacctgctgtccagacctcaagacggcgaggcagagtag

SEQ ID NO: 95549 - DNA, 1342 bp, Artificial Sequence
  derived and/or modified sequence
atggcgtcctcttctactgtgcctctgggatttcactatgaaacaaagtatgttgttctcagctacttgggactcctctctcaagagaagctgcaagagcaacatctttcctcaccccaaggggttcaactagatatagcttcacaatctctggatcaagaaattttattaaaagttaaaactgaaattgaagaagagctaaaatctctggacaaagaaatttctgaaggctggagtgcagtggcaccatctcggcccaccacaacctccatctcccaggttcaaatgattctcctgtctcagcctcctgagtagccaggattacagccttcaccagcacaggctttgaccgtcacacttctccagtgttcagccctgccaatccagaaagctcaatggaagactgcttggcccatcttggagaaaaagtgtcccaggaactgaaagagcctctccataaagcattgcaaatgctcctgagccaggcactgtgtttagtcttgagtcagaggaggaggaataccctggaatcactgcagaagatagcaatgacatttacatcctgcccagcgacaactctggacaagtcagtcccccagagtctccaactgtgaccacttcctggcagtctgagagcttacctgtgtcactgtcagctagccagagttggcacacagaaagcctgccagtgtcactaggccctgagtcctggcagcagattgcaatggatcctgaagaagtgaaaagcttagacagcaacggagctggagagaagagtgagaacaactcctctaattctgacattgtgcacgtggagaaagaagaggtgcccgagggcatggaagaggctgctgtggcttctgtggtcttgccagcgcgggagctgcaagaggcacttcctgaagccccagctcccttgcttccacatatcactgccacctccctgctggggacaagggaacctgacacagaagtgatcacagttgagaaatccagccctgctacatctctgtttgtagaacttgatgaagaagaggtgaaagcagcaacaactgaacctactgaagtggaggaggtggtccccgcactggaacccacagaaacgctgctgagtgagaaggagataaacgcaagggaagagagccttgtggaagagctgtcccctgccagcgagaagaagcccgtgccgccgtctgagggcaagtctagactgtcccccgccggtgagatgaagcccatgccgctgtctgagggcaagtctatactgctgtttggaggggctgctgctgttgccatcctggcagtggccatcggggtagccctggctctgagaaagaaatag

SEQ ID NO: 95550 - DNA, 4458 bp, Artificial Sequence
  derived and/or modified sequence
gccgctgggggaccctgtcggaagcaactgccgccgccgcctctttcatctcttctggggcaggggccagggccaggttttacacatccataagtagacctttttggagcctcaccagccaattcaatggcgtcctcttctactgtgcctctgggatttcactatgaaacaaagtatgttgttctcagctacttgggactcctctctcaagagaagctgcaagagcaacatctttcctcaccccaaggggttcaactagatatagcttcacaatctctggatcaagaaattttattaaaagttaaaactgaaattgaagaagagctaaaatctctggacaaagaaatttctgaagccttcaccagcacaggctttgaccgtcacacttctccagtgttcagccctgccaatccagaaagctcaatggaagactgcttggcccatcttggagaaaaagtgtcccaggaactgaaagagcctctccataaagcattgcaaatgctcctgagccaggcactgtgtttagtcttgagtcagaggaggaggaataccctggaatcactgcagaagatagcaatgacatttacatcctgcccagcgacaactctggacaagtcagtcccccagagtctccaactgtgaccacttcctggcagtctgagagcttacctgtgtcactgtcagctagccagagttggcacacagaaagcctgccagtgtcactaggccctgagtcctggcagcagattgcaatggatcctgaagaagtgaaaagcttagacagcaacggagctggagagaagagtgagaacaactcctctaattctgacattgtgcacgtggagaaagaagaggtgcccgagggcatggaagaggctgctgtggcttctgtggtcttgccagcgcgggagctgcaagaggcacttcctgaagccccagctcccttgcttccacatatcactgccacctccctgctggggacaagggaacctgacacagaagtgatcacagttgagaaatccagccctgctacatctctgtttgtagaacttgatgaagaagaggtgaaagcagcaacaactgaacctactgaagtggaggaggtggtccccgcactggaacccacagaaacgctgctgagtgagaaggagataaacgcaagggaagagagccttgtggaagagctgtcccctgccagcgagaagaagcccgtgccgccgtctgagggcaagtctagactgtcccccgccggtgagatgaagcccatgccgctgtctgagggcaagtctatactgctgtttggaggggctgctgctgttgccatcctggcagtggccatcggggtagccctggctctgagaaagaaataggaggcttttcagaagagaaagacagaaggatgtaaggttggagttgtattggctggaatttgaacctccagcagctgtctggacatttgtggaacactctgggataattggggacttctgctcaacatggcagtggcatgttaggcatgttagggcttgaggtggggcattcacattcatctgactgtaaatcccaagggcctccgctcatgctaaattgagaatcttaggggtaaagcaccccctccaggaccgggtttctcagccttggcactagtgctgttctgaccattctctgtgttggggctgtcctgtgtgtggtgggctccacccactagatgccagtggcaccccctcccagagatgacaaacgaaaatgtctctagacattgccaaatgtcccgtgtgaacatcccctattgagacccactgctttagcgagagagggtttacttaggaagaattgggatagaaattcccagctgagagaacttagctgtgggctcctcagctactgacttcttagctcttaatccccttagaatttcatctttctcgatgagcaggctctgcacccactctttttttgccccccgccctcatcctggagtgtgagggtgctcgcccgtactctcagctgcctctcagggactgcactgttcctcttcacccccaggttcctgctaagatcccacgggcgagggcttgctctggactcagtctgtcaagtccccgaagcttcctgcagctccaccttgtaaaaatgctgcctttgggaatcttcgaaatatgtacacagagaaaatcacatgaaggagacctggggtccccacttgtgagtgcaactgcaagtaactctggctagagagacacatgtgtcttgtgtcaaggcaggaggataacctggatgaccttctgaggtctcttcagcccttttcgctagtggtcacccaccaccatggttacttgccagcaacatctctattgctggatggtccctgtctataaccttgggctagtatattttttccaatatgggaccttagtcttactactgatgagttctatgggtctcttgctagggggtaaggatttttattcttgggcttatagagccagttagatcataattcttatgaaatagagagtgtcctaaatatcactgaaataaaaagtaggaaaaagaagcttgaattttaagactgaggctgctctgcagattctagtttggctttcagagttcaagagtggtggcatcttcacctgaattcttcaatgccagggtaataaaccaaaatagtcctaatcagtatatgctagttgagcatcggcataattttctttcctctggctgatcccagccctaaaggaagggtagacccgtgtctttccagccctaaaggaagggtagacccgtgtctttccagccctaaaggaagggcagacccgtgtctttccatgcccgagggccacgacgtcactatgcagggcacacgtggcttggtttaaaaaggtcatcttagatttatcttagtaaatgtaataaattattttttagatcttgaaatttataataaaaatactttacctaccctgatcaccaaaacctgatgttttaaatgtgctttctttttgaaatttatgttttcaaataaaatctccctaaagcaatatttaaaaattggtcaaaacaaggtctgggagtatgtttgtgtgtctttccagctttatcctgtagcgtgtctttgttctgtgttttagtgtcccatttagggagtgatgttttaagggtttttgtgtacttggattaagtaattagaggtgagtggggggaatgggattattgaggcaatgatttttttcttcatgggctctgatagttgcattgattgttctgtattctaattgctatatttgtgtttgcataggtgaagagcaaactggtgcgttatcttgatttttaaaaagtaataaatcctatgagttccagtattaacacttgccagttctggatcctcacacccattggctgagcgcattcaagcaccaatcgaagccaggttcatctctgagctgctgaaaggaggtgtgaggcttaggaaattggagcctgtgttgcccacgaaaggaaagaataaggaagaaatgtggtatggaagcggctacttgctgctttattttcccacctgttagacattcctccacagtgatttggccagttgtatttcacggtaatggaactagatagtgttttccattggctttctctggtagctcttggtcagctcctgagttaacaggatgtggcagcatccctgttcttccttcacgtcctcaccctctgcctccagcagtggaagggaacagccctcatgaggactgcttcctactgcagctcctgctttttgctcatacatttaaaaaactatttctcaagcttcccctccttttggggggaggagctgatagtaggaggccattccttccacctccaacttataccctctaagtctaaggtgaaggaaagattcagaataaatccaacttgtttatagaaaagttcttgttagtccttagacctcatctcaactgctctgttgaaggtaatgatttattggggggaaaaaacaacgccaatttatcctctctgtattaaagtgataattctgggcccacagaaatcagtcagtacctgcggtgtgccttaaggggactctcatgatcatcattcccttctagagaacattctagatgaagaaatgcaactgttgaccttctggttcacccatctccccctcgaggcattcttgataccccttctcacctgcatttctgtcccagggataccagatgcagccactacctaactaggcttgtcctgggggagtgagccgtgaacctggagacatggctttgacccacagctactgttcatttcctcaggctttgcgctgattccctcaataatatgacagtaaggcaagtagtctccttgcctttctcctgaaaggtatgagatgtggacatttcagtgtttgaattattttaagagatgttttatagaaataaaacgttttgtagctaagaa

SEQ ID NO: 95551 - DNA, 972 bp, Artificial Sequence
  derived and/or modified sequence
atgctgctggagctgaccagaagaggccaggagcccctgagcgccctgctgcagttcggcgtgacctacctggaggactacagcgccgagtacatcatccagcagggcggctggggcaccgtgttcagcctggagagcgaggaggaggagtaccccggcatcaccgccgaggacagcaacgacatctacatcctgcccagcgacaacagcggccaggtgagcccccccgagagccccaccgtgaccaccagctggcagagcgagagcctgcccgtgagcctgagcgccagccagagctggcacaccgagagcctgcccgtgagcctgggccccgagagctggcagcagatcgccatggaccccgaggaggtgaagagcctggacagcaacggcgccggcgagaagagcgagaacaacagcagcaacagcgacatcgtgcacgtggagaaggaggaggtgcccgagggcatggaggaggccgccgtggccagcgtggtgctgcccgccagagagctgcaggaggccctgcccgaggcccccgcccccctgctgccccacatcaccgccaccagcctgctgggcaccagagagcccgacaccgaggtgatcaccgtggagaagagcagccccgccaccagcctgttcgtggagctggacgaggaggaggtgaaggccgccaccaccgagcccaccgaggtggaggaggtggtgcccgccctggagcccaccgagaccctgctgagcgagaaggagatcaacgccagagaggagagcctggtggaggagctgagccccgccagcgagaagaagcccgtgccccccagcgagggcaagagcagactgagccccgccggcgagatgaagcccatgcccctgagcgagggcaagagcatcctgctgttcggcggcgccgccgccgtggccatcctggccgtggccatcggcgtggccctggccctgagaaagaagtag

SEQ ID NO: 95552 - DNA, 1086 bp, Artificial Sequence
  derived and/or modified sequence
atgaagcagagcatgctgttcagcgccacctgggacagcagcctgaagagaagctgcaagagcaacatcttcccccaccccaagatcctggtgcccctggtgctgctgagacagatgctgctggagctgaccagaagaggccaggagcccctgagcgccctgctgcagttcggcgtgacctacctggaggactacagcgccgagtacatcatccagcagggcggctggggcaccgtgttcagcctggagagcgaggaggaggagtaccccggcatcaccgccgaggacagcaacgacatctacatcctgcccagcgacaacagcggccaggtgagcccccccgagagccccaccgtgaccaccagctggcagagcgagagcctgcccgtgagcctgagcgccagccagagctggcacaccgagagcctgcccgtgagcctgggccccgagagctggcagcagatcgccatggaccccgaggaggtgaagagcctggacagcaacggcgccggcgagaagagcgagaacaacagcagcaacagcgacatcgtgcacgtggagaaggaggaggtgcccgagggcatggaggaggccgccgtggccagcgtggtgctgcccgccagagagctgcaggaggccctgcccgaggcccccgcccccctgctgccccacatcaccgccaccagcctgctgggcaccagagagcccgacaccgaggtgatcaccgtggagaagagcagccccgccaccagcctgttcgtggagctggacgaggaggaggtgaaggccgccaccaccgagcccaccgaggtggaggaggtggtgcccgccctggagcccaccgagaccctgctgagcgagaaggagatcaacgccagagaggagagcctggtggaggagctgagccccgccagcgagaagaagcccgtgccccccagcgagggcaagagcagactgagccccgccggcgagatgaagcccatgcccctgagcgagggcaagagcatcctgctgttcggcggcgccgccgccgtggccatcctggccgtggccatcggcgtggccctggccctgagaaagaagtag

SEQ ID NO: 95553 - DNA, 972 bp, Artificial Sequence
  derived and/or modified sequence
atgctgctcgagctaactcgcaggggacaggagcccctttccgccctgcttcagtttggcgtcacatacctggaagactacagcgccgaatatataattcagcaggggggctggggcaccgtgttctctctggagtccgaggaggaggaataccccggtataaccgccgaagactccaatgacatttacatcctcccctccgacaactctgggcaggttagccccccagagtcgccaactgtaactacctcttggcagtccgagagtctacccgtttctttatcggccagtcagtcctggcacacagagtcacttccggtgagcctgggaccagagtcttggcagcagatagccatggaccctgaagaagtgaagtctctagacagtaacggggccggcgaaaaatcagagaacaactcttccaatagcgatatcgtccatgtcgaaaaagaggaggttcctgaagggatggaggaagcagccgtggcatccgtcgtgctccccgccagagaactccaggaagcacttcctgaggcccctgcgcccctcctgccccacatcacagcaacctctttgctgggtacccgcgagcccgatacggaagtgattactgttgagaagagctctccggcgactagcctattcgttgaattggatgaagaagaggttaaagctgcaaccacagaaccgacagaggtcgaggaagttgtccctgccctggagccgacagagactctgctgagtgagaaagagatcaatgctcgggaggaaagcctagtggaggagctctctcccgctagtgagaagaagcccgtgcctcctagcgaaggtaaaagccggttgagccccgcaggggaaatgaagcctatgcctttaagcgaaggcaagtcaattctcctatttgggggcgccgcagcagtagctatcttggctgttgcgataggcgtggcactagccctgcggaaaaaatag

SEQ ID NO: 95554 - DNA, 1086 bp, Artificial Sequence
  derived and/or modified sequence
atgaaacagtcgatgttgttctccgccacatgggattcatctctcaagagatcctgcaagtcaaatatatttcctcacccaaagatccttgtgcccttggttctgctcaggcagatgctgttggaattaacacgtcgaggacaggagccgctttctgcactcctgcaattcggcgtgacatatctggaagactactctgccgagtatattatccaacagggtggctggggtacagtttttagtctggaatcagaggaagaagaatacccaggtatcacagccgaggactcaaatgacatctacatactgccctccgacaatagcggacaggtctccccaccagaaagtccgacagtgacaacatcatggcaaagtgagtcactgcccgtttccctgtcagcctcccagagctggcatacagaatccctgccggtttctctgggccccgagtcctggcagcagattgccatggatcccgaggaggtgaagtccctagacagcaatggggccggggaaaagtcagaaaataactccagtaactcagatatagtgcacgtggagaaggaagaggtccccgaggggatggaagaggcggctgtggctagtgttgtcttacccgcaagggaacttcaggaggcattacccgaggcccctgccccactgttgccccatataaccgctacctcgcttctgggtacacgagagcccgacaccgaggtcattacagtcgaaaagagctcaccagcaacaagtctgttcgtcgagttggacgaggaagaagttaaggccgcaacaacagaacctacagaggtagaagaagtcgtccccgcactggagccaacggaaactttgctgtcggagaaggaaatcaacgcccgcgaggagtccttggtcgaggagctatcacctgcaagcgagaagaagccagtgcccccaagtgaagggaaaagccgcctctctccagccggggagatgaagcctatgcctctatctgaaggtaagtcaattctgctttttggcggcgcagccgctgtggctatcctggccgtggccattggggtcgcactggccctgcgcaagaaatag

SEQ ID NO: 95555 - DNA, 972 bp, Artificial Sequence
  derived and/or modified sequence
atgctcctggagctcactcggcgcggacaggagccattatctgccctcttacagtttggagtgacttatctggaggattacagcgccgaatatatcattcagcagggggggtggggaacagtattcagcttggagagcgaggaagaagaataccctggcattacagccgaagactcgaacgatatctatatacttcctagcgacaattctggccaagtaagtccacccgaaagccctaccgttacaacaagttggcagagcgagtctctgcctgtgtctctgagcgcatctcagtcatggcacacagagtccctgccagtttcattgggcccggagagctggcaacaaatcgccatggaccccgaagaggtgaaatcactagactctaatggagccggcgaaaaaagcgagaataactccagcaattctgacattgtacatgttgaaaaagaggaagtgcccgaaggaatggaggaggctgccgtggccagtgtagtactgcctgcacgcgagctgcaggaggcgcttcccgaggcaccagcccctctgctgccacacattacagctacgagcctgctgggcaccagggaaccggataccgaggtaatcaccgttgagaaatcatcgccagctacaagtttattcgtggaactcgatgaggaggaagtgaaggccgccactaccgagccaaccgaagtcgaagaggtggtgcctgcactcgagcctaccgagacactgctatcggagaaggaaattaatgcaagagaggagtcactggtggaggaattgtcaccggcgagcgaaaagaaacccgttcccccctcagaaggaaaatctcgactgtcccctgcgggggaaatgaagcctatgccactgtccgagggtaagtccatactgttatttggcggggccgccgccgtggccatcttggccgtggcaatcggcgttgcattggctctgcggaaaaagtag

SEQ ID NO: 95556 - DNA, 972 bp, Artificial Sequence
  derived and/or modified sequence
atgctgctggagctgacccggcggggccaggagcccctgagcgccctgctgcagtttggagtgacctacctggaggactacagcgctgagtacatcatccagcagggcggctggggcaccgtcttcagcctggagagcgaggaggaggagtacccaggcatcacagctgaggacagcaatgacatctacatcctgcccagcgacaacagcggccaggtgtccccacctgagagccccaccgtgaccacctcctggcagagcgagagcctgcctgtgtccctgagcgccagccagagctggcacacagagagcctgcctgtgtccctgggccctgagagctggcagcagatcgccatggaccctgaggaggtgaagagcctggacagcaatggagctggggagaagtctgagaacaacagcagcaacagcgacatcgtgcacgtggagaaggaggaggtgcctgagggcatggaggaggccgctgtggcctctgtggtgctgcctgcccgggagctgcaggaggccctgcctgaggccccagcccccctgctgccccacatcacagccaccagcctgctgggcacccgggagccagacacagaggtgatcaccgtggagaagagcagccctgccaccagcctgtttgtggagctggatgaggaggaggtgaaggccgccaccacagagcccacagaggtggaggaggtggtgcctgccctggagcccacagagaccctgctgtctgagaaggagatcaatgcccgggaggagagcctggtggaggagctgagccctgccagcgagaagaagcctgtgcccccatctgagggcaagagccggctgagccctgctggggagatgaagcccatgcccctgtctgagggcaagagcatcctgctgtttggaggagctgctgctgtggccatcctggccgtggccatcggcgtggccctggccctgaggaagaagtag

SEQ ID NO: 95557 - DNA, 1086 bp, Artificial Sequence
  derived and/or modified sequence
atgaagcagagcatgctgttcagcgccacctgggacagcagcctgaagaggagctgcaagagcaacatcttcccccaccccaagatcctggtgcccctggtgctgctgcggcagatgctgctggagctgacccggcggggccaggagcccctgagcgccctgctgcagtttggagtgacctacctggaggactacagcgctgagtacatcatccagcagggcggctggggcaccgtcttcagcctggagagcgaggaggaggagtacccaggcatcacagctgaggacagcaatgacatctacatcctgcccagcgacaacagcggccaggtgtccccacctgagagccccaccgtgaccacctcctggcagagcgagagcctgcctgtgtccctgagcgccagccagagctggcacacagagagcctgcctgtgtccctgggccctgagagctggcagcagatcgccatggaccctgaggaggtgaagagcctggacagcaatggagctggggagaagtctgagaacaacagcagcaacagcgacatcgtgcacgtggagaaggaggaggtgcctgagggcatggaggaggccgctgtggcctctgtggtgctgcctgcccgggagctgcaggaggccctgcctgaggccccagcccccctgctgccccacatcacagccaccagcctgctgggcacccgggagccagacacagaggtgatcaccgtggagaagagcagccctgccaccagcctgtttgtggagctggatgaggaggaggtgaaggccgccaccacagagcccacagaggtggaggaggtggtgcctgccctggagcccacagagaccctgctgtctgagaaggagatcaatgcccgggaggagagcctggtggaggagctgagccctgccagcgagaagaagcctgtgcccccatctgagggcaagagccggctgagccctgctggggagatgaagcccatgcccctgtctgagggcaagagcatcctgctgtttggaggagctgctgctgtggccatcctggccgtggccatcggcgtggccctggccctgaggaagaagtag

SEQ ID NO: 95558 - DNA, 972 bp, Artificial Sequence
  derived and/or modified sequence
atgctgctggagctgacccggcggggccaggagcccctgagcgccttactgcaattcggagttacgtatctcgaggactactctgcagaatacatcattcagcaagggggatggggaaccgtgttctccttggaatctgaagaagaagaatacccgggaatcactgccgaagatagcaacgacatttatatattgccctccgataacagcgggcaagtctcccccccagaatctcctaccgtgaccacatcctggcaaagcgaaagccttccagtctccctgtcagcctcccagtcttggcatactgagagtcttcccgtcagcctagggcccgagagctggcagcagattgctatggaccccgaggaggttaagtccttggacagcaacggtgccggtgaaaagtcagagaacaatagttccaacagtgatatagtgcacgtggaaaaggaggaagtgcccgaaggcatggaagaggctgccgttgcctcagtcgtgctgcccgcccgcgaacttcaagaagctttaccagaagcccccgccccgctcctgcctcacattacagccacatcattgctgggcacccgtgagcccgacacggaagtgatcaccgtggaaaagtccagccccgctacctcactttttgtggagctagacgaggaagaggttaaagctgctaccacagagccaaccgaggtcgaggaggtggtgccagcactggagccaaccgagactctgctatccgagaaagaaattaacgcacgcgaagaaagcctggttgaggaactctcccccgcttcggagaagaaaccagtccctcccagtgaggggaagtcacgtctttctccggccggggaaatgaagcccatgcccctcagtgaggggaagtcaattctgctgtttggtggagccgcagcagtggctattctagccgtggcgataggagtagctctggctttgagaaagaagtag

SEQ ID NO: 95559 - DNA, 1086 bp, Artificial Sequence
  derived and/or modified sequence
atgaagcagagcatgctgttcagcgccacctgggacagcagcctgaagcggtcttgtaagtcaaatattttcccccacccgaagatactcgttcccctggttctgctgcggcaaatgcttctggagttgacccgtcggggacaggagcccctatctgccctgttacaattcggagttacataccttgaggactacagtgccgaatatatcatccaacagggtggttggggaacagtattctctctggaatctgaggaggaggagtatcccggcatcaccgctgaggacagcaacgatatttatattcttccatcagacaatagtggtcaagtgtccccccccgaaagccccaccgtcacaacttcttggcagtcagagtccctgcccgtttccctgagtgcttcacaatcttggcatacggagagcttgcctgtgtctctgggtccagaatcttggcagcagatcgccatggaccctgaggaggtgaagtcactggactcaaatggcgctggagaaaagtccgagaacaactctagcaattctgacattgtgcatgtagagaaagaagaggtgcccgaagggatggaagaggctgctgtagcttccgtggtccttccagccagagagcttcaagaagctcttccagaggctccggctcccctcttaccccatattaccgccacaagccttttgggcactcgcgaacccgatacggaagtgatcacggtggaaaagtcaagcccggcgacgtctctcttcgtcgagttggatgaggaggaggtgaaagccgctactactgagccgaccgaggttgaggaagtggtgcctgctctcgagcccaccgagacccttctctccgaaaaagaaatcaacgcacgcgaagaatctctcgttgaggaattatctcctgcctctgaaaagaagccagtgcctccctctgaaggtaaaagtcggctctcccctgcaggtgagatgaagcccatgcccctgtccgagggtaagtctatcctgttgtttggtggcgcagctgctgtagcaatcctggccgtagcgatcggggtagcgctagcgctgaggaagaaatag

SEQ ID NO: 95560 - DNA, 972 bp, Artificial Sequence
  derived and/or modified sequence
atgctgctggagctgacccggcggggccaggagcccctgagcgccctcctgcaatttggagttacatatttggaggactatagtgcagaatacattatacagcaagggggttggggaaccgtgttctccttggagagcgaagaggaagagtatccgggcatcacggcagaggatagcaacgacatctacattctgccgtcagataactccggtcaggtgtctccccctgagagccccactgtgaccacttcctggcagtcagagagcctacctgtttccctatccgccagtcagtcctggcacacagaatctctgccagtgagtctgggtccagagagttggcagcagattgcaatggaccccgaggaggtgaagtccctggactctaatggcgcaggcgagaagtctgagaataattctagcaactcagacattgttcacgtggagaaggaggaggtgcctgaggggatggaagaagcggccgtggcgtccgtggttctgccggcccgcgagctccaggaggccttgccggaagcacccgccccccttctgccacacatcaccgccacgagccttcttggaaccagggagcccgacaccgaagtgatcacagtcgaaaaatccagtcccgcgaccagtctgtttgtcgagctcgatgaagaggaggtcaaggccgccaccaccgagcccacagaggtcgaggaagtcgtgcctgctctcgaaccgactgaaacgttgctgagcgagaaggaaattaatgcaagagaagaaagcctggtagaggaactgtcacccgcctctgagaagaagcctgttccaccttcggaggggaaatctcgcttaagcccagccggggaaatgaaacccatgcccttgagcgaaggcaagtcaatccttctgttcggcggcgccgccgccgtggcgattctcgctgtggccattggtgtcgctctagctttgagaaagaaatag

SEQ ID NO: 95561 - DNA, 972 bp, Artificial Sequence
  derived and/or modified sequence
atgctattagagctaactcgaaggggtcaagaacccttaagcgccctcctccagttcggtgtgacctacctggaggattattcggccgagtacatcatccagcaggggggatggggcaccgtgttcagtctcgagtctgaggaggaagagtaccctggcattactgccgaggactcgaacgatatttacatcctcccatccgacaactcgggtcaggtgtccccccctgagtcccctacggtaaccacttcctggcagagcgaaagtttgcccgtttctctcagtgccagccagtcatggcatacggaatccctaccagtgtccctcggacccgaatcttggcagcagattgctatggaccccgaggaagtgaaatctctcgattcgaatggtgctggcgagaaatctgaaaacaactccagcaattctgacatcgtccatgtggagaaagaagaagtacccgaaggcatggaagaagcagcagtggcgtctgtggtactccccgctcgagaacttcaggaagcactacccgaagccccagcccctctgctgcctcacatcaccgccacatccttgctcggaactcgggagccagatacagaagtcattacagtggagaaatccagtcctgccaccagcttatttgtcgaactggacgaggaggaggtgaaggccgcaacaacagaacctacagaggtggaagaagtagtgcctgctttagagcccactgaaactttactgtccgagaaggaaattaacgccagagaagagtccctggtggaagagctgtctccagctagtgagaaaaagccggtacccccatctgagggaaaatcccgactgagtcccgctggagagatgaaaccaatgccgctgagtgagggcaagtccatcctgcttttcggtggcgctgccgctgttgcgattctggccgtggccataggcgtagctctggcactgaggaaaaagtag

SEQ ID NO: 95562 - DNA, 1086 bp, Artificial Sequence
  derived and/or modified sequence
atgaagcaatctatgctcttctccgccacgtgggacagctcactgaagcgtagctgcaagagtaacatcttccctcacccaaagatcctggtgccacttgtgctgctccggcaaatgctgctcgaactgactaggcgcggtcaggagcctttgtccgcccttctgcagttcggtgtcacgtacctcgaggattactctgccgagtacatcatccaacagggcggatggggcaccgttttctccctggagtctgaggaagaggaataccccggtattactgcagaagacagcaacgatatctacattttgccatccgataactctggacaagtttcccccccagagtcccccacggtgacaacaagctggcaatccgagagtctgcctgtttcccttagtgcaagtcagagttggcataccgagagccttccagtgtctctagggccagagtcctggcagcagattgcgatggacccagaagaggttaagtcacttgatagcaatggggcaggagaaaaatctgagaacaattcaagcaatagtgatatcgtgcatgttgaaaaggaagaagtgccagagggaatggaagaggcggctgtcgccagtgtggtgctgcctgctagagaacttcaagaagcgttgcctgaagctcccgctcctctcctcccacatatcaccgccacctctttgctggggacgagagagcccgacactgaggtgatcacagtggagaaatccagtcccgctaccagtttgttcgtggagctggacgaggaggaagtaaaagcagctaccactgagcccaccgaggtggaggaggtggtaccggcactcgagcctactgaaactttactctccgaaaaggagatcaacgccagggaagaatctctggtagaggagttgagcccagcatctgagaagaaaccggtgccgccaagcgaaggaaaatcgcggctgtccccagcaggagagatgaagcctatgccgctttccgaagggaaaagtatactgctctttgggggtgccgcagctgtggccatcctggccgtggccatcggtgtggccttggcactccggaaaaaatag

SEQ ID NO: 95563 - DNA, 972 bp, Artificial Sequence
  derived and/or modified sequence
atgctactggagctcacgagacggggacaggagcccttatctgcgctccttcagttcggtgttacatacctggaagactatagcgctgagtatattatacagcagggagggtggggcaccgtttttagcctggaatccgaggaggaagagtatcctggaatcacggcggaagacagtaacgacatctacattctgccatcagataattcgggtcaagtgtcgcctcctgagtcaccaactgtgaccacttcttggcaaagtgagtctctcccagtgtccctgtcggcgagccagtcatggcacacagagagcttgcctgtgtccctaggtcccgagagttggcagcagatcgctatggatcctgaggaggtgaaatcgctggactcaaatggcgcaggcgaaaagagtgaaaacaactcttcaaattctgacatagtccacgtggagaaagaagaagtgcctgaggggatggaggaggctgccgtggcttctgtcgtactgcctgccagagagctgcaagaagcattaccagaagcccctgctccccttttacctcacatcaccgccacctctctcctcggtactcgagagcccgatactgaggtgatcactgtcgagaagtcctctcctgcaaccagtttgttcgtcgagctggatgaggaagaggtgaaagctgcaactaccgagccaaccgaggtagaggaagtagtgccagctttagagccaaccgagaccctgctgtcagagaaggagatcaatgctcgggaggaatccctggtggaggaactgtcccccgctagtgaaaaaaaacccgttcccccttccgagggcaagtctagactcagccccgcaggcgaaatgaaacctatgccactgtctgaaggcaagtctatcctactgttcggcggagccgctgccgtcgccatactggccgtcgcaatcggcgtggccctcgctctcaggaaaaagtag

SEQ ID NO: 95564 - DNA, 1532 bp, Artificial Sequence
  derived and/or modified sequence
aacatggcggcggcggtagattagggccgcgggtcggagcactcaccgccgctgggggaccctgtcggaagcaactgccgccgccgcctctttcatctcttctggggcaggggccagggccaggttttacacatccataagtagacctttttggagcctcaccagccaattcaatggcgtcctcttctactgtgcctctgggatttcactatgaaacaaagtatgttgttctcagctacttgggactcctctctcaagagaagctgcaagagcaacatctttcctcaccccaaggggttcaactagatatagcttcacaatctctggatcaagaaattttattaaaagttaaaactgaaattgaagaagagctaaaatctctggacaaagaaatttctgaagattttggtgcctctggttttgctacgacaaatgcttttggaattgacaagacgtggtcaagaacctttgagcgcactgctgcagtttggcgtgacatacctggaggactattcggcagagtacatcattcagcaaggtggctggggcactgtgtttagtcttgagtcagaggaggaggaataccctggaatcactgcagaagatagcaatgacatttacatcctgcccagcgacaactctggacaagtcagtcccccagagtctccaactgtgaccacttcctggcagtctgagagcttacctgtgtcactgtcagctagccagagttggcacacagaaagcctgccagtgtcactaggccctgagtcctggcagcagattgcaatggatcctgaagaagtgaaaagcttagacagcaacggagctggagagaagagtgagaacaactcctctaattctgacattgtgcacgtggagaaagaagaggtgcccgagggcatggaagaggctgctgtggcttctgtggtcttgccagcgcgggagctgcaagaggcacttcctgaagccccagctcccttgcttccacatatcactgccacctccctgctggggacaagggaacctgacacagaagtgatcacagttgagaaatccagccctgctacatctctgtttgtagaacttgatgaagaagaggtgaaagcagcaacaactgaacctactgaagtggaggaggtggtccccgcactggaacccacagaaacgctgctgagtgagaaggagataaacgcaagggaagagagccttgtggaagagctgtcccctgccagcgagaagaagcccgtgccgccgtctgagggcaagtctagactgtcccccgccggtgagatgaagcccatgccgctgtctgagggcaagtctatactgctgtttggaggggctgctgctgttgccatcctggcagtggccatcggggtagccctggctctgagaaagaaataggaggcttttcagaagagaaagacagaaggatgtaaggttggagttgtattggctggaatttgaacctccagcagctgtctggacatttgtggaacactctgggataattggggacttctgctcaacat

SEQ ID NO: 95565 - DNA, 1469 bp, Artificial Sequence
  derived and/or modified sequence
accctccaacatggcggcggcggtagattagggccgcgggtcggagcactcaccgccgctgggggaccctgtcggaagcaactgccgccgccgcctctttcatctcttctggggcaggggccagggccaggttttacacatccataagtagacctttttggagcctcaccagccaattcaatggcgtcctcttctactgtgcctctgggatttcactatgaaacaaagtatgttgttctcagctacttgggactcctctctcaagagaagctgcaagagcaacatctttcctcaccccaagattttggtgcctctggttttgctacgacaaatgcttttggaattgacaagacgtggtcaagaacctttgagcgcactgctgcagtttggcgtgacatacctggaggactattcggcagagtacatcattcagcaaggtggctggggcactgtgtttagtcttgagtcagaggaggaggaataccctggaatcactgcagaagatagcaatgacatttacatcctgcccagcgacaactctggacaagtcagtcccccagagtctccaactgtgaccacttcctggcagtctgagagcttacctgtgtcactgtcagctagccagagttggcacacagaaagcctgccagtgtcactaggccctgagtcctggcagcagattgcaatggatcctgaagaagtgaaaagcttagacagcaacggagctggagagaagagtgagaacaactcctctaattctgacattgtgcacgtggagaaagaagaggtgcccgagggcatggaagaggctgctgtggcttctgtggtcttgccagcgcgggagctgcaagaggcacttcctgaagccccagctcccttgcttccacatatcactgccacctccctgctggggacaagggaacctgacacagaagtgatcacagttgagaaatccagccctgctacatctctgtttgtagaacttgatgaagaagaggtgaaagcagcaacaactgaacctactgaagtggaggaggtggtccccgcactggaacccacagaaacgctgctgagtgagaaggagataaacgcaagggaagagagccttgtggaagagctgtcccctgccagcgagaagaagcccgtgccgccgtctgagggcaagtctagactgtcccccgccggtgagatgaagcccatgccgctgtctgagggcaagtctatactgctgtttggaggggctgctgctgttgccatcctggcagtggccatcggggtagccctggctctgagaaagaaataggaggcttttcagaagagaaagacagaaggatgtaaggttggagttgtattggctggaatttgaacctccagcagctgtctggacatttgtggaacactctgggataattggggacttctgctcaacatggcagtggcatgttaggcatgttagggcttgaggtggg

SEQ ID NO: 95566 - protein, 104 aa, Artificial Sequence
  derived and/or modified sequence
MASSSTVPLGFHYETKYVVLSYLGLLSQEKLQEQHLSSPQGVQLDIASQSLDQEILLKVKTEIEEELKSLDKEISEGWSAVAPSRPTTTSISQVQMILLSQPPE

SEQ ID NO: 95567 - protein, 171 aa, Artificial Sequence
  derived and/or modified sequence
MASSSTVPLGFHYETKYVVLSYLGLLSQEKLQEQHLSSPQGVQLDIASQSLDQEILLKVKTEIEEELKSLDKEISEAFTSTGFDRHTSPVFSPANPESSMEDCLAHLGEKVSQELKEPLHKALQMLLSQALCLVLSQRRRNTLESLQKIAMTFTSCPATTLDKSVPQSLQL

SEQ ID NO: 95568 - DNA, 516 bp, Artificial Sequence
  derived and/or modified sequence
atggccagcagcagcaccgtgcccctgggcttccactacgagaccaagtacgtggtgctgagctacctgggcctgctgagccaggagaagctgcaggagcagcacctgagcagcccccagggcgtgcagctggacatcgccagccagagcctggaccaggagatcctgctgaaggtgaagaccgagatcgaggaggagctgaagagcctggacaaggagatcagcgaggccttcaccagcaccggcttcgacagacacaccagccccgtgttcagccccgccaaccccgagagcagcatggaggactgcctggcccacctgggcgagaaggtgagccaggagctgaaggagcccctgcacaaggccctgcagatgctgctgagccaggccctgtgcctggtgctgagccagagaagaagaaacaccctggagagcctgcagaagatcgccatgaccttcaccagctgccccgccaccaccctggacaagagcgtgccccagagcctgcagctgtag

SEQ ID NO: 95569 - DNA, 516 bp, Artificial Sequence
  derived and/or modified sequence
atggcaagcagctctacggtgcccttagggttccattatgagaccaaatatgtggtcctcagctaccttgggctcctgtcccaagagaaactccaagagcagcacctctcttcaccacagggagtgcagttagatattgcaagccaaagcctggatcaggagattctgctcaaggtgaagaccgagattgaagaggagctcaaaagcttggataaggaaatctccgaagcttttacatctaccgggttcgaccggcacacttcgcctgtgttctctccagcaaatccagagtcttctatggaggattgtttagcccacctgggggagaaggtgagtcaggaactgaaggagccgcttcacaaagctttgcaaatgctgctttctcaggccctttgtctcgtgctgagtcagcggcgcagaaatacgttggagtccttacaaaagattgccatgacctttactagctgtcctgctacgacactggacaaatccgttcctcagtccctgcaactgtag

SEQ ID NO: 95570 - DNA, 516 bp, Artificial Sequence
  derived and/or modified sequence
atggccagcagcagcacagtgcccctgggcttccactatgagaccaagtatgtggtgctgagctacctgggcctgctgagccaggagaagctgcaggagcagcacctgagcagcccccagggcgtgcagctggacatcgccagccagagcctggaccaggagatcctgctgaaggtgaagacagaaattgaggaggagctgaagagcctggacaaggagatcagcgaggccttcaccagcactggatttgacagacacaccagccctgtgttctccccagccaaccctgagagctccatggaggactgcctggcccacctgggggagaaggtgtcccaggagctgaaggagcccctgcacaaggccctgcagatgctgctgagccaggccctgtgcctggtgctgagccagaggagaagaaacaccctggagagcctgcagaagatcgccatgaccttcaccagctgcccagccaccaccctggacaagtctgtgccccagagcctgcagctgtag

SEQ ID NO: 95571 - DNA, 516 bp, Artificial Sequence
  derived and/or modified sequence
atggccagcagcagcaccgtgcccctgggcttccactacgagaccaagtacgtggtgttgtcatacctcggcctgcttagccaggaaaaactgcaggagcagcatctctcctctcctcaaggagtacagctcgacattgccagtcaaagcctcgaccaagaaatcttgctgaaagtgaaaactgagattgaggaggagcttaagtccctcgacaaggagatcagtgaggcattcacatctaccggattcgatcggcatacgtccccagtgttcagtcccgcaaacccagaaagttctatggaggactgccttgctcatctcggagagaaagtatctcaggagcttaaagaaccactgcacaaagctcttcagatgctgctgtcccaggccctatgcctagtgctgagccaacgcaggagaaataccttggaatctctacagaagatcgcgatgaccttcacctcctgtcctgcaaccacccttgacaaaagcgttccccagtctctccagctgtag

SEQ ID NO: 95572 - DNA, 516 bp, Artificial Sequence
  derived and/or modified sequence
atggccagctcctcaacagtgcccctgggtttccactacgagaccaaatacgttgtattgagttatttaggcctgctcagtcaagaaaagctacaggagcagcatcttagctccccacagggtgtgcaattggatatcgcatcacaatctcttgatcaggaaatcctgttaaaagtgaagaccgagatcgaggaagagcttaagagtttggataaagagatatccgaggcctttacaagcacaggtttcgatcgccacactagtccagtattttcacccgctaaccccgagtctagcatggaagactgtttagcccatctgggagagaaagtgagccaggaattgaaagagcctcttcataaggccctacagatgctcctgtcacaagctctctgcctggtgttgtctcaaaggcggcgaaatactcttgagtcactccagaaaatcgccatgacattcacatcctgccctgccaccactctggataagagtgttccccagtcgctccagctttag

SEQ ID NO: 95573 - DNA, 315 bp, Artificial Sequence
  derived and/or modified sequence
atggccagcagcagcaccgtgcccctgggcttccactacgagaccaagtacgtggtgctgagctacctgggcctgctgagccaggagaagctgcaggagcagcacctgagcagcccccagggcgtgcagctggacatcgccagccagagcctggaccaggagatcctgctgaaggtgaagaccgagatcgaggaggagctgaagagcctggacaaggagatcagcgagggctggagcgccgtggcccccagcagacccaccaccaccagcatcagccaggtgcagatgatcctgctgagccagccccccgagtag

SEQ ID NO: 95574 - DNA, 315 bp, Artificial Sequence
  derived and/or modified sequence
atggcatcatcgtccacagttcctctgggattccattatgaaaccaagtacgtcgtgttgagttacctgggcctgctgtcccaggagaaactgcaagagcagcatcttagcagccctcagggcgtgcaactcgacattgctagccagtccttagaccaggaaatacttctcaaagttaaaacagaaattgaagaggaacttaaatctctcgataaggagattagtgaggggtggtccgctgtggctcccagcaggcctacaacgacatccatcagccaggtacagatgatcctcctcagtcagcctccagagtag

SEQ ID NO: 95575 - DNA, 315 bp, Artificial Sequence
  derived and/or modified sequence
atggccagcagcagcacagtgcccctgggcttccactatgagaccaagtatgtggtgctgagctacctgggcctgctgagccaggagaagctgcaggagcagcacctgagcagcccccagggcgtgcagctggacatcgccagccagagcctggaccaggagatcctgctgaaggtgaagacagaaattgaggaggagctgaagagcctggacaaggagatcagcgagggctggagcgctgtggcccccagccggcccaccaccaccagcatcagccaggtgcagatgatcctgctgagccagcccccagagtag

SEQ ID NO: 95576 - DNA, 315 bp, Artificial Sequence
  derived and/or modified sequence
atggccagcagcagcaccgtgcccctgggcttccactacgagaccaaatacgtggtgttgtcatatctcggtctactttcccaggaaaaactccaggagcagcaccttagtagccctcagggcgtgcagctggatatagctagccagtctctagaccaagagattttactgaaggttaagacggaaattgaagaggagcttaaaagtttggataaggaaatttctgaaggatggagcgccgtagcccctagcagacctactactacttcaataagccaggtacagatgatcctccttagccagccccctgagtag

SEQ ID NO: 95577 - DNA, 315 bp, Artificial Sequence
  derived and/or modified sequence
atggctagttcctcgactgttcccttgggctttcattacgaaaccaaatatgtggtcctgagctatctcggtttattgtcccaagaaaagctgcaggagcagcacctgagttccccccagggtgtacagcttgacatagcatcccaatccttagatcaggagatactgttaaaagtgaagacagaaatcgaagaagaactgaagagcttggacaaggagatcagcgagggttggagtgcagttgcaccatccaggcccactacaacatcaatttcccaggtgcagatgattctgctatcacaaccccctgaatag

SEQ ID NO: 95578 - protein, 506 aa, Artificial Sequence
  derived and/or modified sequence
MRHCINCCIQLLPDGAHKQQVNCQGGPHHGHQACPTCKGENKILFRVDSKQMNLLAVLEVRTEGNENWGGFLRFKKGKRCSLVFGLIIMTLVMASYILSGAHQELLISSPFHYGGFPSNPSLMDSENPSDTKEHHHQSSVNNISYMKDYPSIKLIINSITTRIEFTTRQLPDLEDLKKQELHMFSVIPNKFLPNSKSPCWYEEFSGQNTTDPYLTNSYVLYSKRFRSTFDALRKAFWGHLAHAHGKHFRLRCLPHFYIIGQPKCGTTDLYDRLRLHPEVKFSAIKEPHWWTRKRFGIVRLRDGLRDRYPVEDYLDLFDLAAHQIHQGLQASSAKEQSKMNTIIIGEASASTMWDNNAWTFFYDNSTDGEPPFLTQDFIHAFQPNARLIVMLRDPVERLYSDYLYFASSNKSADDFHEKVTEALQLFENCMLDYSLRACVYNNTLNNAMPVCTPPPRTPRAGPWQKELVCCYYASGIVGLRFSIGTERSVLMCKCCSPLFMDVKAEN

SEQ ID NO: 95579 - protein, 482 aa, Artificial Sequence
  derived and/or modified sequence
MRHCINCCIQLLPDGAHKQQVNCQGGPHHGHQACPTCKGENKILFRVDSKQMNLLAVLEVRTEGNENWGGFLRFKKGKRCSLVFGLIIMTLVMASYILSGAHQELLISSPFHYGGFPSNPSLMDSENPSDTKEHHHQSSVNNISYMKDYPSIKLIINSITTRIEFTTRQLPDLEDLKKQELHMFSVIPNKFLPNSKSPCWYEEFSGQNTTDPYLTNSYVLYSKRFRSTFDALRKAFWGHLAHAHGKHFRLRCLPHFYIIGQPKCGTTDLYDRLRLHPEVKFSAIKEPHWWTRKRFGIVRLRDGLRDRYPVEDYLDLFDLAAHQIHQGLQASSAKEQSKMNTIIIGEASASTMWDNNAWTFFYDNSTDGEPPFLTQDFIHAFQPNARLIVMLRDPVERLYSDYLYFASSNKSADDFHEKVTEALQLFENCMLDYSLRACVYNNTLNNAMPVCTPPPVPPELAPGRRSWFVVIMQAALWVCVSA

SEQ ID NO: 95580 - DNA, 1521 bp, Artificial Sequence
  derived and/or modified sequence
atgaggcattgtattaactgctgcatacagctgttgccagacggggcccacaaacagcaagtaaattgccagggtggaccacaccatggacaccaggcttgcccaacctgcaagggcgaaaataaaatcctattccgagttgacagtaagcagatgaatctgttagctgtgctggaagtgcgaaccgaggggaatgagaattggggaggatttcttcgcttcaaaaaaggtaagagatgtagtttggtctttggactcattattatgacattagtgatggcttcatacatcctgagcggggcgcatcaggaactccttatttcgagtccatttcactatggtggtttcccttctaatccttctctcatggactctgagaatccctccgacacaaaagagcatcaccatcagtcctcagtgaacaacatctcttacatgaaggactaccccagtatcaaactgatcattaattcaatcacaacgcgaatagagttcacgacccgacagctgccggatctggaggacctcaagaagcaagagctgcacatgtttagtgtcatacctaacaagtttttgcctaattcaaagagcccctgttggtacgaggagttctccggacagaatactacagatccctacctaacaaattcttacgttctttattcgaagcgttttcggtcgaccttcgacgctttgcgcaaagcattttgggggcaccttgctcatgctcacggaaagcatttcaggctgagatgcctgccacatttttacatcataggccaacccaagtgcggcactactgacctgtatgacagattacggctccaccccgaggtgaaattcagtgccattaaggaaccgcattggtggaccagaaagaggtttggtatcgtgagactacgcgacgggctcagagataggtacccagttgaagattatcttgatctctttgaccttgcggcacaccagattcatcagggactgcaggcatccagtgctaaagagcagtcaaagatgaataccattataataggcgaggcttccgccagcactatgtgggacaacaacgcatggacattcttttatgataacagcaccgacggtgaacctccttttctgactcaggatttcattcacgcctttcagcctaacgcacgattgatagtaatgctacgagaccctgtcgagaggctctactctgattatctgtacttcgcatcaagcaataagagcgccgatgactttcatgagaaggtcaccgaggcgctgcagcttttcgaaaattgtatgcttgactacagcctcagagcatgcgtgtacaataacaccttgaacaatgctatgcccgtttgcaccccgccacctcgcacacctcgagcagggccctggcagaaagagctcgtgtgctgttactatgcttccggcattgtggggctgagattttctatcggtaccgaacgctccgtgctgatgtgcaagtgttgcagtccactgtttatggacgtgaaggctgagaattag

SEQ ID NO: 95581 - DNA, 1521 bp, Artificial Sequence
  derived and/or modified sequence
atgaggcactgcatcaactgctgcatccagctgctgcctgatggagcccacaagcagcaggtgaactgccagggcggcccccaccacggccaccaggcctgccccacctgcaagggggagaacaagatcctcttccgggtggacagcaagcagatgaacctgctggccgtgctggaggtgaggacagagggcaatgaaaactggggcggcttcctgcgcttcaagaagggcaagcgctgcagcctggtgtttggcctcatcatcatgaccctggtgatggccagctacatcctgagcggggcccaccaggagctgctgatcagcagccccttccactatggaggcttccccagcaaccccagcctgatggattctgagaaccccagcgacaccaaggagcaccaccaccagagctctgtgaacaacatctcctacatgaaggactaccccagcatcaagctgatcatcaacagcatcaccaccagaattgagttcaccacccggcagctgcctgacctggaggacctgaagaagcaggagctgcacatgttttctgtcatccccaacaagttcctgcccaacagcaagagcccctgctggtatgaggagttcagcggccagaacaccacagacccctacctgaccaacagctatgtgctgtacagcaagcgcttccgcagcacctttgatgccctgaggaaggccttctggggccacctggcccacgcccacggcaagcacttccggctgcgctgcctgccccacttctacatcatcggccagcccaagtgtggcaccacagacctgtatgaccggctgcggctgcaccctgaggtgaagttcagcgccatcaaggagccccactggtggaccaggaagagatttggaattgtgcggctgagagatggcctgcgggaccgctaccctgtggaggactacctggacctgtttgacctggccgcccaccagatccaccagggcctgcaggccagcagcgccaaggagcagagcaagatgaacaccatcatcatcggggaggccagcgccagcaccatgtgggacaacaatgcctggaccttcttctatgacaacagcacagatggagagccccccttcctgacccaggacttcatccacgccttccagcccaatgcccggctcatcgtgatgctgcgggaccctgtggagcggctgtacagcgactacctgtactttgccagcagcaacaagtctgcagatgacttccacgagaaggtgacagaggccctgcagctgtttgagaactgcatgctggactacagcctgcgggcctgtgtgtacaacaacaccctgaacaatgccatgcctgtgtgcaccccaccacccaggaccccccgggccggcccctggcagaaggagctggtgtgctgctactatgccagcggcatcgtgggcctgcgcttcagcattggaacagagaggtctgtgctgatgtgcaagtgctgcagccccctcttcatggatgtgaaggcagaaaattag

SEQ ID NO: 95582 - DNA, 1521 bp, Artificial Sequence
  derived and/or modified sequence
atgcggcactgcatcaactgctgcatccagctgctgcccgacggcgcccacaaacagcaggtcaattgtcagggcggacctcaccatggccaccaagcctgccccacttgcaagggagagaataagatcctcttccgcgtagattcaaagcagatgaacctcctcgccgtgctggaggttaggaccgaagggaacgagaactgggggggtttcctccgatttaagaaggggaagcggtgctccctggtttttggtctcataattatgaccttggtgatggcatcttatattctcagtggagcccaccaggaactgctcatttcttccccatttcattatggcggttttccgagcaacccctcactgatggattcagaaaatccatccgacacgaaagaacaccaccatcagtcatctgtgaacaacatttcctatatgaaagattacccgagtattaaactgatcatcaatagtatcaccacacggattgagtttactaccaggcaactgcctgacttagaagatctgaagaaacaggaactccacatgttttctgtgatccctaataagttccttcctaattccaaatcgccctgttggtacgaggagtttagtggccagaatactaccgatccttatttgactaatagttacgtgctttatagtaagcgcttccggagcacatttgatgcgctgcgcaaagctttctggggccacttagcgcacgctcatggcaagcactttagacttagatgcctcccgcacttctacattatcggacagcccaagtgcggcacgacagacctttacgatcgcctcagattgcatcctgaggtgaagtttagtgctattaaggagccacattggtggactcgcaaaaggttcggaatagtgagactcagagatggtctccgcgaccgctaccccgtagaggattatttagatctgtttgaccttgcggctcatcagatccaccagggcctgcaggcctctagcgctaaagagcagagcaagatgaataccattatcatcggcgaagccagtgcctctacaatgtgggacaacaacgcctggaccttcttttatgacaattcaactgatggagaacctccgtttctgactcaggatttcattcatgcttttcaacccaacgctcgcctaatcgtaatgctgcgtgaccctgttgagcggctgtattcggattatctctacttcgcctcttcgaacaaatccgcagacgattttcatgaaaaggtgaccgaggccttgcagctcttcgaaaactgcatgttagactactctttacgcgcttgtgtgtataataacacactgaacaacgctatgcctgtgtgcactccacctccccggacacctagggccggtccttggcagaaagagctcgtgtgctgttattatgcttccggaattgtgggattgcggttttctattggtactgaaagatccgtgcttatgtgcaaatgctgcagtcctttatttatggatgtgaaggccgagaactag

SEQ ID NO: 95583 - DNA, 1521 bp, Artificial Sequence
  derived and/or modified sequence
atgaggcactgcattaactgctgtattcagctgttaccagacggcgcacacaagcaacaggtgaattgtcagggagggccacatcacggccaccaggcctgccccacctgtaaaggtgagaacaaaatattatttagagtggatagtaagcaaatgaacctccttgccgtcctcgaagtgcgtactgagggcaacgagaattgggggggtttcttgcgcttcaagaagggcaaaaggtgtagcctggtgtttgggcttatcatcatgaccctggtgatggccagttacatcctatcaggcgcacaccaggaactgctcataagctcacccttccactacgggggattcccttctaacccatctctcatggactcggagaacccatcagataccaaagaacaccaccatcaatcatctgtgaacaatatctcttatatgaaggattacccttctattaagctgataattaattcaatcacaactcgaatagagttcaccacgagacagctgccagatctagaagacctcaagaagcaggagttgcacatgttctcagtgattcctaataaattcttaccaaactcgaagagcccctgctggtatgaagagttcagcggccaaaatacaaccgacccttatctgactaatagttatgttctttactcaaaacgcttccgatctacctttgatgcgttgagaaaggctttctggggtcacttggcccacgctcacgggaagcactttcgactgaggtgcctgccacacttttacataatcgggcagcccaagtgtggaaccaccgatctgtacgacagactgcgtctccacccagaagtgaaattcagcgcgattaaggagccccactggtggacaaggaagcggtttgggattgtcagactgcgcgacggcttgagggaccgctatcccgttgaggattatttggacctttttgatctggcagcacatcaaattcatcagggcctccaggcctcaagcgccaaagagcagagtaagatgaacacaatcattatcggggaagcttctgcgtctacgatgtgggacaacaatgcttggaccttcttttatgataattctacagatggggaaccccctttcctcacacaggacttcattcacgcctttcagccaaatgcccgtctgatcgtcatgctccgggatcccgttgaaagactctacagtgactacctctatttcgcatccagcaataagtctgccgacgattttcacgaaaaggtgaccgaggctctccagttgtttgagaactgtatgcttgattatagcctccgagcctgcgtgtataacaatacgttgaacaatgctatgccggtatgcacccctcccccaagaacacctcgagctggtccttggcaaaaggaattggtttgctgctattatgcaagcgggatagtcggattacgtttctccatcggtacggagcggtctgtgctcatgtgtaaatgttgctctccactgttcatggatgtgaaagctgaaaattag

SEQ ID NO: 95584 - DNA, 2255 bp, Artificial Sequence
  derived and/or modified sequence
attccagactggagctgatgtgtgtcagcgcgacatggggcggggggagggttctcctcggatgtttcattcgccgtctgcacgtcactcccaaacttttcctcccagcgctcggggagtcaggttgacgcgccctggatgcggggctagaggctcggggctgggcgcgctcccgcggagccggagccgcagaggctcccgggctggactcaggcttctcaggaaatctggcattttttaaagtttgcgccccacaaagaggaaatattccaaaggtactcaggatgtaaaaggggagatcttcacagatgcctccgtggatggcatggcaatccatccatcaatgagaagaccatgatttcttttaattttctgtgtgtttccacattccccagtgagaattcttccacctttttttgtgccatgggaaaaacctgaagggcaggcagagctgctcccgaacttgtgaccttctctgaggttgcagcggctcttgtagaacatgactctgggacatcacttccttttgttttctttcggagctgaaccaaagaatgtgcaccctctttctctagtgctgtggtgtctgcttatttttgtatttgtgctttccatccatcttctgtgatcacaaggcattcttaaggttttctagcacgacttgcggacatccagactcgtggggggcccacccatggctcggtaagccagcagcccagggcactggcactaccatgaggcactgcattaattgctgcatacagctgttacccgacggcgcacacaagcagcaggtcaactgccaagggggcccccatcacggtcaccaggcgtgccccacgtgcaaaggagaaaacaaaattctgtttcgtgtggacagtaagcagatgaacttgcttgctgttctcgaagtgaggactgaagggaacgaaaactggggtgggtttttgcgcttcaaaaaggggaagcgatgtagcctcgtttttggactgataataatgaccttggtaatggcttcttacatcctttctggggcccaccaagagcttctgatctcatcacctttccattacggaggcttccccagcaaccccagcttgatggacagcgaaaacccaagtgacacaaaggagcatcaccaccaatcctctgtaaataatatttcatacatgaaggactatccaagcattaaattaattatcaacagcatcacaactaggattgagttcacgaccagacagctcccagacttagaagaccttaagaagcaggagttgcatatgttttcagtcatccccaacaaattccttccaaacagtaagagcccctgttggtacgaggagttctcggggcagaacaccaccgacccctacctcaccaactcctacgtgctctactccaagcgcttccgctccaccttcgacgccctgcgcaaggccttctggggccacctggcgcacgcgcacgggaagcacttccgcctgcgctgcctgccgcacttctacatcatagggcagcccaagtgcgggaccacagacctctatgaccgcctgcggctgcaccctgaggtcaagttctccgccatcaaggagccacactggtggacccggaagcgctttggaatcgtccgcctaagagatgggctgcgagaccgctatcccgtggaagattatctggacctctttgacctggccgcacaccagatccatcaaggactgcaggccagctctgcaaaggagcagagcaagatgaatacaatcattatcggggaggccagtgcctccacgatgtgggataataatgcctggacgttcttctacgacaacagcacggatggcgagccaccgtttctgacgcaggacttcatccacgcctttcagccaaatgccagactgattgtcatgctcagggaccctgtggagaggttgtactcagactatctctactttgcaagttcgaataaatccgcggacgacttccatgagaaagtgacagaagcactgcagctgtttgaaaattgcatgcttgattattcactgcgcgcctgcgtctacaacaacaccctcaacaacgccatgcctgtgtgtaccccccccccccgtaccccccgagctggcccctggcagaaggagctggtttgttgttattatgcaagcggcattgtgggtttgcgtttcagcataggaacagagagaagcgttttaatgtgcaaatgctgttccccattattcatggatgtaaaagctgaaaactga

SEQ ID NO: 95585 - DNA, 1521 bp, Artificial Sequence
  derived and/or modified sequence
atgagacactgcatcaactgctgcatccagctgctgcccgacggcgcccacaagcagcaggtgaactgccagggcggcccccaccacggccaccaggcctgccccacctgcaagggcgagaacaagatcctgttcagagtggacagcaagcagatgaacctgctggccgtgctggaggtgagaaccgagggcaacgagaactggggcggcttcctgagattcaagaagggcaagagatgcagcctggtgttcggcctgatcatcatgaccctggtgatggccagctacatcctgagcggcgcccaccaggagctgctgatcagcagccccttccactacggcggcttccccagcaaccccagcctgatggacagcgagaaccccagcgacaccaaggagcaccaccaccagagcagcgtgaacaacatcagctacatgaaggactaccccagcatcaagctgatcatcaacagcatcaccaccagaatcgagttcaccaccagacagctgcccgacctggaggacctgaagaagcaggagctgcacatgttcagcgtgatccccaacaagttcctgcccaacagcaagagcccctgctggtacgaggagttcagcggccagaacaccaccgacccctacctgaccaacagctacgtgctgtacagcaagagattcagaagcaccttcgacgccctgagaaaggccttctggggccacctggcccacgcccacggcaagcacttcagactgagatgcctgccccacttctacatcatcggccagcccaagtgcggcaccaccgacctgtacgacagactgagactgcaccccgaggtgaagttcagcgccatcaaggagccccactggtggaccagaaagagattcggcatcgtgagactgagagacggcctgagagacagataccccgtggaggactacctggacctgttcgacctggccgcccaccagatccaccagggcctgcaggccagcagcgccaaggagcagagcaagatgaacaccatcatcatcggcgaggccagcgccagcaccatgtgggacaacaacgcctggaccttcttctacgacaacagcaccgacggcgagccccccttcctgacccaggacttcatccacgccttccagcccaacgccagactgatcgtgatgctgagagaccccgtggagagactgtacagcgactacctgtacttcgccagcagcaacaagagcgccgacgacttccacgagaaggtgaccgaggccctgcagctgttcgagaactgcatgctggactacagcctgagagcctgcgtgtacaacaacaccctgaacaacgccatgcccgtgtgcacccccccccccagaacccccagagccggcccctggcagaaggagctggtgtgctgctactacgccagcggcatcgtgggcctgagattcagcatcggcaccgagagaagcgtgctgatgtgcaagtgctgcagccccctgttcatggacgtgaaggccgagaactag

SEQ ID NO: 95586 - protein, 1100 aa, Artificial Sequence
  derived and/or modified sequence
MSYYQRPFSPSAYSLPASLNSSIVMQHGTSLDSTDTYPQHAQSLDGTTSSSIPLYRSSEEEKRVTVIKAPHYPGIGPVDESGIPTAIRTTVDRPKDWYKTMFKQIHMVHKPDDDTDMYNTPYTYNAGLYNPPYSAQSHPAAKTQTYRPLSKSHSDNSPNAFKDASSPVPPPHVPPPVPPLRPRDRSSTEKHDWDPPDRKVDTRKFRSEPRSIFEYEPGKSSILQHERPASLYQSSIDRSLERPMSSASMASDFRKRRKSEPAVGPPRGLGDQSASRTSPGRVDLPGSSTTLTKSFTSSSPSSPSRAKGGDDSKICPSLCSYSGLNGNPSSELDYCSTYRQHLDVPRDSPRAISFKNGWQMARQNAEIWSSTEETVSPKIKSRSCDDLLNDDCDSFPDPKVKSESMGSLLCEEDSKESCPMAWGSPYVPEVRSNGRSRIRHRSARNAPGFLKMYKKMHRINRKDLMNSEVICSVKSRILQYESEQQHKDLLRAWSQCSTEEVPRDMVPTRISEFEKLIQKSKSMPNLGDDMLSPVTLEPPQNGLCPKRRFSIEYLLEEENQSGPPARGRRGCQSNALVPIHIEVTSDEQPRAHVEFSDSDQDGVVSDHSDYIHLEGSSFCSESDFDHFSFTSSESFYGSSHHHHHHHHHHHRHLISSCKGRCPASYTRFTTMLKHERARHENTEEPRRQEMDPGLSKLAFLVSPVPFRRKKNSAPKKQTEKAKCKASVFEALDSALKDICDQIKAEKKRGSLPDNSILHRLISELLPDVPERNSSLRALRRSPLHQPLHPLPPDGAIHCPPYQNDCGRMPRSASFQDVDTANSSCHHQDRGGALQDRESPRSYSSTLTDMGRSAPRERRGTPEKEKLPAKAVYDFKAQTSKELSFKKGDTVYILRKIDQNWYEGEHHGRVGIFPISYVEKLTPPEKAQPARPPPPAQPGEIGEAIAKYNFNADTNVELSLRKGDRVILLKRVDQNWYEGKIPGTNRQGIFPVSYVEVVKKNTKGAEDYPDPPIPHSYSSDRIHSLSSNKPQRPVFTHENIQGGGEPFQALYNYTPRNEDELELRESDVIDVMEKCDDGWFVGTSRRTKFFGTFPGNYVKRL

SEQ ID NO: 95587 - protein, 1200 aa, Artificial Sequence
  derived and/or modified sequence
MNTDSGGCARKRAAMSVTLTSVKRVQSSPNLLAAGRDSQSPDSAWRSYNDGNQETLNGDATYSSLAAKGFRSVRPNLQDKRSPTQSQITVNGNSGGAVSPMSYYQRPFSPSAYSLPASLNSSIVMQHGTSLDSTDTYPQHAQSLDGTTSSSIPLYRSSEEEKRVTVIKAPHYPGIGPVDESGIPTAIRTTVDRPKDWYKTMFKQIHMVHKPDDDTDMYNTPYTYNAGLYNPPYSAQSHPAAKTQTYRPLSKSHSDNSPNAFKDASSPVPPPHVPPPVPPLRPRDRSSTEKHDWDPPDRKVDTRKFRSEPRSIFEYEPGKSSILQHERPASLYQSSIDRSLERPMSSASMASDFRKRRKSEPAVGPPRGLGDQSASRTSPGRVDLPGSSTTLTKSFTSSSPSSPSRAKGGDDSKICPSLCSYSGLNGNPSSELDYCSTYRQHLDVPRDSPRAISFKNGWQMARQNAEIWSSTEETVSPKIKSRSCDDLLNDDCDSFPDPKVKSESMGSLLCEEDSKESCPMAWGSPYVPEVRSNGRSRIRHRSARNAPGFLKMYKKMHRINRKDLMNSEVICSVKSRILQYESEQQHKDLLRAWSQCSTEEVPRDMVPTRISEFEKLIQKSKSMPNLGDDMLSPVTLEPPQNGLCPKRRFSIEYLLEEENQSGPPARGRRGCQSNALVPIHIEVTSDEQPRAHVEFSDSDQDGVVSDHSDYIHLEGSSFCSESDFDHFSFTSSESFYGSSHHHHHHHHHHHRHLISSCKGRCPASYTRFTTMLKHERARHENTEEPRRQEMDPGLSKLAFLVSPVPFRRKKNSAPKKQTEKAKCKASVFEALDSALKDICDQIKAEKKRGSLPDNSILHRLISELLPDVPERNSSLRALRRSPLHQPLHPLPPDGAIHCPPYQNDCGRMPRSASFQDVDTANSSCHHQDRGGALQDRESPRSYSSTLTDMGRSAPRERRGTPEKEKLPAKAVYDFKAQTSKELSFKKGDTVYILRKIDQNWYEGEHHGRVGIFPISYVEKLTPPEKAQPARPPPPAQPGEIGEAIAKYNFNADTNVELSLRKGDRVILLKRVDQNWYEGKIPGTNRQGIFPVSYVEVVKKNTKGAEDYPDPPIPHSYSSDRIHSLSSNKPQRPVFTHENIQGGGEPFQALYNYTPRNEDELELRESDVIDVMEKCDDGWFVGTSRRTKFFGTFPGNYVKRL

SEQ ID NO: 95588 - DNA, 3603 bp, Artificial Sequence
  derived and/or modified sequence
atgaacaccgacagcggcggctgcgccagaaagagagccgccatgagcgtgaccctgaccagcgtgaagagagtgcagagcagccccaacctgctggccgccggcagagacagccagagccccgacagcgcctggagaagctacaacgacggcaaccaggagaccctgaacggcgacgccacctacagcagcctggccgccaagggcttcagaagcgtgagacccaacctgcaggacaagagaagccccacccagagccagatcaccgtgaacggcaacagcggcggcgccgtgagccccatgagctactaccagagacccttcagccccagcgcctacagcctgcccgccagcctgaacagcagcatcgtgatgcagcacggcaccagcctggacagcaccgacacctacccccagcacgcccagagcctggacggcaccaccagcagcagcatccccctgtacagaagcagcgaggaggagaagagagtgaccgtgatcaaggccccccactaccccggcatcggccccgtggacgagagcggcatccccaccgccatcagaaccaccgtggacagacccaaggactggtacaagaccatgttcaagcagatccacatggtgcacaagcccgacgacgacaccgacatgtacaacaccccctacacctacaacgccggcctgtacaaccccccctacagcgcccagagccaccccgccgccaagacccagacctacagacccctgagcaagagccacagcgacaacagccccaacgccttcaaggacgccagcagccccgtgccccccccccacgtgcccccccccgtgccccccctgagacccagagacagaagcagcaccgagaagcacgactgggacccccccgacagaaaggtggacaccagaaagttcagaagcgagcccagaagcatcttcgagtacgagcccggcaagagcagcatcctgcagcacgagagacccgccagcctgtaccagagcagcatcgacagaagcctggagagacccatgagcagcgccagcatggccagcgacttcagaaagagaagaaagagcgagcccgccgtgggcccccccagaggcctgggcgaccagagcgccagcagaaccagccccggcagagtggacctgcccggcagcagcaccaccctgaccaagagcttcaccagcagcagccccagcagccccagcagagccaagggcggcgacgacagcaagatctgccccagcctgtgcagctacagcggcctgaacggcaaccccagcagcgagctggactactgcagcacctacagacagcacctggacgtgcccagagacagccccagagccatcagcttcaagaacggctggcagatggccagacagaacgccgagatctggagcagcaccgaggagaccgtgagccccaagatcaagagcagaagctgcgacgacctgctgaacgacgactgcgacagcttccccgaccccaaggtgaagagcgagagcatgggcagcctgctgtgcgaggaggacagcaaggagagctgccccatggcctggggcagcccctacgtgcccgaggtgagaagcaacggcagaagcagaatcagacacagaagcgccagaaacgcccccggcttcctgaagatgtacaagaagatgcacagaatcaacagaaaggacctgatgaacagcgaggtgatctgcagcgtgaagagcagaatcctgcagtacgagagcgagcagcagcacaaggacctgctgagagcctggagccagtgcagcaccgaggaggtgcccagagacatggtgcccaccagaatcagcgagttcgagaagctgatccagaagagcaagagcatgcccaacctgggcgacgacatgctgagccccgtgaccctggagcccccccagaacggcctgtgccccaagagaagattcagcatcgagtacctgctggaggaggagaaccagagcggcccccccgccagaggcagaagaggctgccagagcaacgccctggtgcccatccacatcgaggtgaccagcgacgagcagcccagagcccacgtggagttcagcgacagcgaccaggacggcgtggtgagcgaccacagcgactacatccacctggagggcagcagcttctgcagcgagagcgacttcgaccacttcagcttcaccagcagcgagagcttctacggcagcagccaccaccaccaccaccaccaccaccaccaccacagacacctgatcagcagctgcaagggcagatgccccgccagctacaccagattcaccaccatgctgaagcacgagagagccagacacgagaacaccgaggagcccagaagacaggagatggaccccggcctgagcaagctggccttcctggtgagccccgtgcccttcagaagaaagaagaacagcgcccccaagaagcagaccgagaaggccaagtgcaaggccagcgtgttcgaggccctggacagcgccctgaaggacatctgcgaccagatcaaggccgagaagaagagaggcagcctgcccgacaacagcatcctgcacagactgatcagcgagctgctgcccgacgtgcccgagagaaacagcagcctgagagccctgagaagaagccccctgcaccagcccctgcaccccctgccccccgacggcgccatccactgccccccctaccagaacgactgcggcagaatgcccagaagcgccagcttccaggacgtggacaccgccaacagcagctgccaccaccaggacagaggcggcgccctgcaggacagagagagccccagaagctacagcagcaccctgaccgacatgggcagaagcgcccccagagagagaagaggcacccccgagaaggagaagctgcccgccaaggccgtgtacgacttcaaggcccagaccagcaaggagctgagcttcaagaagggcgacaccgtgtacatcctgagaaagatcgaccagaactggtacgagggcgagcaccacggcagagtgggcatcttccccatcagctacgtggagaagctgaccccccccgagaaggcccagcccgccagaccccccccccccgcccagcccggcgagatcggcgaggccatcgccaagtacaacttcaacgccgacaccaacgtggagctgagcctgagaaagggcgacagagtgatcctgctgaagagagtggaccagaactggtacgagggcaagatccccggcaccaacagacagggcatcttccccgtgagctacgtggaggtggtgaagaagaacaccaagggcgccgaggactaccccgacccccccatcccccacagctacagcagcgacagaatccacagcctgagcagcaacaagccccagagacccgtgttcacccacgagaacatccagggcggcggcgagcccttccaggccctgtacaactacacccccagaaacgaggacgagctggagctgagagagagcgacgtgatcgacgtgatggagaagtgcgacgacggctggttcgtgggcaccagcagaagaaccaagttcttcggcaccttccccggcaactacgtgaagagactgtag

SEQ ID NO: 95589 - DNA, 4622 bp, Artificial Sequence
  derived and/or modified sequence
ttttattacgtctctccttgtggattacgtagaactttggaaaattaaacattagacatcttcatagaaaatcatgtcactgatttttaaagccagctcaatttaacctgccactgattccctaaccagctcttctctgactgtatcccgagggaaaatgtattgaacgcagcagaaggttaaggcagaggagttcggctagaccgggtagcagccaatcagatggggagggtccaaggatctgatgcctccaggcgagcagcgccaagctgagctggttagtctccttttattgtggatgaacaccacgtacatgccgtaaatgctccctaggctggctgcggctacaaggcagacccgggagctgagaatagaggaatacctgcccaagcaactcattctgcacagcagccgacaagacagcgattttcctgtgctggaatgtgcccatccaaagccaaccaatttgttggaaaatcagtcaaaatctaattttgatgttctgcaagttccctgggggccatgaagcacctgacacttggattggacttaatcttaaacctctggagttcaagaccttttaaaaagggctaaataaacaatctctacatgtaaaaggccactgactcctacttcctctgtatagagcaactgttgaactcagctgcctgtaggaaaactgaagactttaataacaaactctccaaggtgaaaatgaacacagatagcggtgggtgtgctcgcaaacgtgccgccatgtctgttacgctaacatctgtgaagagagtgcaaagttctccaaacctattggctgcagggcgtgattctcagtcaccagactcagcttggagatcttacaatgatggcaatcaggagacactgaacggagatgctacatattcctctcttgcagcaaaaggttttagaagcgttcgaccaaacctacaagataaaagatcaccaactcagagccagataacagtgaatggaaactcaggaggtgccgtgagtcccatgagttactatcagaggccgttttccccctcggcatattctctcccagcctcactcaactccagcattgtcatgcagcacggcacatccctcgattccacagacacatatccccagcatgcgcagtctctggatggcaccaccagcagctctatccccctgtaccgatcctcagaggaagagaagagagtgacagtcatcaaagccccgcattacccagggatcgggcccgtggatgaatccggaatccccacagcaattagaacgacagtcgaccggcccaaggactggtacaagacgatgtttaagcaaattcacatggtgcacaagccggatgatgacacagacatgtataatactccttatacatacaatgcaggtctgtacaacccaccctacagtgctcagtcacaccctgctgcaaagacccaaacctacagacctctttccaaaagccactccgacaacagccccaatgcctttaaggatgcgtcctccccagtgcctcccccacatgttccacctccagtcccgccgcttcgaccaagagatcggtcttcaacagaaaagcatgactgggatcctccagacagaaaagtggacacaagaaaatttcggtctgagccaaggagtatttttgaatatgaacctggcaagtcatcaattcttcagcatgaaagaccagcctccttgtatcagtcctctatagacagaagcctggaaagacccatgagttctgcaagcatggccagtgacttcaggaagcggaggaagagcgagcctgcagtgggtccaccacggggcttgggagatcaaagtgcgagcaggactagcccaggccgagtggacctcccaggatcaagcaccactcttacaaagtctttcactagctcttctccttcttccccatcaagagcaaaaggtggggatgatagcaaaatatgtccatccctttgcagttactcagggctcaacggcaacccctccagtgagttagattactgtagcacttacagacagcacttggatgtccctcgggactcaccaagagccattagtttcaagaacggctggcaaatggcccggcaaaacgcagaaatctggagcagcacggaagaaaccgtctctcccaaaatcaaatcccggagctgtgacgatctcctaaacgacgactgcgatagcttcccggacccgaaagtcaagtcggaaagcatgggctccctgttatgtgaggaggactccaaggagagctgccccatggcgtgggggtccccctacgtcccggaggttcgcagtaacggcagatcaaggatcagacacaggtcagcccgcaacgccccggggttcctgaagatgtacaagaaaatgcaccgcatcaaccgcaaggacctgatgaactccgaggtgatctgctccgtgaagtccaggattctgcagtacgagagcgagcagcagcacaaggacctgctgcgcgcctggagccagtgctccacggaggaggtgccccgggacatggtgcccacacgcatctccgaattcgaaaagctgatccagaagtccaaatccatgccaaatttaggggatgacatgctgtctcccgtaaccctagaaccaccgcaaaatggcctatgtcccaagaggcggttttccattgagtatttgctggaggaagaaaatcaaagcggcccccccgctcggggccggcgaggctgccagtctaacgccctggtgcccattcacattgaagtcaccagcgatgagcagccccgagcacacgtggagttttccgacagcgaccaggacggggttgtgtccgaccacagtgactacattcacctagaggggtcatccttctgcagtgaaagtgactttgatcacttttccttcacatcctccgaaagcttttacggatccagccaccaccaccaccatcaccaccaccaccaccaccgccacctcatcagctcctgcaaaggcaggtgcccggcctcctacactcgatttaccacaatgttaaaacacgaaagagccagacacgaaaacaccgaggagcccagaaggcaagaaatggaccctggcctttctaaacttgcttttctagtcagtcctgtgcctttccggaggaaaaaaaattcggctcctaagaaacagactgaaaaggcaaaatgtaaagcatctgtgtttgaggctctggactctgcccttaaagacatctgtgaccaaattaaagctgaaaagaaaagggggagcttgccggacaacagcatcctgcaccgcctcatcagtgagctgctgccagatgttcccgagaggaactcatccctgagagcgctgaggaggagccccctgcaccagcctctccacccactgcctcccgatggtgctattcattgtccaccctaccagaatgactgcgggagaatgccccgcagtgcctctttccaagacgtggacacagccaacagcagctgccaccaccaagaccgtggcggtgcactccaagaccgtgagtcccctagaagttactcatccactttgactgacatggggagaagtgcaccaagggaaagaagaggaactccagaaaaagagaaattgcctgcaaaagctgtttatgattttaaggctcagacatctaaggagttgtcatttaagaaaggagatactgtctacatcctcaggaaaattgatcaaaattggtatgagggagaacaccacgggagagtgggcatcttcccgatctcatacgtagagaaactcacacctcctgagaaagcacagcctgcaagaccacctccgccagcccagcccggagaaatcggagaagctatagccaaatacaacttcaacgcagacacaaatgtggagctgtcactgagaaagggagatagagttattcttcttaaaagagttgatcaaaactggtatgaaggtaaaatcccaggaaccaacagacaaggcatcttccctgtttcctatgtggaggtcgtcaagaagaacacaaaaggtgctgaggactaccctgaccctccaataccccacagctattctagtgataggattcacagcttgagctcaaataagccacagcgtcctgtgtttactcatgaaaatattcaaggtgggggggaaccgtttcaggctctgtataactatactcccaggaatgaagatgagctggagctcagagaaagtgatgtcattgatgtcatggaaaagtgtgatgacggctggtttgtggggacctcaagaagaaccaaattctttggtactttccccggaaactacgtcaagaggctgtgaattgcgctccctccttctgtagaggccgcctgccagccatgcacctgcgtcaacgcgcctgaaacaccccgcgggcctcccgttgtcatgccttacggtttccaatgcgccgtcaccatctccacctgccaccaaaccaccagcagagtagccgccgctgctgtgagcctggggacgacatggcaggctggtccccctccgtgaaagtgtggattcctacttcctgctctaagctttgacacgtcaaaatgtgggatcagaaagaaaaaaatcatgatatttaaaaatggtcaaatatttgaggc

SEQ ID NO: 95590 - DNA, 3303 bp, Artificial Sequence
  derived and/or modified sequence
atgtcctattatcagcgcccgttttcacctagtgcatacagtctcccagcttcacttaattctagtattgtcatgcagcacggaaccagcctcgactctacggacacttaccctcaacatgcacaatctctagatggcacaacatccagctcaattcccctctatcgctcatcagaagaggaaaaaagagtgaccgtaatcaaagccccgcactacccaggcattggccctgtggacgaatctggcattccaaccgcgattagaacaactgtggacaggcctaaggactggtacaagaccatgttcaagcagatccatatggtccacaagcctgacgatgacaccgacatgtacaacactccatatacgtacaatgcaggactgtacaatcccccctattcggcacagagccacccagccgctaaaacgcagacctaccgacctcttagtaaatcacatagcgataatagcccgaacgcatttaaagatgctagctccccagtgccccctcctcacgtgcccccacccgttccgcccctgaggccgcgggaccgctcatccactgagaaacacgactgggaccctcccgatcggaaggttgatactcgaaagttcagatccgagccgagatctatcttcgagtacgaacccggcaaaagcagcattctgcaacacgaaagaccagcatctttgtatcagtccagcattgacaggagcctggaaaggcccatgagtagcgccagtatggcctccgactttcgaaaacggagaaaatccgagccagcggtcggccctcccaggggcctaggtgatcagagtgcatccagaacgagccctgggagagttgacctcccaggctcaagcactaccctgacgaagtctttcacatcatctagtccctccagccctagcagggctaagggcggtgacgattctaagatttgcccaagcctgtgcagttattctggactgaacgggaaccccagcagtgaactcgactactgttccacctacagacagcacctcgatgtgccccgagacagcccacgcgccatcagcttcaagaacgggtggcaaatggcgaggcagaatgccgagatctggagttccaccgaggaaactgtgtcgcccaagataaaatcgcggtcttgcgacgacctgctcaacgacgattgcgattcatttcccgatccgaaagtaaagtctgaatccatgggcagcctgttatgcgaagaagattctaaggagtcatgcccaatggcctggggatcaccatacgtacctgaagttcggtccaatggacgttctcgtattcgccaccggtcggccaggaacgcacccggattcctgaaaatgtacaaaaagatgcaccgaataaatcgcaaggacctaatgaatagcgaagtgatctgctctgtgaagagcagaattcttcagtatgagagcgaacagcagcacaaagaccttctgcgagcatggagccagtgttcgacagaggaggtacccagggatatggttcccacccgtatttccgaattcgagaagcttatacagaaatcaaaaagtatgcccaacctgggcgacgatatgctgagcccggtgactctagagccaccccagaatggtttgtgtccgaagcgcaggttcagcatagaatacttgcttgaggaagaaaatcaaagtggccctcctgcccgtggcaggaggggctgtcagagcaacgctctggttcccatccatatagaggtcacctccgacgagcagccacgggcccacgtggagttcagcgacagcgaccaagacggtgtagtgagcgaccattccgactatatccacctggaagggtcttccttctgtagcgagagcgactttgatcatttcagctttacatcttcagaatccttttacgggtcttcacatcatcatcatcaccaccatcaccatcaccaccggcacctaattagcagttgtaagggcaggtgccctgctagctacacccgcttcaccacgatgctcaagcacgagcgagctagacatgagaatactgaagagccccgccggcaggagatggaccccgggctctctaagttggccttcctggtgtcgcccgtcccctttagacgcaaaaaaaactccgctccaaaaaaacaaaccgagaaggccaagtgcaaggcttcagtctttgaggctctggacagtgcactgaaagacatctgtgaccagatcaaggcagaaaagaagaggggaagccttcctgacaactctatactgcaccgtcttatatccgagcttcttccagacgtgccagaaaggaattctagcttgcgggcgctgagaagatcccccctgcaccagcctctgcacccactacctccagatggcgccatccactgtcctccataccagaatgactgtggacgcatgcctcggtctgcttcgttccaagatgttgacacagcaaatagtagttgtcaccatcaggatcgggggggcgcactccaggacagggagtccccccggagctattcgagcaccttgacggatatggggaggtccgctccccgcgaaagacggggaacgcctgagaaagagaaacttccagccaaagctgtctacgactttaaggcccagacgagtaaagagctatcttttaaaaagggtgacacagtgtacattctaaggaagatcgatcaaaattggtatgaaggggaacatcacggccgcgtcggaatattccctatcagctacgtggaaaaattgactccccccgaaaaagcccagccagcccgaccacccccccctgctcaacccggggaaatcggagaagctatcgccaagtataattttaatgcagacaccaacgtggaattatctctgcggaaaggtgatcgagttatcttactcaaaagagtggatcagaactggtacgagggcaaaattcctggaactaatcgacagggcatttttccggtcagctatgtggaggtggtaaagaagaacaccaagggagcagaggattatccagaccccccaataccacatagctacagcagcgaccgaatccactccctgtcctcaaataaaccgcagagacctgtgttcacccatgagaacattcagggtgggggagaaccattccaggccctatacaactatactccaagaaacgaagatgagctggaactcagagaaagtgacgtgatcgatgtgatggagaagtgcgatgatgggtggtttgtggggacctctcggagaaccaagttcttcggcacgttccccggcaactatgtcaagcgactgtag

SEQ ID NO: 95591 - DNA, 3603 bp, Artificial Sequence
  derived and/or modified sequence
atgaacaccgactccggcggatgtgctaggaagagggctgcaatgagtgttaccctgacatctgtgaaacgggtacagtcaagccccaacttactggcggccgggagagatagccagagccccgactctgcatggaggtcctataacgatggcaatcaagaaacattgaacggagacgccacttactctagcctggccgcgaagggattccgatctgtccggcctaatcttcaggacaagcgaagccctactcaatcccaaattaccgtgaacggcaacagtggcggagccgtgagcccaatgtcctattatcagcgaccttttagcccttcagcttacagcttgccggcatctcttaatagcagtattgtgatgcagcatggaacttccctggattctaccgatacatacccccagcatgcacagtccctggatggcaccacttcttcaagcattccactctacaggagttctgaggaggagaagcgtgtcacggtcataaaggccccccattatcctggcataggtccagttgacgaatcagggatacctacagcaatcagaactaccgtcgaccgcccgaaagattggtataagactatgttcaagcaaattcacatggtgcacaagcctgatgacgataccgacatgtacaacacgccatacacttacaacgccgggttgtataaccctccgtactccgctcagagtcaccccgccgcaaagactcagacatataggccactgagcaagtctcacagcgacaatagtccgaacgcctttaaagacgcctcctcaccagtgcctccccctcacgtcccgccccccgtgcccccattaaggccccgcgatcggagcagtactgaaaagcatgactgggatcccccggacagaaaggtggatacacgcaagtttcgcagtgaacctaggtctattttcgagtacgagcctggtaagagcagtattttacagcacgagcgccccgctagcctgtaccagtccagcattgatcgatccctcgagcggccaatgtccagcgcatctatggcgtcagatttcagaaaacgccggaaatccgagccagcggttgggcctccaagaggcttgggcgaccaatcggccagtcggacttctcctggccgcgtcgacctccctggctcatcaacaactctcactaagtcctttacctcatcttcaccttcatcgccttctcgcgccaaaggaggagacgattccaaaatatgcccttctctgtgcagttactcgggcctcaacggcaaccctagctcagaactcgattactgtagcacatataggcaacaccttgatgtgccacgagactctccaagagcaatctctttcaagaacggttggcagatggcaaggcaaaacgcagagatttggagttccaccgaggaaacggtgagccctaagatcaaatcccgctcatgcgacgaccttttgaacgacgactgcgactcattccctgatccaaaggtgaagtctgagtctatggggtccctcctgtgcgaggaggattcaaaagaaagttgtcctatggcctgggggtctccttacgtgcccgaggtccgcagtaatggacgcagcaggatcagacaccgctctgcgaggaatgcccctggattcttgaagatgtataagaaaatgcatcgaattaatagaaaagacctcatgaactccgaggttatatgctcagtgaagagccgcattctgcagtatgaaagcgaacagcagcataaggatctcttaagggcctggtcacagtgttccactgaagaagtgcctcgagatatggtacctacgcgtatctcggagtttgaaaaactgattcagaagagtaaatctatgccgaacctgggtgacgatatgttgtctcccgtaacactcgagccgccacagaacggcctctgtcccaaacgaaggttctcgatcgagtatctgcttgaagaggagaatcagtccggcccccctgcacgcggccgcagagggtgccaatccaacgccctggttccaattcacatcgaggtcacttcagacgaacagccgagggcccacgtggagtttagtgatagcgatcaggacggagtcgtgagcgaccattccgactacatccacttggagggatcaagtttctgtagtgagagtgatttcgatcatttctcttttacttcctcagaatctttttacggcagcagccatcaccaccaccaccaccatcaccaccaccatcggcacttgatttcttcctgcaaaggtagatgccccgccagctacacgaggttcactacaatgcttaagcatgagagagcgcggcatgagaacaccgaggaacccagaaggcaggagatggaccctggactgtctaaactggcatttctggtgagtccggtcccgttcagaaggaagaagaacagcgccccgaaaaagcagaccgaaaaggctaaatgtaaagctagcgtgttcgaagccctcgatagtgccttaaaagacatctgcgatcagattaaagctgagaagaaacgcggcagtctgccagataactcaattctacaccgccttattagcgagctcctgcccgacgtgcccgagagaaattctagtctgcgagcattaaggcgctcaccacttcaccagccactgcacccgctaccacctgacggcgccatccattgccccccgtatcaaaatgattgcgggcggatgccccgaagcgcctcattccaagatgtagatactgctaattcgtcatgccaccatcaagaccgaggaggagccctgcaggacagagagtcccctcgctcttattcctctaccttgacagacatgggtcgcagtgcacccagagagagacggggaaccccagagaaggagaagctccctgctaaagccgtgtatgatttcaaagcccagacatccaaggagctgagttttaagaaaggcgacacggtgtacattctgcgtaaaattgatcagaactggtacgaaggcgagcaccacggcagggtaggtattttcccaatctcctacgttgagaagctcacaccgccagaaaaagcccagcccgctcgccctccaccccctgcgcagcctggtgagataggagaagccatagccaaatacaacttcaatgccgacacaaatgtcgagttgtctctgagaaagggggatcgagtcatacttctgaagcgcgtggaccagaactggtatgaggggaaaattcccggaactaatcgccaaggcatattcccagtcagctatgtcgaagtcgttaagaaaaataccaagggggcagaagactaccccgaccccccgattccacacagctattctagtgatcgaatccattccctcagctcgaacaagccacagaggccagtgtttacccacgaaaatatacagggcggcggggagccctttcaagcactgtataactacacaccaagaaatgaggacgagctggagctgcgagagagcgacgtgattgacgtgatggaaaagtgtgacgacggatggtttgttggaaccagtaggcgcactaagtttttcggcacctttccaggcaattatgtgaagagattgtag

SEQ ID NO: 95592 - DNA, 3303 bp, Artificial Sequence
  derived and/or modified sequence
atgtcgtactaccagcgtcccttttccccctctgcttactcactaccggcaagtttgaattcaagcatagtcatgcaacatggaacaagcctagactcgaccgatacgtaccctcagcacgcccagtcgttggacgggaccacctcttcctctatccccctgtaccgcagtagcgaagaggaaaagagagtgaccgtgatcaaggcacctcattaccccgggatcggccctgtcgacgagtcaggtatcccaacagctatccggaccactgtggaccgcccaaaagattggtataaaaccatgtttaagcagatacatatggtgcataaacctgatgatgatacagacatgtataacacaccttatacttataacgctggactctataatccaccatacagtgcccagagccaccccgccgctaagacgcagacctataggcctttaagcaagagccacagcgacaatagcccaaacgcatttaaagacgcttccagcccggtgcccccaccacatgtgcccccacctgtaccacccttacgcccgagggacagatctagcacggagaagcacgactgggaccctcctgataggaaggttgatacacggaaattccgtagcgaaccccggagcatctttgagtatgagcccggaaaaagtagcattctccaacacgaacgacccgcaagtttataccagagctctattgatagaagtctggagcgccctatgagcagtgcctctatggctagcgatttcagaaaaagaaggaaatccgaacctgctgtcggccccccccgtggtttaggtgaccagtcggcgtccagaacctcccctggccgggtagaccttcccggaagttccaccactctcaccaagagttttacctcaagtagcccttcctccccgagtagggctaaagggggagatgatagcaagatatgtcctagcctctgttcttactcaggcctaaatggaaacccctccagtgagctggactactgctctacctatcgtcagcacctggatgtaccgcgggattctccccgtgccatcagctttaaaaatggatggcagatggcgagacagaatgccgagatctggtctagcactgaggaaacggtttcccccaagatcaagagtcggtcgtgtgacgatctcctcaatgatgactgcgactcgtttcctgaccctaaggtgaaaagcgaatcaatgggttcactcctctgcgaggaagacagcaaggaatcatgccccatggcctgggggagtccctacgtccctgaagtgcgatccaatggaagatctcgcatccggcatagatctgccaggaatgctccagggtttctcaaaatgtacaaaaagatgcacaggattaatagaaaagacctgatgaactctgaagtgatttgtagtgtcaaatcacggattctgcagtacgaaagtgagcagcaacataaggatttactgagagcttggtctcagtgtagcacggaagaggttccccgggatatggtgcctactcgtataagtgaatttgaaaaattgatacaaaaaagtaaatctatgcctaatctcggagatgatatgctaagcccagtcactctggaaccccctcaaaatggcctgtgcccgaaacgtaggttttccattgagtacctactggaagaggagaatcagtctggcccacctgcacgcgggagaaggggttgtcagagcaacgccttagttccaatccacattgaggtgacgtccgacgagcaaccccgcgcacacgtggagtttagcgatagtgaccaagacggcgtagtatcagaccactccgattatatacacctagaaggcagctctttttgcagtgaaagtgactttgatcacttttcttttacgagcagtgagtcattttatggaagttctcaccatcaccatcaccaccaccaccaccaccacagacatttgattagcagctgtaaaggccggtgtccagcctcctacactcgatttacaaccatgctcaaacacgagcgcgcccggcacgagaataccgaggagcctcgcaggcaggagatggaccctggtctttcgaagttagccttcctagtgagcccagttcctttccgcaggaagaaaaattctgctccaaagaagcagactgagaaggctaagtgtaaagcctccgtgtttgaggcacttgatagcgcgttaaaggatatctgcgatcagataaaggctgaaaaaaagagaggctcattgcccgataacagtatattacacaggctgatcagcgagctgcttcctgatgttcctgagagaaactccagtctgagagccctgcggcgctcgccactgcatcaacccctgcaccccttgccacccgatggtgctattcattgtcccccataccagaacgactgtggaagaatgcctcggtccgctagctttcaggacgtagatacagcaaactccagttgccatcatcaggatcgtgggggggcactacaagacagagagtccccgcggtcatatagtagtaccctgaccgacatgggccgatcagctcccagggaacgccggggaacgcccgaaaaggagaaactgccagccaaggccgtttatgattttaaagcccaaacatccaaggagctttcattcaaaaaaggcgacactgtgtacattttgcgcaagattgatcaaaattggtacgagggggagcaccacggaagggtggggatctttcccatttcctatgtggagaaattgactccgcccgagaaggcccaacccgcgcggcccccaccgcctgcccagccaggggagattggcgaggccatcgcaaagtacaatttcaacgccgatacaaacgtcgaactcagtcttaggaagggagatcgggtgattctcctgaagcgggtggaccagaactggtatgagggaaaaatcccaggcacaaacaggcaggggatctttcccgtatcctatgtggaagtggtgaaaaagaatacaaaaggagccgaggactatcccgacccgcctatacctcatagttacagcagtgaccgcatccacagcctcagttccaataagccacaaaggcccgtcttcacccatgagaacatccagggtgggggagaaccgttccaggctctgtacaactacacaccaagaaacgaagatgagctcgaactgagagagtccgatgtcatagacgtcatggaaaaatgtgatgacggatggtttgtcggcacgtcccgccgcacgaagtttttcggaaccttccctggcaattatgtcaaaagactgtag

SEQ ID NO: 95593 - DNA, 3303 bp, Artificial Sequence
  derived and/or modified sequence
atgagctactaccagaggcccttcagccccagcgcctacagcctgcctgccagcctgaacagcagcatcgtgatgcagcacggcaccagcctggacagcacagacacctacccccagcacgcccagagcctggatggcaccaccagcagcagcatccccctgtaccgcagcagcgaggaggagaagagggtgaccgtcatcaaggccccccactacccaggcatcggccctgtggatgaaagtggcatccccacagccatccgcaccaccgtggaccggcccaaggactggtacaagaccatgttcaagcagatccacatggtgcacaagccagatgatgacacagacatgtacaacaccccctacacctacaatgccggcctgtacaaccccccctacagcgcccagagccaccctgctgccaagacccagacctaccggcccctgagcaagagccacagcgacaacagccccaatgccttcaaggatgccagcagccctgtgcccccaccccacgtgcccccacctgtgccccccctgcggccccgggacaggagcagcacagagaagcatgactgggaccccccagacaggaaggtggacaccaggaagttccgctctgagcccaggagcatctttgaatatgagcccgggaagagcagcatcctgcagcacgagaggcctgccagcctgtaccagagcagcattgacaggagcctggagcggcccatgagcagcgcctccatggccagtgacttcaggaagaggaggaagtctgagcctgctgtgggccccccccggggcctgggggaccagagcgccagcaggaccagccctggccgggtggacctgcccggcagcagcaccaccctgaccaagagcttcaccagcagcagccccagcagccccagccgggccaagggaggagatgacagcaagatctgccccagcctgtgcagctacagcggcctgaatggaaaccccagcagcgagctggactactgcagcacctaccggcagcacctggatgtgccccgggacagcccccgggccatctccttcaagaatggctggcagatggcccggcagaatgctgagatctggagcagcacagaggagaccgtgagccccaagatcaagagccgcagctgtgatgacctgctgaatgatgactgtgacagcttcccagaccccaaggtgaagtctgagagcatgggcagcctgctgtgtgaggaggacagcaaggagagctgccccatggcctggggcagcccctacgtgcctgaggtgcgcagcaatggccgcagccgcatccgccacaggtctgccagaaatgcccctggcttcctgaagatgtacaagaagatgcaccgcatcaacaggaaggacctgatgaacagcgaggtgatctgcagcgtgaagagccgcatcctgcagtatgagagcgagcagcagcacaaggacctgctgcgggcctggagccagtgcagcacagaggaggtgccccgggacatggtgcccacccgcatcagcgagtttgagaagctgatccagaagagcaagtccatgcccaacctgggagatgacatgctgagccctgtgaccctggagcccccccagaatggcctgtgccccaagaggcgcttcagcattgagtacctgctggaggaggagaaccagagcggccccccagcccggggccggcggggctgccagagcaatgccctggtgcccatccacatcgaggtgaccagtgatgagcagccccgggcccacgtggagttcagtgacagcgaccaggatggagtggtgtctgaccacagcgactacatccacctggagggcagcagcttctgcagcgagagtgactttgaccacttctccttcaccagcagcgagagcttctacggcagcagccaccaccaccaccaccaccaccaccaccaccaccgccacctgatcagcagctgcaagggccgctgcccagccagctacacccgcttcaccaccatgctgaagcatgagcgggcccggcatgagaacacagaggagccccggcggcaggagatggaccccggcctgagcaagctggccttcctggtgtcccctgtgcccttccggaggaagaagaacagcgcccccaagaagcagacagagaaggccaagtgcaaggcctctgtgtttgaggccctggacagcgccctgaaggacatctgtgaccagatcaaggccgagaagaagaggggcagcctgcctgacaacagcatcctgcacaggctcatcagcgagctgctgcctgatgtgcctgagaggaacagcagcctgcgggccctgcggcgcagccccctgcaccagcccctgcaccccctgcccccagatggagccatccactgccccccctaccagaatgactgtggccgcatgcccaggtctgccagcttccaggatgtggacacagccaacagcagctgccaccaccaggaccggggcggggccctgcaggaccgggagagccccaggagctacagcagcaccctgacagacatgggccgcagcgccccccgggagcggcggggcaccccagagaaggagaagctgcctgccaaggctgtgtatgacttcaaggcccagaccagcaaggagctgtccttcaagaagggggacacagtgtacatcctgaggaagattgaccagaactggtatgaaggagagcaccacggccgggtgggcatcttccccatctcctatgtggagaagctgaccccacctgagaaggcccagcctgcccggcccccacctccagcccagcctggagagatcggggaggccatcgccaagtacaacttcaatgctgacaccaacgtggagctgagcctgaggaaaggagacagagtcatcctgctgaagagggtggaccagaactggtatgagggcaagatccctggcaccaaccggcagggcatcttccctgtgtcctatgtggaggtggtgaagaagaacaccaagggagctgaggactacccagacccccccatcccccacagctacagcagtgaccgcatccacagcctgagcagcaacaagccccagaggcctgtgttcacccatgagaacatccagggcggcggggagcccttccaggccctgtacaactacaccccaagaaatgaagatgagctggagctgcgggagagtgatgtgattgatgtgatggagaagtgtgatgatggctggtttgtgggcaccagcaggaggaccaagttcttcggcaccttccctggcaactacgtgaagaggctgtag

SEQ ID NO: 95594 - DNA, 3603 bp, Artificial Sequence
  derived and/or modified sequence
atgaacacagattctgggggctgtgccaggaagagagctgccatgtctgtgaccctgacctctgtgaagagggtgcagagcagccccaacctgctggccgccggccgggacagccagagcccagattctgcctggaggagctacaatgatggcaaccaggagaccctgaatggagatgccacctacagcagcctggccgccaagggcttccgctctgtgcggcccaacctgcaggacaagaggagccccacccagagccagatcaccgtgaatggaaacagcggcggcgctgtgagccccatgagctactaccagaggcccttcagccccagcgcctacagcctgcctgccagcctgaacagcagcatcgtgatgcagcacggcaccagcctggacagcacagacacctacccccagcacgcccagagcctggatggcaccaccagcagcagcatccccctgtaccgcagcagcgaggaggagaagagggtgaccgtcatcaaggccccccactacccaggcatcggccctgtggatgaaagtggcatccccacagccatccgcaccaccgtggaccggcccaaggactggtacaagaccatgttcaagcagatccacatggtgcacaagccagatgatgacacagacatgtacaacaccccctacacctacaatgccggcctgtacaaccccccctacagcgcccagagccaccctgctgccaagacccagacctaccggcccctgagcaagagccacagcgacaacagccccaatgccttcaaggatgccagcagccctgtgcccccaccccacgtgcccccacctgtgccccccctgcggccccgggacaggagcagcacagagaagcatgactgggaccccccagacaggaaggtggacaccaggaagttccgctctgagcccaggagcatctttgaatatgagcccgggaagagcagcatcctgcagcacgagaggcctgccagcctgtaccagagcagcattgacaggagcctggagcggcccatgagcagcgcctccatggccagtgacttcaggaagaggaggaagtctgagcctgctgtgggccccccccggggcctgggggaccagagcgccagcaggaccagccctggccgggtggacctgcccggcagcagcaccaccctgaccaagagcttcaccagcagcagccccagcagccccagccgggccaagggaggagatgacagcaagatctgccccagcctgtgcagctacagcggcctgaatggaaaccccagcagcgagctggactactgcagcacctaccggcagcacctggatgtgccccgggacagcccccgggccatctccttcaagaatggctggcagatggcccggcagaatgctgagatctggagcagcacagaggagaccgtgagccccaagatcaagagccgcagctgtgatgacctgctgaatgatgactgtgacagcttcccagaccccaaggtgaagtctgagagcatgggcagcctgctgtgtgaggaggacagcaaggagagctgccccatggcctggggcagcccctacgtgcctgaggtgcgcagcaatggccgcagccgcatccgccacaggtctgccagaaatgcccctggcttcctgaagatgtacaagaagatgcaccgcatcaacaggaaggacctgatgaacagcgaggtgatctgcagcgtgaagagccgcatcctgcagtatgagagcgagcagcagcacaaggacctgctgcgggcctggagccagtgcagcacagaggaggtgccccgggacatggtgcccacccgcatcagcgagtttgagaagctgatccagaagagcaagtccatgcccaacctgggagatgacatgctgagccctgtgaccctggagcccccccagaatggcctgtgccccaagaggcgcttcagcattgagtacctgctggaggaggagaaccagagcggccccccagcccggggccggcggggctgccagagcaatgccctggtgcccatccacatcgaggtgaccagtgatgagcagccccgggcccacgtggagttcagtgacagcgaccaggatggagtggtgtctgaccacagcgactacatccacctggagggcagcagcttctgcagcgagagtgactttgaccacttctccttcaccagcagcgagagcttctacggcagcagccaccaccaccaccaccaccaccaccaccaccaccgccacctgatcagcagctgcaagggccgctgcccagccagctacacccgcttcaccaccatgctgaagcatgagcgggcccggcatgagaacacagaggagccccggcggcaggagatggaccccggcctgagcaagctggccttcctggtgtcccctgtgcccttccggaggaagaagaacagcgcccccaagaagcagacagagaaggccaagtgcaaggcctctgtgtttgaggccctggacagcgccctgaaggacatctgtgaccagatcaaggccgagaagaagaggggcagcctgcctgacaacagcatcctgcacaggctcatcagcgagctgctgcctgatgtgcctgagaggaacagcagcctgcgggccctgcggcgcagccccctgcaccagcccctgcaccccctgcccccagatggagccatccactgccccccctaccagaatgactgtggccgcatgcccaggtctgccagcttccaggatgtggacacagccaacagcagctgccaccaccaggaccggggcggggccctgcaggaccgggagagccccaggagctacagcagcaccctgacagacatgggccgcagcgccccccgggagcggcggggcaccccagagaaggagaagctgcctgccaaggctgtgtatgacttcaaggcccagaccagcaaggagctgtccttcaagaagggggacacagtgtacatcctgaggaagattgaccagaactggtatgaaggagagcaccacggccgggtgggcatcttccccatctcctatgtggagaagctgaccccacctgagaaggcccagcctgcccggcccccacctccagcccagcctggagagatcggggaggccatcgccaagtacaacttcaatgctgacaccaacgtggagctgagcctgaggaaaggagacagagtcatcctgctgaagagggtggaccagaactggtatgagggcaagatccctggcaccaaccggcagggcatcttccctgtgtcctatgtggaggtggtgaagaagaacaccaagggagctgaggactacccagacccccccatcccccacagctacagcagtgaccgcatccacagcctgagcagcaacaagccccagaggcctgtgttcacccatgagaacatccagggcggcggggagcccttccaggccctgtacaactacaccccaagaaatgaagatgagctggagctgcgggagagtgatgtgattgatgtgatggagaagtgtgatgatggctggtttgtgggcaccagcaggaggaccaagttcttcggcaccttccctggcaactacgtgaagaggctgtag

SEQ ID NO: 95595 - DNA, 3303 bp, Artificial Sequence
  derived and/or modified sequence
atgagctactaccagcggcccttcagccccagcgcctacagcctgcctgccagtcttaacagctccattgtgatgcagcacgggacctcactggactccacagatacgtatcctcagcatgcccaatctctcgatggtacgacatcaagcagcattcctttgtatcgttcctccgaggaagaaaagagagtcaccgttataaaagccccacactatccagggataggccccgtggacgaatccggtattcccaccgcaatacgcaccacagtggatagacctaaggattggtataagactatgttcaagcagatccacatggtccacaaacctgacgatgacactgacatgtacaacaccccttacacttacaacgccggactctacaaccctccgtattcagcacagtcacatccagctgcaaaaacacagacttaccgccccctcagcaaatcccattctgataactcacccaacgctttcaaagacgcctcctcccctgtcccacccccacatgttccaccccccgtcccgcccctccgcccacgagaccggagtagtacggagaagcacgattgggacccccccgatcgcaaagtggacacacgtaagttccgctctgagccgcgatctatcttcgaatacgagcctgggaagtctagtattttgcagcatgagagacccgcctccctgtatcagtcctcaatcgataggtcactcgagcgacctatgtcctccgcctccatggcatcagactttcggaaacgcaggaagtctgagcctgctgtggggcctccacgtggccttggagaccaatcagcgtcccgaacaagtcccggtagggtcgatcttcccggatcctcaactaccctcaccaaatcctttacttccagctcccccagctctccttcgagagcgaagggaggcgatgattccaaaatatgtcccagtctctgctcttatagcgggcttaacggaaacccctcctccgagttggactactgctcaacttataggcagcaccttgacgtgcctagggattcccctcgggcaatctctttcaagaacggctggcaaatggcaagacagaacgcagagatctggtccagtaccgaagaaactgtgtctccgaagattaaaagtcggtcatgtgatgatttgctaaacgatgactgtgactcattccccgacccaaaagtgaagtccgagtctatgggttcgttgctctgcgaagaagatagcaaagagagctgccccatggcatggggtagcccttatgtgcctgaggtccgatcaaacgggcgatctcgtatccggcaccgatccgccagaaacgcccctggcttcctgaaaatgtacaagaaaatgcacaggatcaatcgaaaagatctaatgaatagtgaggttatttgcagtgttaagagtcgcattctccaatacgagagtgagcagcaacacaaagatttgctcagagcatggtcccagtgctctacagaggaggttcctagggatatggttccaacacgaatatccgaatttgagaagttaatccagaaaagtaagtccatgccaaatcttggcgacgatatgctctcccccgtaactttggagccaccgcagaatggcctctgtccaaagaggcgcttttcaatagaatatctgttggaggaggagaaccaaagcggccccccagcccgaggccgcagaggctgtcagtccaatgccttggtgcccatccatatcgaagtgacttccgacgaacagccccgcgctcacgtcgaattttctgattccgatcaagacggagtcgtaagtgaccattctgactatatccatctggaggggtccagtttctgctccgaatccgacttcgatcatttctcctttactagttcagaaagcttttatggctcatctcaccaccaccaccatcaccaccaccaccatcaccggcacctaatctccagttgcaagggtaggtgtcctgcctcctacactagattcaccaccatgcttaaacacgagcgggcacgccatgagaacacggaagagccaagaagacaggagatggacccaggattgtcaaaactggcgttcctggtgagtccagttccatttaggaggaagaaaaatagcgcgccgaaaaaacaaacggagaaggcaaagtgtaaagcttcagtgtttgaggcgctcgatagcgccctgaaagacatctgtgatcagataaaagcggagaaaaagagagggtcactgcctgataattccattctgcataggctgatctcggagttattgcccgacgtgcctgagaggaactcatccctcagggccttgagacggagccccttgcaccaaccactccatccacttccacccgatggagctatccactgcccaccctaccagaacgattgcggacgcatgccaaggtctgcctccttccaggatgtcgacacagctaattcatcttgccatcaccaggaccgtggaggagccctccaggacagggaatctcctcgctcctactcttccactctcaccgacatggggcggagcgcaccacgggagaggagaggaacacctgagaaggaaaaactgcccgctaaagctgtctacgattttaaggcacagactagcaaggaattgagcttcaagaaaggcgacaccgtctacatactgcgaaagattgaccagaactggtacgaaggagaacaccacggcagagtaggcatcttccctatatcttacgtcgagaaactcaccccacctgagaaggctcagcctgcaagaccacctcctccggcacagcccggggaaataggagaggccatagctaagtacaatttcaatgcagatacaaacgtggagctttcccttaggaagggtgaccgggtgatcttgctcaagcgagtcgaccagaactggtatgaaggcaagatccctggtacgaatcgccagggaatctttccggtgagctatgtggaggtggtgaagaagaatacgaaaggcgccgaagactatcccgaccctcccatcccccactcatacagtagtgaccgcattcatagcctctcctccaataaaccacaacgtcccgtctttacccacgaaaacatccagggggggggcgagccctttcaggcattgtataattatactcccagaaacgaggacgaactagagcttagggaatctgatgtaattgacgtcatggaaaaatgcgacgacggctggttcgtggggacaagtcgtaggactaagttttttggcaccttccccggaaactacgttaagcgcctatag

SEQ ID NO: 95596 - DNA, 3603 bp, Artificial Sequence
  derived and/or modified sequence
atgaacaccgacagcggcggctgcgcccggaagcgggccgccatgtcggttacccttacttcggttaaaagagtgcagtcctcccctaacctgctcgcggctggtcgtgacagtcagagtcctgacagcgcttggcggtcctataatgacggtaaccaggagaccctgaatggcgatgcgacatattccagtttagctgcaaaagggtttcggagcgtgcggcccaatttacaggacaagagatcccccactcagagtcagattacagtgaatggcaactccggcggtgctgtgtctcctatgagctactatcagcggcccttctcacccagcgcctacagcctacctgcttctcttaacagctccattgtcatgcagcatgggacctctcttgattccactgacacgtatccacaacatgctcaatctctagacgggactacttccagttctattccactttaccggtcctctgaagaagaaaagcgcgtgacagtgatcaaagccccacactaccccggcatcggccccgtggacgagtctggtattcccaccgcaattcgcacaacggtcgaccgccctaaagactggtataagaccatgttcaaacagatccacatggtacataaacccgatgacgataccgatatgtataacacgccctacacttataacgccggcctatataaccccccgtactcagctcagtcccaccctgcagcaaagacacagacatatcggccgctgtccaagtcccatagtgataacagcccaaacgcttttaaggacgcttccagtccagttcctcccccccacgtcccccctcccgtgcccccgttgaggcctcgcgacaggagcagtactgaaaagcatgactgggatcctcccgatagaaaggtggacaccaggaaatttcggtccgagccaagatctatcttcgaatacgagcccggcaagtcctctatactacagcacgagagacctgcgagcctctatcagagctctattgacaggagtctggaacggccgatgtcttcagccagtatggccagcgactttagaaaacgcaggaagagcgagcctgccgtcggccctcctcgaggtctaggcgatcagtctgcctctcggacctcacccgggcgcgtcgacctacccggaagcagtacaacactcaccaagtcattcacctcctcctcacctagtagtccctctagggccaaagggggggacgattcaaagatttgccccagcctttgtagctacagtggcctgaatggcaatccctccagcgagttggattactgcagtacttatcgacaacatcttgacgtgccccgggatagccctcgcgcaatatccttcaaaaacggctggcagatggcgaggcagaacgccgagatttggtcttccacagaggaaacagtttcccccaagattaagtcccgctcatgtgacgatttgctgaacgacgattgcgatagttttcctgatccaaaggtgaagagcgagtccatgggctctcttctctgcgaagaagatagcaaagaatcatgccccatggcatggggaagcccctacgtcccagaggtgcgatcgaatggcaggtcacggatccggcataggtcagcaagaaacgctccgggatttctgaagatgtataaaaagatgcataggattaataggaaagacctgatgaattctgaggtcatatgtagtgtgaagagcagaattctacagtacgagtctgagcaacagcacaaagatctcttaagggcctggtcgcagtgttcaacagaagaggttccacgagatatggtgccaacccggatcagcgagtttgaaaaactgattcagaagagcaaatccatgccgaatctgggagacgacatgctctcccccgtgacccttgaacctccccagaatggtctctgcccgaagcgtcggttttcaatcgaatatctgctggaagaagaaaatcagtctggacctcccgctcgcgggcgccgaggttgccaaagtaatgccctggtgcccattcacatcgaggtcaccagtgatgagcagccgcgcgcacacgttgagttctcagactctgatcaagacggggttgtgtccgatcactccgactatatacatctagagggttctagcttctgttctgagtctgactttgaccatttttcttttacgtcatctgagtcattctacggttcgtcgcatcaccaccaccaccaccaccaccatcaccaccggcacctgatatcctcgtgtaagggccgctgtccagccagttacactcgatttacaactatgctgaagcacgaacgcgcccggcacgagaatactgaggaacccaggcgccaggaaatggatccagggctcagcaagctggcatttctggtatctcccgtaccatttcgcaggaaaaagaactcagcaccaaagaagcagacagagaaagcgaagtgtaaggctagtgtctttgaggcgcttgattcagctctcaaagatatttgtgaccagatcaaggccgagaaaaagagaggctccttgcccgataacagtattctgcaccgcctcatctcggagctgcttcccgatgtgccagaaagaaattcaagtttaagggcgctgagacgatcacctctccaccagcccctgcacccccttccgcctgacggtgccatacactgcccgccctatcagaatgactgcgggaggatgccaaggtctgccagttttcaagatgtggataccgcaaattccagttgtcaccatcaggataggggaggtgctctgcaagacagagagtcccctaggtcttactcgtcaaccctgacggacatgggcagaagcgccccccgtgagcgaagaggcacccccgaaaaggaaaagctgcctgctaaggctgtgtatgatttcaaagcccagacatcgaaggagctaagctttaaaaagggagacacagtgtacatcctgcgcaagatagatcaaaattggtatgaaggcgaacatcacggccgggtcggcattttcccaatttcctatgtggagaagcttacgccccccgagaaggcccagccagctaggccaccgcccccggcgcaaccgggagagattggggaggcaatagccaagtacaattttaacgctgacaccaatgtggaattatctctgcgcaagggcgacagggtgatcttgttaaagcgtgtcgatcaaaattggtacgagggcaaaattccgggcaccaacaggcagggcatctttcctgtaagttacgtggaggtcgttaaaaagaatacaaaaggagctgaagattacccagacccccctattccacacagttattcctcagataggattcattcattgtcctccaataagccccagcgcccggttttcactcacgagaatatacaaggcggaggagaaccattccaagctttgtacaactatacacccagaaacgaggacgagctggagttgcgcgagtcagacgtcatcgacgtaatggaaaaatgcgacgacggttggtttgtgggcacttctcgcagaacaaaattcttcggaactttccccggaaactacgtcaaaagactgtag

SEQ ID NO: 95597 - DNA, 3303 bp, Artificial Sequence
  derived and/or modified sequence
atgagctactaccagcggcccttcagccccagcgcctacagcctgcctgcttctttaaattccagtatagtgatgcagcatgggacttctctcgatagcaccgacacttatccccaacacgcgcagtctcttgacggcacaacttctagttcaataccactttacagatcttcagaagaggagaagcgcgtcactgtcattaaggcccctcactatccaggtataggcccagtggatgagtctggcattccaaccgccatacggactaccgtagatagacctaaggactggtacaaaacaatgttcaagcaaattcacatggtgcacaagccggatgatgatacggatatgtataacactccctacacttacaatgctggactctacaaccctccttattctgcccaatcccaccccgccgctaagacccaaacatacagaccgctgtccaagtctcactccgataatagcccgaacgcctttaaagacgctagctcacctgtccccccccctcacgtccctcctcccgtccctcctctgcgtccaagagataggtcctccactgagaaacatgattgggacccccccgatcgcaaggtggataccagaaaatttaggtccgaaccccggagtattttcgagtacgagcctggtaagtcaagcatcctccaacacgagagacccgccagcctgtatcagagcagcatcgatcggtccctagagcggccaatgtcttccgccagcatggcctcagattttagaaagaggcgcaagagtgaacccgccgttggaccacctcggggattgggagatcaatccgcatctagaaccagtcccggacgcgtggatttacctggttcaagcacgaccttaaccaagtccttcactagcagtagcccatcttcaccatcaagggctaagggcggagacgattctaaaatttgcccttcgttatgttcctattccggccttaatggcaaccccagtagcgagctggactattgttctacctaccgccagcatctagatgtgcctcgggatagtccccgcgccataagttttaagaatggatggcagatggcccggcagaatgcggaaatctggagctcgaccgaggagactgtcagcccaaagatcaaatccagaagttgcgacgaccttctgaatgacgactgcgacagtttccctgacccaaaagtgaaatctgagtcgatgggaagcctcttgtgcgaggaagactctaaggagagctgtcccatggcttgggggagtccttacgtacccgaagtccgaagtaacggcagatcccggattcgccaccggtccgcgaggaacgctcccggatttcttaaaatgtataaaaagatgcataggatcaacagaaaggatctgatgaattccgaggtgatctgcagcgtaaagtctcgcatcctgcagtacgagagtgagcagcagcacaaggacctgttgcgagcctggtcgcaatgcagcaccgaagaggttcctagggatatggtgccaactaggatctccgagttcgaaaagctcatccaaaagagtaagagtatgcctaacctgggggatgacatgctcagccctgtgactctggaacctccacagaatggactttgtccaaaaaggcggttcagtatagaatacctgctggaggaagagaatcagtccggaccgcctgcgcgcggcaggcgtggatgccaatccaatgccctggtgcctatccacatcgaagtgaccagcgacgagcaaccaagggcgcacgtcgagttctccgatagcgaccaagatggcgtcgtgtctgaccactcagactacatacatctcgagggtagctcattttgcagcgaatccgatttcgaccatttcagctttacatcgtctgagtcattttacggttccagtcatcaccaccaccatcaccaccaccaccatcatagacacctgatcagctcttgtaaaggcaggtgtccagcttcctatacaagattcacgaccatgctcaagcatgaacgggcccgacacgaaaataccgaagagccacggcgtcaggaaatggaccccggactgtctaaactggccttccttgttagccccgtgccctttcggcgcaagaaaaatagcgccccgaaaaagcagaccgaaaaagcaaagtgcaaggcttcagtgttcgaggccctcgattcggctttgaaggatatttgtgaccagataaaggccgagaagaaacggggatctcttcccgacaactccatcctacacagactaatatctgagttgctgcctgacgttcctgaacggaatagctctcttagagccctaagacggtcccccctgcaccagcctctgcacccgctgcctccagatggggccattcactgccccccataccagaatgactgtggccgaatgccacgatccgcctccttccaagacgtggacaccgccaactcatcctgtcaccaccaagatagggggggggcgcttcaagaccgagagtcacctcggtcgtacagctctaccttgacggatatgggaagatccgcccctagggagcggcgggggactccggaaaaggagaaactgcccgcaaaggctgtgtacgacttcaaggctcaaacatcaaaggaattatcctttaaaaagggtgacacagtgtacatcctccggaaaatcgatcaaaattggtacgagggggagcatcacggccgcgttggaatcttccctatcagctacgttgaaaagctgacaccgcctgaaaaagctcagccagcgcggccacctccacccgctcaaccaggggagatcggtgaggcgatcgctaagtataatttcaacgctgatactaatgtagagcttagcctaaggaaaggggatcgtgtaatccttctgaaacgagtcgaccagaactggtatgaagggaagatccccggcaccaatcggcaaggaatctttcccgtgtcttacgtcgaggttgtgaagaagaataccaaaggcgccgaagattatccagatcccccaatcccgcattcttatagttccgatagaattcacagtttgtcatccaacaagccacagaggccagtcttcactcatgaaaacattcaaggtgggggtgagcctttccaggcgctgtacaactacacaccccgaaatgaagatgaattggaactgcgcgaatctgacgtgatagatgtcatggaaaagtgtgatgatgggtggttcgtgggcacctcacgtcggacaaagttcttcggcacctttcctggaaactacgtcaagaggctgtag

SEQ ID NO: 95598 - DNA, 3303 bp, Artificial Sequence
  derived and/or modified sequence
atgagttattatcagagaccgttttctccttctgcgtacagcttaccggctagccttaatagcagcattgtaatgcaacacggtactagtctggattcaacagatacctatccgcaacacgcccagagtctggacggtacaacatccagctcaatacctctgtatagatcgtccgaagaagaaaagcgagtgactgttatcaaagccccacactaccccggaatcggcccagtagatgaatcaggtatccccacagctatcagaacgacggtcgataggcctaaggactggtataaaacaatgttcaaacagattcacatggttcataagcctgacgacgacactgacatgtacaacaccccctacacatataatgcagggctgtacaacccaccttatagcgcccagagccaccctgccgctaagacccagacttaccggccattgagcaaaagtcatagtgacaacagtcccaacgcctttaaagacgctagttcccctgttcctcccccacacgtgccaccacctgttcctcccctcaggcccagagaccgtagttccacagagaagcatgattgggatccaccagacagaaaggtcgacactaggaagttcagaagtgaacctcgttcgattttcgagtatgagcccggtaagtcttcaattctacagcatgagcgccctgcctctctgtaccagagcagtatcgacaggagtttagagcgccctatgtcgtccgcttcaatggctagcgactttagaaaacggagaaaatccgagcctgcagtcggtcctccgaggggtctcggtgaccagagtgctagcagaacctccccgggtcgcgtcgatctgccgggaagcagtacaacacttacaaagtcatttacgagcagcagcccatcaagtccctccagggctaagggtggggacgactctaagatctgtcccagtctgtgttcctacagtgggcttaacggtaatccatcttctgagctcgattactgttcaacctatagacagcatctggatgtgccacgcgattccccacgcgctatctctttcaaaaacggatggcagatggccaggcaaaacgcagagatctggtcctcaacagaagagacagtctctccgaaaataaagtcccgtagctgtgatgacctgctcaacgacgattgcgactcattccctgatccaaaagtgaagtctgaatccatgggaagcctgctttgcgaagaagattcaaaagagtcttgcccgatggcatggggcagtccctacgtcccagaggtacgcagcaatggtcgatctcggattagacaccgctcagccaggaatgcccctggtttccttaagatgtacaaaaagatgcatcgtatcaatcgtaaagacttgatgaacagcgaagttatctgctcggttaaatcaaggatactccagtatgagagcgaacagcagcataaagacttactccgtgcatggagccagtgcagtactgaggaagtgccacgcgacatggtgcctacgcgtatttccgaatttgagaagctgattcagaaatctaaaagtatgcccaacctgggagatgatatgctgagccccgtgacacttgagcctccacaaaatggactgtgtccaaaaaggcgtttcagcattgagtacttactggaggaggaaaatcagtctggcccaccagcccgaggacgtagggggtgccaaagtaacgccctggttccaatccatatcgaagtcacatctgatgagcagccacgcgcacacgtggagttctctgactcagatcaggacggcgtcgtatcagaccactccgattatattcacctggaagggtcctccttctgctctgagtctgactttgatcatttcagtttcactagttctgaatcattctatggatcaagccaccatcaccatcatcaccaccatcaccaccatagacacctgataagctcatgtaagggcagatgtcccgcatcttacacccggttcacgacaatgctgaaacatgaacgcgctcgacacgaaaacaccgaagaacccagaagacaggaaatggacccagggcttagcaaactagcttttctcgtgtcaccggtgcccttcagaagaaagaagaattcggccccaaaaaagcagacagagaaggctaaatgcaaagcttcagtttttgaagctctcgactcagctctgaaggatatctgcgatcaaataaaagccgagaaaaagcgaggcagtctgccagataattctatcctccacaggctcataagtgaactgctgcctgacgtgccagaaaggaattcctcgttgagggccctgcgacgttcccctctgcaccagcccctgcacccactccccccagacggcgctattcattgccctccctatcaaaacgactgtggcaggatgcctcgctcagcctctttccaagacgtagacacagctaatagctcatgtcaccatcaggaccgcggaggtgcgctgcaagacagagaaagccccagatcttatagttctaccctcacagatatggggaggtccgcacctagggagcgcaggggaaccccagagaaggaaaaactgccagctaaggctgtctatgacttcaaggcccagactagtaaagaactttcatttaagaagggtgatactgtgtatatattgcggaagatcgaccagaattggtacgaaggcgagcaccacgggagagttgggatatttcccatctcatacgtagagaagctgacaccacctgaaaaggctcagcccgctcggcctccccctccggctcagcctggtgagatcggcgaagcaattgccaagtacaacttcaatgctgacactaatgtggaattaagcctgagaaaaggagacagagtaatactcctgaaaagggttgatcagaactggtacgagggcaaaattccgggaaccaaccgccagggaatattccctgtgagctatgtggaggtcgtgaagaagaacaccaaaggcgctgaagactatcccgacccacccattcctcactcatacagttccgataggatacatagcttgtctagcaataagcctcagcgacctgtgttcacgcacgaaaacatccaggggggtggagaaccttttcaggccctgtacaactacacccctagaaatgaggatgagttggagcttcgcgaaagtgatgtaatcgatgtcatggagaagtgcgacgatggttggtttgtgggaaccagtaggagaactaagttcttcggtacattccccggtaactacgtgaagcgcctctag

SEQ ID NO: 95599 - DNA, 3603 bp, Artificial Sequence
  derived and/or modified sequence
atgaatacggattctgggggatgcgctcggaagagggccgcaatgtcagtcactctcacctcagtcaagagggtgcagtcctctcctaatctcttagctgctggtagggattctcaatcaccggacagtgcttggcgtagttataacgatggtaatcaagaaaccctgaacggggacgcaacctacagcagcctagcggcaaaaggattcaggtcagtgagaccgaatctgcaggataagagaagcccaacccagtcgcagatcacagtaaacggcaattccggaggggctgtgagcccgatgtcatattaccagaggcctttttccccgtctgcctacagcctgcccgcaagccttaactcaagtatcgtgatgcaacacggtacctccctggacagcacagacacataccctcagcacgcccagtcccttgacgggacaacctcctcttctatacccttgtaccgctcaagtgaggaggaaaagagggtgaccgtcattaaagcaccacactatcctggcatcgggcctgtcgatgagtccggcattcctaccgcaatccggacaacagtggacagacccaaggactggtacaaaactatgtttaagcaaattcacatggtgcataagcccgacgatgacaccgatatgtacaacacgccctacacttacaatgctgggttgtacaaccctccctactcagctcagtcacacccagccgctaagacgcagacctatcgaccattgtccaagtctcatagcgataattcacccaatgcttttaaagatgcctcatcccccgtgccaccacctcacgtgcccccacccgttccacccctgcggcctcgagataggtcttccactgagaagcatgactgggatccccctgaccgcaaggtcgacaccagaaaatttagatcagaacccaggtcgatctttgagtatgagccgggaaagtccagcattctgcagcacgagaggcctgcatccctgtatcagagctccattgacaggtctctcgagcgcccaatgtctagcgcaagcatggccagtgacttccgcaagaggcgcaagtctgagccggcagtcgggcctccacgagggctgggcgaccagagtgcgtcaaggacatctcccggtagagtggacttgccgggtagtagtacgaccttgacgaaatctttcaccagcagttcgccgtcatcccccagtagggctaaaggcggtgatgattccaagatttgtccatctctctgtagttattctggactcaatggaaatcctagttctgagcttgactactgttctacctaccgtcagcacttggacgtgcctcgggactcaccacgtgctattagcttcaaaaatggctggcagatggccagacagaacgccgaaatctggtcctctactgaagagacagtctctccaaagattaagagccgtagctgcgatgatctgttaaatgatgattgcgatagtttccctgatccaaaggttaagtctgaatctatgggcagcctgctgtgtgaagaggatagtaaggagtcttgcccaatggcctgggggtccccatacgtgcccgaagtgagatctaacggaagatcaaggatccggcatcgatctgcccgtaatgctccaggcttcctaaaaatgtacaagaaaatgcataggatcaatagaaaagatctaatgaattccgaggtgatctgctctgtaaagtcgcggatactgcagtacgagtcggagcagcaacacaaggacctccttcgcgcttggtctcaatgcagtacagaggaagtaccacgggatatggttcccacgcgtatctccgagttcgagaagctgattcagaagtctaagagcatgccgaacttaggggacgacatgctctctccagtgaccctcgaaccaccgcagaatggcttgtgtcccaagcgtcgtttcagtatagagtacttgttagaggaggagaaccagagcggacccccagccagaggcaggcgcggttgtcagtccaacgcgctcgtccccatccacatcgaagtgactagtgacgagcaacctcgcgctcacgtggagttttccgatagcgatcaggatggcgtcgtgagcgaccactccgactatattcacctggaagggtcatccttctgttccgaatccgacttcgatcatttctctttcactagttctgagagtttctatggttcatctcaccatcaccaccaccaccatcaccaccaccatcggcatctcatcagctcttgcaaaggacgctgcccggcatcctacaccagatttaccactatgcttaagcatgaacgcgcacgccatgaaaacactgaagagccccgtcgccaggagatggatcctggccttagtaagctggccttcctcgtgtctccagtgccttttcgacgcaaaaagaatagtgcccctaaaaaacaaaccgagaaggccaaatgcaaggccagcgtgttcgaggcactcgatagcgcactgaaagacatctgcgatcaaatcaaggcggagaaaaagagaggttccctgccagacaacagcatactgcatcgcctgatcagtgagttactcccagacgtccccgagaggaattcctccctcagggccttgagacgatcacctctgcaccaaccgctgcacccactccctcctgatggcgcaatccactgccccccatatcagaacgactgtggtcgcatgcccagatcagcctccttccaggatgtggataccgctaattcctcctgtcaccaccaggacaggggcggtgctctgcaggaccgagaaagtcccagatcatacagtagcactctgactgacatgggccgatcagcgcctcgggaaaggaggggcacacccgagaaggaaaaactgccagctaaggcggtgtacgacttcaaagcgcaaacaagtaaggaactatccttcaagaagggggatacggtgtatatcttgagaaaaatcgatcagaattggtacgaaggagagcaccacgggcgagtaggcatcttccccatctcttatgtggagaagttaaccccacccgaaaaagcgcaacccgcaaggcccccacccccagcgcagcctggagagatcggcgaggccatcgccaaatataatttcaacgccgatacaaatgtcgagctcagcctgcggaagggggatagggtgattttgcttaagcgtgtagaccagaactggtatgagggaaaaatcccaggtactaataggcagggcatatttcccgtctcatacgtggaggtggtcaagaaaaacacaaagggagcagaggactaccccgaccccccaataccacactcttactctagtgatagaatccacagtctctccagcaacaagcctcagcggcctgtgttcacgcacgaaaacatccagggtgggggagaaccctttcaggccttatataattacacacccaggaacgaggacgagctcgaactgagagagagcgatgttattgacgtgatggaaaagtgtgatgacggctggtttgtgggcacatcaagacgcaccaagtttttcggaacgttcccgggaaattatgttaagagactctag

SEQ ID NO: 95600 - DNA, 3303 bp, Artificial Sequence
  derived and/or modified sequence
atgtcatattaccagcgccctttctcgccctctgcctacagcctacccgcatctctcaacagttccatcgttatgcagcatgggacaagcctggactctacggacacatatccacagcacgcccaatctctggacgggactacgtcctcctccatccccctgtacaggtcatccgaagaagagaagagggtgactgttatcaaagctccccactatccgggtatcgggcctgtcgacgaaagtggcatcccaacagcaatccgcacgacagtggacaggcccaaggactggtataagaccatgttcaagcagattcatatggtgcataaaccagacgatgacacggatatgtataacactccctacacatataacgctggtttgtataacccaccttattctgcacagagtcaccccgctgctaagacccaaacgtatcggccactgtcaaagtcacacagcgataacagtcctaatgcatttaaggatgcctcttctcctgttcctccaccgcacgtgccccctccggtgccaccactgaggccccgagaccgaagttcgacagaaaaacacgactgggatccgccagatagaaaggtagacacgcgtaagttcagatccgagcctcgctctatttttgaatacgaacccggaaagagttctatcctgcaacacgaaaggcccgcaagtctgtatcaatctagtatcgaccgctctctggaacggcctatgtccagtgcatccatggccagcgattttaggaagaggagaaagtctgaacccgctgtgggacccccaagagggctcggcgatcagagcgcatcacggacgagcccagggagagttgacctgcctgggtcatccacaacattaaccaaatcattcacctcgagttcaccctcctccccgagcagggccaaaggaggggatgactctaaaatctgcccctccctgtgctcttactctggcctgaacggcaaccctagttcagagttggactattgtagtacgtatcggcagcatctggatgtgcctagagattccccaagggcgataagcttcaaaaacggctggcagatggctcggcagaatgccgaaatatggtcctccacggaggagacagtctctcccaagattaagtcccggagctgtgatgatctcctaaacgatgactgtgacagcttcccggatcctaaggtcaaaagcgagtccatgggtagtctcttgtgtgaagaggattccaaggaatcctgtcccatggcttgggggtccccctatgttccagaagtacgctcaaacggtcggagccgtattcggcataggtcagcaagaaacgccccaggattcttgaagatgtataagaaaatgcaccgaatcaatcgtaaagatcttatgaattcagaagtgatatgtagtgtgaagagtcggatcctccagtacgaaagcgagcaacagcacaaagatctgctaagagcttggagtcaatgtagtactgaagaggtcccgagggatatggtacctacacgcatttctgagttcgagaagttaatccagaagagtaagtccatgcctaacctcggcgatgatatgctctctcccgtgactctagaaccacctcagaacggactctgcccgaaaaggcgattttcgattgaatacctgcttgaagaagaaaatcagtcaggaccacctgccagaggacgcaggggctgccaatccaatgcattagttcctatacacattgaggtcacttccgatgaacaacccagagcacatgtggagtttagtgatagcgatcaggatggggtggtgtccgaccatagcgactatattcacctggagggctcaagcttctgttctgagagtgactttgatcacttctctttcactagtagtgagtcattctacggatctagccatcaccaccatcaccaccaccaccaccatcaccggcacctcatatctagttgtaagggaagatgccctgccagctacacaaggtttactaccatgcttaagcatgaaagggccaggcacgaaaacaccgaagaacctaggcgccaggaaatggatccaggcctcagcaaactggcctttctggtgtcgcccgtgccattccggaggaaaaaaaatagtgctccaaaaaaacagacagaaaaggcaaagtgtaaggcgtcggtgttcgaggccttggactcagcgctaaaggatatttgtgaccagatcaaggctgagaagaagaggggctctctgccagataatagtatcttgcaccgacttattagcgagttgctgcccgatgtccccgagcgtaattcaagcctgagggcactcaggcgaagtccactgcaccagccgctccaccccttgccgcctgacggtgctatccactgccctccttaccaaaacgattgtggccgaatgcctcgctcagcttcctttcaggacgtggacaccgcaaattccagttgccaccaccaagatagaggtggcgcactccaagaccgagaaagcccgaggtcttatagcagcactctgacagatatgggcaggtcagccccacgggaaaggagaggtaccccagaaaaagagaagctgccagctaaagccgtctacgatttcaaggcgcaaacaagcaaggagttgtcatttaagaaaggggacacagtatacattctgcgtaaaatcgaccagaactggtatgaaggcgagcatcacggcagagtgggaatattcccaatcagctacgttgaaaagctgacaccgcctgaaaaggcccagcccgctcgacctccgcctcccgcacagccaggcgagatcggggaagctatagctaaatacaatttcaacgccgacacaaatgtggagctgtcacttcggaaaggcgacagggttatactgcttaaaagggttgaccagaactggtacgagggaaaaattcctggaaccaataggcaaggcattttccccgtcagttacgtcgaagtagtgaaaaagaacaccaagggggcagaggactacccggatcccccaatcccacatagctattcttctgatcggatacactcgctgtcttcgaacaaaccacagcgaccagtgttcacacacgaaaacatccagggtggaggagaacctttccaggccctctataattatactccacgcaatgaggatgagttagagttgagagaatctgatgtgattgacgtgatggagaaatgcgacgatggatggttcgtgggaaccagtcggcgaaccaaattctttggcacttttccaggaaattatgtgaagcgactctag

SEQ ID NO: 95601 - DNA, 6050 bp, Artificial Sequence
  derived and/or modified sequence
cgttcacacctcctttccgagtatctgcatgccttgctggcccagagcacaagacccccattgtgctcccccggctcagaatccaaggaaagaaaggaagcgaagcctctgcattgagttctaggacagctgagacacttggattggacttaatcttaaacctctggagttcaagaccttttaaaaagggctaaataaacaatctctacatgtaaaaggccactgactcctacttcctctgtatagagcaactgttgaactcagctgcctgtagatagcggtgggtgtgctcgcaaacgtgccgccatgtctgttacgctaacatctgtgaagagagtgcaaagttctccaaacctattggctgcagggcgtgattctcagtcaccagactcagcttggagatcttacaatgatggcaatcaggagacactgaacggagatgctacatattcctctcttgcagcaaaaggttttagaagcgttcgaccaaacctacaagataaaagatcaccaactcagagccagataacagtgaatggaaactcaggaggtgccgtgagtcccatgagttactatcagaggccgttttccccctcggcatattctctcccagcctcactcaactccagcattgtcatgcagcacggcacatccctcgattccacagacacatatccccagcatgcgcagtctctggatggcaccaccagcagctctatccccctgtaccgatcctcagaggaagagaagagagtgacagtcatcaaagccccgcattacccagggatcgggcccgtggatgaatccggaatccccacagcaattagaacgacagtcgaccggcccaaggactggtacaagacgatgtttaagcaaattcacatggtgcacaagccggatgatgacacagacatgtataatactccttatacatacaatgcaggtctgtacaacccaccctacagtgctcagtcacaccctgctgcaaagacccaaacctacagacctctttccaaaagccactccgacaacagccccaatgcctttaaggatgcgtcctccccagtgcctcccccacatgttccacctccagtcccgccgcttcgaccaagagatcggtcttcaacagaaaagcatgactgggatcctccagacagaaaagtggacacaagaaaatttcggtctgagccaaggagtatttttgaatatgaacctggcaagtcatcaattcttcagcatgaaagaccagcctccttgtatcagtcctctatagacagaagcctggaaagacccatgagttctgcaagcatggccagtgacttcaggaagcggaggaagagcgagcctgcagtgggtccaccacggggcttgggagatcaaagtgcgagcaggactagcccaggccgagtggacctcccaggatcaagcaccactcttacaaagtctttcactagctcttctccttcttccccatcaagagcaaaaggtggggatgatagcaaaatatgtccatccctttgcagttactcagggctcaacggcaacccctccagtgagttagattactgtagcacttacagacagcacttggatgtccctcgggactcaccaagagccattagtttcaagaacggctggcaaatggcccggcaaaacgcagaaatctggagcagcacggaagaaaccgtctctcccaaaatcaaatcccggagctgtgacgatctcctaaacgacgactgcgatagcttcccggacccgaaagtcaagtcggaaagcatgggctccctgttatgtgaggaggactccaaggagagctgccccatggcgtgggggtccccctacgtcccggaggttcgcagtaacggcagatcaaggatcagacacaggtcagcccgcaacgccccggggttcctgaagatgtacaagaaaatgcaccgcatcaaccgcaaggacctgatgaactccgaggtgatctgctccgtgaagtccaggattctgcagtacgagagcgagcagcagcacaaggacctgctgcgcgcctggagccagtgctccacggaggaggtgccccgggacatggtgcccacacgcatctccgaattcgaaaagctgatccagaagtccaaatccatgccaaatttaggggatgacatgctgtctcccgtaaccctagaaccaccgcaaaatggcctatgtcccaagaggcggttttccattgagtatttgctggaggaagaaaatcaaagcggcccccccgctcggggccggcgaggctgccagtctaacgccctggtgcccattcacattgaagtcaccagcgatgagcagccccgagcacacgtggagttttccgacagcgaccaggacggggttgtgtccgaccacagtgactacattcacctagaggggtcatccttctgcagtgaaagtgactttgatcacttttccttcacatcctccgaaagcttttacggatccagccaccaccaccaccatcaccaccaccaccaccaccgccacctcatcagctcctgcaaaggcaggtgcccggcctcctacactcgatttaccacaatgttaaaacacgaaagagccagacacgaaaacaccgaggagcccagaaggcaagaaatggaccctggcctttctaaacttgcttttctagtcagtcctgtgcctttccggaggaaaaaaaattcggctcctaagaaacagactgaaaaggcaaaatgtaaagcatctgtgtttgaggctctggactctgcccttaaagacatctgtgaccaaattaaagctgaaaagaaaagggggagcttgccggacaacagcatcctgcaccgcctcatcagtgagctgctgccagatgttcccgagaggaactcatccctgagagcgctgaggaggagccccctgcaccagcctctccacccactgcctcccgatggtgctattcattgtccaccctaccagaatgactgcgggagaatgccccgcagtgcctctttccaagacgtggacacagccaacagcagctgccaccaccaagaccgtggcggtgcactccaagaccgtgagtcccctagaagttactcatccactttgactgacatggggagaagtgcaccaagggaaagaagaggaactccagaaaaagagaaattgcctgcaaaagctgtttatgattttaaggctcagacatctaaggagttgtcatttaagaaaggagatactgtctacatcctcaggaaaattgatcaaaattggtatgagggagaacaccacgggagagtgggcatcttcccgatctcatacgtagagaaactcacacctcctgagaaagcacagcctgcaagaccacctccgccagcccagcccggagaaatcggagaagctatagccaaatacaacttcaacgcagacacaaatgtggagctgtcactgagaaagggagatagagttattcttcttaaaagagttgatcaaaactggtatgaaggtaaaatcccaggaaccaacagacaaggcatcttccctgtttcctatgtggaggtcgtcaagaagaacacaaaaggtgctgaggactaccctgaccctccaataccccacagctattctagtgataggattcacagcttgagctcaaataagccacagcgtcctgtgtttactcatgaaaatattcaaggtgggggggaaccgtttcaggctctgtataactatactcccaggaatgaagatgagctggagctcagagaaagtgatgtcattgatgtcatggaaaagtgtgatgacggctggtttgtggggacctcaagaagaaccaaattctttggtactttccccggaaactacgtcaagaggctgtgaattgcgctccctccttctgtagaggccgcctgccagccatgcacctgcgtcaacgcgcctgaaacaccccgcgggcctcccgttgtcatgccttacggtttccaatgcgccgtcaccatctccacctgccaccaaaccaccagcagagtagccgccgctgctgtgagcctggggacgacatggcaggctggtccccctccgtgaaagtgtggattcctacttcctgctctaagctttgacacgtcaaaatgtgggatcagaaagaaaaaaatcatgatatttaaaaatggtcaaatatttgaggcaaaaaaaaaaaaaaaaagtgtctccaggaggctgtccagcctcgtggctccatttcaacatctccccccaggcgatgttctcccccaagacgaccagaaaattgtttattggggaatgctgtggtttgcattttcatattcttcgcttggcagtgtgtattcttttcacaagtttgcctagtgtcttggtttacacaatatgacaactgtaactgtactttagctattgtttgcctgcacatacatgttgtaatatgcacagtgattacaacctttaaagcaagaggaggcgagttaatttggatgagtgtgattttgctgattgaatgtgagttttcaaataggagtctttttctgcaatttgtttgcattttttagaagtgcaaacagtaagtaaataaaagccttcggtaataatcatgacaatacaagaggctgagctaggctacaggggaaaactattgtgttgtaaagttgcatcgctattttatattaaaatgtaatgatcagcatcatgaacaatgagctcttagtgttttatttatctgaaaaaatgtaagtaaaagcagtgttagtgagaggtgcaaagaattattctaacagacacctgaaagtatctgtaagcaatactagtaggtaagatttcactgtgtgtacacatacacatttgagattgtatgagaacatataatccatatgatatgttgtacattttatggaaatgtaatagaatctcacacattattttatagaaatagagtacagaagcatcacaagtattaaagttggttttagcaaggattaggattactacaattatttttactataataattatttttcttctatggaactcagaatcctggctacatttgaggacaggaatatgttgagcctgattttcctggtgtgtgtaaaatatttcctaggaataaattaggcactttttagaagcaatgttaaatcattcaggttttattttctgccctgaagcagaaatttaaaaaatgatattgggacctggaaggtttaatatggttcacagtgcctgaattacacctgctccgaaaactagctttgtatttcttatgactttgcataagaactgttcatctttggatcttgagcaccttacagataaaactttttatggcatctctttcatggacagtgatattgatcttttcacaatgtacgtagcctctagaattttgtacatatgtttgctctttttttgtacagactagttgttgagaaaacaggggcgtttcctaatttggtctttatcctgcgacaacactttcagcagactagcctctccttatctcacagatcacaagcacccctagatagtgtgattctgtcagatagcatttatgcaaaaatctatgaagttaaaagatcgtagaagccaaatgaaatgtacatatctactgactgatgacaagggaatttcattaggaagaaggtaaagaaacatcgttgagtagcctaccttgatttctgtcaagttcataaccagcttcatattttaaaggcttcaggtttgaaattaagtcaactgcatgcagctttgctgataaatgaataattctctttgatgccatttatgagaaaagacttcaatatctgttgcctgtcatatttaagaaaaattactgtttctactctctgtatctgattttaaaagaaaaaactattcatacctggcttccaggtaattgactttgaattcttacaagcaaaggtcattgtgtttttcttgaatagacatctaataaattttgcttggaagtatacttcagtttttcttcttgacatttatctttataaaaattgtgtattttattccaacttgttaaactaagagaaaatgca

SEQ ID NO: 95602 - DNA, 5996 bp, Artificial Sequence
  derived and/or modified sequence
tccttttattgtggatgaacaccacgtacatgccgtaaatgctccctaggctggctgcggctacaaggcagacccgggagctgagaatagaggaatacctgcccaagcaactcattctgcacagcagccgacaagacagcgattttcctgtgctggaatgtgcccatccaaagacacttggattggacttaatcttaaacctctggagttcaagaccttttaaaaagggctaaataaacaatctctacatgtaaaaggccactgactcctacttcctctgtatagagcaactgttgaactcagctgcctgtagggcgtgattctcagtcaccagactcagcttggagatcttacaatgatggcaatcaggagacactgaacggagatgctacatattcctctcttgcagcaaaaggttttagaagcgttcgaccaaacctacaagataaaagatcaccaactcagagccagataacagtgaatggaaactcaggaggtgccgtgagtcccatgagttactatcagaggccgttttccccctcggcatattctctcccagcctcactcaactccagcattgtcatgcagcacggcacatccctcgattccacagacacatatccccagcatgcgcagtctctggatggcaccaccagcagctctatccccctgtaccgatcctcagaggaagagaagagagtgacagtcatcaaagccccgcattacccagggatcgggcccgtggatgaatccggaatccccacagcaattagaacgacagtcgaccggcccaaggactggtacaagacgatgtttaagcaaattcacatggtgcacaagccggatgatgacacagacatgtataatactccttatacatacaatgcaggtctgtacaacccaccctacagtgctcagtcacaccctgctgcaaagacccaaacctacagacctctttccaaaagccactccgacaacagccccaatgcctttaaggatgcgtcctccccagtgcctcccccacatgttccacctccagtcccgccgcttcgaccaagagatcggtcttcaacagaaaagcatgactgggatcctccagacagaaaagtggacacaagaaaatttcggtctgagccaaggagtatttttgaatatgaacctggcaagtcatcaattcttcagcatgaaagaccagcctccttgtatcagtcctctatagacagaagcctggaaagacccatgagttctgcaagcatggccagtgacttcaggaagcggaggaagagcgagcctgcagtgggtccaccacggggcttgggagatcaaagtgcgagcaggactagcccaggccgagtggacctcccaggatcaagcaccactcttacaaagtctttcactagctcttctccttcttccccatcaagagcaaaaggtggggatgatagcaaaatatgtccatccctttgcagttactcagggctcaacggcaacccctccagtgagttagattactgtagcacttacagacagcacttggatgtccctcgggactcaccaagagccattagtttcaagaacggctggcaaatggcccggcaaaacgcagaaatctggagcagcacggaagaaaccgtctctcccaaaatcaaatcccggagctgtgacgatctcctaaacgacgactgcgatagcttcccggacccgaaagtcaagtcggaaagcatgggctccctgttatgtgaggaggactccaaggagagctgccccatggcgtgggggtccccctacgtcccggaggttcgcagtaacggcagatcaaggatcagacacaggtcagcccgcaacgccccggggttcctgaagatgtacaagaaaatgcaccgcatcaaccgcaaggacctgatgaactccgaggtgatctgctccgtgaagtccaggattctgcagtacgagagcgagcagcagcacaaggacctgctgcgcgcctggagccagtgctccacggaggaggtgccccgggacatggtgcccacacgcatctccgaattcgaaaagctgatccagaagtccaaatccatgccaaatttaggggatgacatgctgtctcccgtaaccctagaaccaccgcaaaatggcctatgtcccaagaggcggttttccattgagtatttgctggaggaagaaaatcaaagcggcccccccgctcggggccggcgaggctgccagtctaacgccctggtgcccattcacattgaagtcaccagcgatgagcagccccgagcacacgtggagttttccgacagcgaccaggacggggttgtgtccgaccacagtgactacattcacctagaggggtcatccttctgcagtgaaagtgactttgatcacttttccttcacatcctccgaaagcttttacggatccagccaccaccaccaccatcaccaccaccaccaccaccgccacctcatcagctcctgcaaaggcaggtgcccggcctcctacactcgatttaccacaatgttaaaacacgaaagagccagacacgaaaacaccgaggagcccagaaggcaagaaatggaccctggcctttctaaacttgcttttctagtcagtcctgtgcctttccggaggaaaaaaaattcggctcctaagaaacagactgaaaaggcaaaatgtaaagcatctgtgtttgaggctctggactctgcccttaaagacatctgtgaccaaattaaagctgaaaagaaaagggggagcttgccggacaacagcatcctgcaccgcctcatcagtgagctgctgccagatgttcccgagaggaactcatccctgagagcgctgaggaggagccccctgcaccagcctctccacccactgcctcccgatggtgctattcattgtccaccctaccagaatgactgcgggagaatgccccgcagtgcctctttccaagacgtggacacagccaacagcagctgccaccaccaagaccgtggcggtgcactccaagaccgtgagtcccctagaagttactcatccactttgactgacatggggagaagtgcaccaagggaaagaagaggaactccagaaaaagagaaattgcctgcaaaagctgtttatgattttaaggctcagacatctaaggagttgtcatttaagaaaggagatactgtctacatcctcaggaaaattgatcaaaattggtatgagggagaacaccacgggagagtgggcatcttcccgatctcatacgtagagaaactcacacctcctgagaaagcacagcctgcaagaccacctccgccagcccagcccggagaaatcggagaagctatagccaaatacaacttcaacgcagacacaaatgtggagctgtcactgagaaagggagatagagttattcttcttaaaagagttgatcaaaactggtatgaaggtaaaatcccaggaaccaacagacaaggcatcttccctgtttcctatgtggaggtcgtcaagaagaacacaaaaggtgctgaggactaccctgaccctccaataccccacagctattctagtgataggattcacagcttgagctcaaataagccacagcgtcctgtgtttactcatgaaaatattcaaggtgggggggaaccgtttcaggctctgtataactatactcccaggaatgaagatgagctggagctcagagaaagtgatgtcattgatgtcatggaaaagtgtgatgacggctggtttgtggggacctcaagaagaaccaaattctttggtactttccccggaaactacgtcaagaggctgtgaattgcgctccctccttctgtagaggccgcctgccagccatgcacctgcgtcaacgcgcctgaaacaccccgcgggcctcccgttgtcatgccttacggtttccaatgcgccgtcaccatctccacctgccaccaaaccaccagcagagtagccgccgctgctgtgagcctggggacgacatggcaggctggtccccctccgtgaaagtgtggattcctacttcctgctctaagctttgacacgtcaaaatgtgggatcagaaagaaaaaaatcatgatatttaaaaatggtcaaatatttgaggcaaaaaaaaaaaaaaaaagtgtctccaggaggctgtccagcctcgtggctccatttcaacatctccccccaggcgatgttctcccccaagacgaccagaaaattgtttattggggaatgctgtggtttgcattttcatattcttcgcttggcagtgtgtattcttttcacaagtttgcctagtgtcttggtttacacaatatgacaactgtaactgtactttagctattgtttgcctgcacatacatgttgtaatatgcacagtgattacaacctttaaagcaagaggaggcgagttaatttggatgagtgtgattttgctgattgaatgtgagttttcaaataggagtctttttctgcaatttgtttgcattttttagaagtgcaaacagtaagtaaataaaagccttcggtaataatcatgacaatacaagaggctgagctaggctacaggggaaaactattgtgttgtaaagttgcatcgctattttatattaaaatgtaatgatcagcatcatgaacaatgagctcttagtgttttatttatctgaaaaaatgtaagtaaaagcagtgttagtgagaggtgcaaagaattattctaacagacacctgaaagtatctgtaagcaatactagtaggtaagatttcactgtgtgtacacatacacatttgagattgtatgagaacatataatccatatgatatgttgtacattttatggaaatgtaatagaatctcacacattattttatagaaatagagtacagaagcatcacaagtattaaagttggttttagcaaggattaggattactacaattatttttactataataattatttttcttctatggaactcagaatcctggctacatttgaggacaggaatatgttgagcctgattttcctggtgtgtgtaaaatatttcctaggaataaattaggcactttttagaagcaatgttaaatcattcaggttttattttctgccctgaagcagaaatttaaaaaatgatattgggacctggaaggtttaatatggttcacagtgcctgaattacacctgctccgaaaactagctttgtatttcttatgactttgcataagaactgttcatctttggatcttgagcaccttacagataaaactttttatggcatctctttcatggacagtgatattgatcttttcacaatgtacgtagcctctagaattttgtacatatgtttgctctttttttgtacagactagttgttgagaaaacaggggcgtttcctaatttggtctttatcctgcgacaacactttcagcagactagcctctccttatctcacagatcacaagcacccctagatagtgtgattctgtcagatagcatttatgcaaaaatctatgaagttaaaagatcgtagaagccaaatgaaatgtacatatctactgactgatgacaagggaatttcattaggaagaaggtaaagaaacatcgttgagtagcctaccttgatttctgtcaagttcataaccagcttcatattttaaaggcttcaggtttgaaattaagtcaactgcatgcagctttgctgataaatgaataattctctttgatgccatttatgagaaaagacttcaatatctgttgcctgtcatatttaagaaaaattactgtttctactctctgtatctgattttaaaagaaaaaactattcatacctggcttccaggtaattgactttgaattcttacaagcaaaggtcattgtgtttttcttgaatagacatctaataaattttgcttggaagtatacttcagtttttcttcttgacatttatctttataaaaattgtgtattttattccaacttgttaaactaagagaaaatgca

SEQ ID NO: 95603 - DNA, 3303 bp, Artificial Sequence
  derived and/or modified sequence
atgagctactaccagagacccttcagccccagcgcctacagcctgcccgccagcctgaacagcagcatcgtgatgcagcacggcaccagcctggacagcaccgacacctacccccagcacgcccagagcctggacggcaccaccagcagcagcatccccctgtacagaagcagcgaggaggagaagagagtgaccgtgatcaaggccccccactaccccggcatcggccccgtggacgagagcggcatccccaccgccatcagaaccaccgtggacagacccaaggactggtacaagaccatgttcaagcagatccacatggtgcacaagcccgacgacgacaccgacatgtacaacaccccctacacctacaacgccggcctgtacaaccccccctacagcgcccagagccaccccgccgccaagacccagacctacagacccctgagcaagagccacagcgacaacagccccaacgccttcaaggacgccagcagccccgtgccccccccccacgtgcccccccccgtgccccccctgagacccagagacagaagcagcaccgagaagcacgactgggacccccccgacagaaaggtggacaccagaaagttcagaagcgagcccagaagcatcttcgagtacgagcccggcaagagcagcatcctgcagcacgagagacccgccagcctgtaccagagcagcatcgacagaagcctggagagacccatgagcagcgccagcatggccagcgacttcagaaagagaagaaagagcgagcccgccgtgggcccccccagaggcctgggcgaccagagcgccagcagaaccagccccggcagagtggacctgcccggcagcagcaccaccctgaccaagagcttcaccagcagcagccccagcagccccagcagagccaagggcggcgacgacagcaagatctgccccagcctgtgcagctacagcggcctgaacggcaaccccagcagcgagctggactactgcagcacctacagacagcacctggacgtgcccagagacagccccagagccatcagcttcaagaacggctggcagatggccagacagaacgccgagatctggagcagcaccgaggagaccgtgagccccaagatcaagagcagaagctgcgacgacctgctgaacgacgactgcgacagcttccccgaccccaaggtgaagagcgagagcatgggcagcctgctgtgcgaggaggacagcaaggagagctgccccatggcctggggcagcccctacgtgcccgaggtgagaagcaacggcagaagcagaatcagacacagaagcgccagaaacgcccccggcttcctgaagatgtacaagaagatgcacagaatcaacagaaaggacctgatgaacagcgaggtgatctgcagcgtgaagagcagaatcctgcagtacgagagcgagcagcagcacaaggacctgctgagagcctggagccagtgcagcaccgaggaggtgcccagagacatggtgcccaccagaatcagcgagttcgagaagctgatccagaagagcaagagcatgcccaacctgggcgacgacatgctgagccccgtgaccctggagcccccccagaacggcctgtgccccaagagaagattcagcatcgagtacctgctggaggaggagaaccagagcggcccccccgccagaggcagaagaggctgccagagcaacgccctggtgcccatccacatcgaggtgaccagcgacgagcagcccagagcccacgtggagttcagcgacagcgaccaggacggcgtggtgagcgaccacagcgactacatccacctggagggcagcagcttctgcagcgagagcgacttcgaccacttcagcttcaccagcagcgagagcttctacggcagcagccaccaccaccaccaccaccaccaccaccaccacagacacctgatcagcagctgcaagggcagatgccccgccagctacaccagattcaccaccatgctgaagcacgagagagccagacacgagaacaccgaggagcccagaagacaggagatggaccccggcctgagcaagctggccttcctggtgagccccgtgcccttcagaagaaagaagaacagcgcccccaagaagcagaccgagaaggccaagtgcaaggccagcgtgttcgaggccctggacagcgccctgaaggacatctgcgaccagatcaaggccgagaagaagagaggcagcctgcccgacaacagcatcctgcacagactgatcagcgagctgctgcccgacgtgcccgagagaaacagcagcctgagagccctgagaagaagccccctgcaccagcccctgcaccccctgccccccgacggcgccatccactgccccccctaccagaacgactgcggcagaatgcccagaagcgccagcttccaggacgtggacaccgccaacagcagctgccaccaccaggacagaggcggcgccctgcaggacagagagagccccagaagctacagcagcaccctgaccgacatgggcagaagcgcccccagagagagaagaggcacccccgagaaggagaagctgcccgccaaggccgtgtacgacttcaaggcccagaccagcaaggagctgagcttcaagaagggcgacaccgtgtacatcctgagaaagatcgaccagaactggtacgagggcgagcaccacggcagagtgggcatcttccccatcagctacgtggagaagctgaccccccccgagaaggcccagcccgccagaccccccccccccgcccagcccggcgagatcggcgaggccatcgccaagtacaacttcaacgccgacaccaacgtggagctgagcctgagaaagggcgacagagtgatcctgctgaagagagtggaccagaactggtacgagggcaagatccccggcaccaacagacagggcatcttccccgtgagctacgtggaggtggtgaagaagaacaccaagggcgccgaggactaccccgacccccccatcccccacagctacagcagcgacagaatccacagcctgagcagcaacaagccccagagacccgtgttcacccacgagaacatccagggcggcggcgagcccttccaggccctgtacaactacacccccagaaacgaggacgagctggagctgagagagagcgacgtgatcgacgtgatggagaagtgcgacgacggctggttcgtgggcaccagcagaagaaccaagttcttcggcaccttccccggcaactacgtgaagagactgtag

SEQ ID NO: 95604 - protein, 160 aa, Artificial Sequence
  derived and/or modified sequence
MQPFLLLLAFLLTPGAGTEEIIGGHEAKPHSRPYMAFVQFLQEKSRKRCGGILVRKDFVLTAAHCQGSSINVTLGAHNIKEQERTQQFIPVKRPIPHPAYNPKNFSNDIMLLQGDSGGPLVCKDVAQGILSYGNKKGTPPGVYIKVSHFLPWIKRTMKRL

SEQ ID NO: 95605 - protein, 115 aa, Artificial Sequence
  derived and/or modified sequence
MQPFLLLLAFLLTPGAGTEEIIGGHEAKPHSRPYMAFVQFLQEKSRKRCGGILVRKDFVLTAAHCQGRGDSGGPLVCKDVAQGILSYGNKKGTPPGVYIKVSHFLPWIKRTMKRL

SEQ ID NO: 95606 - DNA, 483 bp, Artificial Sequence
  derived and/or modified sequence
atgcagcccttcctccttctgttggcatttttactgacacccggagccggcaccgaggagattataggtggccacgaggctaagcctcattctcgaccttacatggccttcgtgcaatttctacaggaaaaatcccgaaagagatgtggagggatactcgttaggaaggattttgtgcttacggctgcccattgtcagggtagctccatcaacgtgacgctgggagctcataacataaaagagcaggagcggacccagcaatttataccggtcaagaggcctatcccacaccctgcgtacaatcctaagaattttagcaatgacataatgctgttacagggggactcggggggtcctctcgtatgtaaagacgtcgcccaaggcatcttaagctatggtaacaaaaaaggcacccctcctggcgtgtatatcaaagtttctcatttccttccatggattaaacggactatgaagcgcctttag

SEQ ID NO: 95607 - DNA, 348 bp, Artificial Sequence
  derived and/or modified sequence
atgcagccctttttattgctcctggccttcttgctcacaccaggtgccggtactgaagaaatcattggaggccatgaggccaaaccccatagcaggccatacatggcctttgtacaatttcttcaggagaaaagtagaaagcggtgcggcggtatcctcgtccggaaagattttgttctgacagcagcacattgccaaggacggggggacagtgggggaccgctcgtgtgcaaggacgtggcgcagggaatcttgagttacggcaacaagaaaggtaccccacccggcgtgtatataaaggtctcccactttctcccatggatcaaaagaactatgaaacggctatag

SEQ ID NO: 95608 - DNA, 687 bp, Artificial Sequence
  derived and/or modified sequence
cccatccctccttcatctccctccagcatttgtttctggaaggagtcaacaccaacagctctgacctgggcagccttcctgagaaaatgcagccattcctcctcctgttggcctttcttctgacccctggggctgggacagaggagatcatcgggggccatgaggccaagccccactcccgcccctacatggcctttgttcagtttctgcaagagaagagtcggaagaggtgtggcggcatcctagtgagaaaggactttgtgctgacagctgctcactgccagggaagctccataaatgtcaccttgggggcccacaatatcaaggaacaggagcggacccagcagtttatccctgtgaaaagacccatcccccatccagcctataatcctaagaacttctccaacgacatcatgctactgcagggggactccggggggcccctcgtgtgtaaggacgtagcccaaggtattctctcctatggaaacaaaaaagggacacctccaggagtctacatcaaggtctcacacttcctgccctggataaagagaacaatgaagcgcctctaacagcaggcatgagactaaccttcctctgggcctgaccatctctgggacagaggcaagaatccccaaggggtgggcagtcggggttgcaggactgtaataaatggatctctggtgtaaa

SEQ ID NO: 95609 - DNA, 522 bp, Artificial Sequence
  derived and/or modified sequence
tttctggaaggagtcaacaccaacagctctgacctgggcagccttcctgagaaaatgcagccattcctcctcctgttggcctttcttctgacccctggggctgggacagaggagatcatcgggggccatgaggccaagccccactcccgcccctacatggcctttgttcagtttctgcaagagaagagtcggaagaggtgtggcggcatcctagtgagaaaggactttgtgctgacagctgctcactgccagggaaggggggactccggggggcccctcgtgtgtaaggacgtagcccaaggtattctctcctatggaaacaaaaaagggacacctccaggagtctacatcaaggtctcacacttcctgccctggataaagagaacaatgaagcgcctctaacagcaggcatgagactaaccttcctctgggcctgaccatctctgggacagaggcaagaatccccaaggggtgggcagtcggggttgcaggactgtaataaatggatctctggtgtaaata

SEQ ID NO: 95610 - DNA, 483 bp, Artificial Sequence
  derived and/or modified sequence
atgcagcccttcctgctgctgctggccttcctgctgacccctggggccggcacagaggagatcatcggcggccacgaggccaagccccacagccggccctacatggcctttgtgcagttcctgcaggagaagagcaggaagagatgtggcggcatcctggtgaggaaggactttgtgctgacagctgcccactgccagggcagcagcatcaacgtgaccctgggcgcccacaacatcaaggagcaggagaggacccagcagttcatccctgtgaagaggcccatcccccacccagcctacaaccccaagaacttcagcaatgacatcatgctgctgcagggcgacagcggcggccccctggtgtgcaaggatgtggcccagggcatcctgtcctatggcaacaagaagggcaccccacctggggtgtacatcaaggtgagccacttcctgccctggatcaagaggaccatgaagaggctgtag

SEQ ID NO: 95611 - DNA, 348 bp, Artificial Sequence
  derived and/or modified sequence
atgcagcccttcctgctgctgctggccttcctgctgacccctggggccggcacagaggagatcatcggcggccacgaggccaagccccacagccggccctacatggcctttgtgcagttcctgcaggagaagagcaggaagagatgtggcggcatcctggtgaggaaggactttgtgctgacagctgcccactgccagggccgcggggacagcggcggccccctggtgtgcaaggatgtggcccagggcatcctgtcctatggcaacaagaagggcaccccacctggggtgtacatcaaggtgagccacttcctgccctggatcaagaggaccatgaagaggctgtag

SEQ ID NO: 95612 - DNA, 483 bp, Artificial Sequence
  derived and/or modified sequence
atgcagcccttcctgctgctgctggccttcctgctgacccccggcgccgggaccgaagagattatcggcggtcacgaggccaaaccacactcgcgcccatacatggctttcgttcagtttcttcaggaaaaatctcgcaaaaggtgtggcgggatcctggtgcgaaaggatttcgtcttgactgcagcgcactgtcaagggagttccatcaacgtaaccctcggcgcccacaacataaaagagcaggagcgcacacagcagtttattcctgtaaaaagaccaatccctcatccggcttacaatcccaagaacttttctaacgatattatgctgctgcagggtgacagcggcggacctctggtttgcaaagatgtggcccaggggattctgagctatgggaataaaaagggaacaccaccaggggtttacattaaggtgtctcacttcctgccatggataaaacgcacgatgaagcgcctttag

SEQ ID NO: 95613 - DNA, 348 bp, Artificial Sequence
  derived and/or modified sequence
atgcagcccttcctgctgctgctggccttcctgctgacccccggcgccggcactgaggagattatcggtggccacgaggccaagccacatagcagaccatatatggccttcgttcagtttcttcaagaaaaatctcggaagcgctgcggggggatcttggttcgaaaagattttgtcttgacggccgctcactgtcagggccggggcgacagcggcggcccactggtttgtaaagatgtcgcccagggtatactgtcctacggcaacaaaaaggggaccccacctggggtgtatattaaggtgtcccacttccttccctggatcaaacggactatgaaaagactgtag

SEQ ID NO: 95614 - DNA, 483 bp, Artificial Sequence
  derived and/or modified sequence
atgcagccattcctgttgctgctcgcttttcttcttactcccggtgcgggtacagaggagataattggcggtcatgaggccaaaccgcatagtaggccctacatggctttcgtacagttcctgcaggaaaagagccgcaagcgttgtggaggaatcctggttaggaaagacttcgtgttaaccgctgcacattgtcaagggtcatctatcaatgtcacactgggcgctcataatatcaaagagcaggagcgcacacagcagttcatacccgtgaaaagacctatcccccatcccgcatacaatccaaaaaacttcagcaacgacataatgctcctgcaaggtgacagcggaggaccactggtgtgcaaagacgtagcacagggcatattgagttacggcaataaaaaaggcacaccgcctggcgtctatattaaggtgagccacttccttccatggatcaaacgtaccatgaaacgtttatag

SEQ ID NO: 95615 - DNA, 348 bp, Artificial Sequence
  derived and/or modified sequence
atgcagccattcttgctcctgcttgccttccttctgacccctggcgcaggtactgaggagatcatcggtgggcatgaagctaaacctcacagcagaccttatatggcgtttgttcagttcctccaggaaaaatccaggaagcgatgcgggggtatccttgtgcggaaggacttcgtgctgacagctgcacattgccagggtagaggggattctggcggaccccttgtgtgcaaagacgtcgcccaaggcatattaagttatgggaacaagaagggtacgccaccaggagtatacatcaaagtctcgcactttttgccatggataaaacgcaccatgaagcgcctttag

SEQ ID NO: 95616 - DNA, 483 bp, Artificial Sequence
  derived and/or modified sequence
atgcagcccttcctgctgctgctggccttcctgctgacccccggcgccggcaccgaggagatcatcggcggccacgaggccaagccccacagcagaccctacatggccttcgtgcagttcctgcaggagaagagcagaaagagatgcggcggcatcctggtgagaaaggacttcgtgctgaccgccgcccactgccagggcagcagcatcaacgtgaccctgggcgcccacaacatcaaggagcaggagagaacccagcagttcatccccgtgaagagacccatcccccaccccgcctacaaccccaagaacttcagcaacgacatcatgctgctgcagggcgacagcggcggccccctggtgtgcaaggacgtggcccagggcatcctgagctacggcaacaagaagggcaccccccccggcgtgtacatcaaggtgagccacttcctgccctggatcaagagaaccatgaagagactgtag

SEQ ID NO: 95617 - DNA, 348 bp, Artificial Sequence
  derived and/or modified sequence
atgcagcccttcctgctgctgctggccttcctgctgacccccggcgccggcaccgaggagatcatcggcggccacgaggccaagccccacagcagaccctacatggccttcgtgcagttcctgcaggagaagagcagaaagagatgcggcggcatcctggtgagaaaggacttcgtgctgaccgccgcccactgccagggcagaggcgacagcggcggccccctggtgtgcaaggacgtggcccagggcatcctgagctacggcaacaagaagggcaccccccccggcgtgtacatcaaggtgagccacttcctgccctggatcaagagaaccatgaagagactgtag

SEQ ID NO: 95618 - protein, 214 aa, Artificial Sequence
  derived and/or modified sequence
MAFLRSMWGVLSALGRSGAELCTGCGSRLRSPFSFVYLPRWFSSVLASCPKKPVSSYLRFSKEQLPIFKAQNPDAKTTELIRRIAQRWRELPDSKKKIYQDAYRAEWQVYKEEISRFKEQLTPSQIMSLEKEIMDKHLKRKAMTKKKEKLKTVKENWKNLSDSEKELYIQHAKEDETRYHNEMKSWEEQMIEVGRKDLLRRTIKKQRKYGAEEC

SEQ ID NO: 95619 - DNA, 645 bp, Artificial Sequence
  derived and/or modified sequence
atggccttcctgagaagcatgtggggcgtgctgagcgccctgggcagaagcggcgccgagctgtgcaccggctgcggcagcagactgagaagccccttcagcttcgtgtacctgcccagatggttcagcagcgtgctggccagctgccccaagaagcccgtgagcagctacctgagattcagcaaggagcagctgcccatcttcaaggcccagaaccccgacgccaagaccaccgagctgatcagaagaatcgcccagagatggagagagctgcccgacagcaagaagaagatctaccaggacgcctacagagccgagtggcaggtgtacaaggaggagatcagcagattcaaggagcagctgacccccagccagatcatgagcctggagaaggagatcatggacaagcacctgaagagaaaggccatgaccaagaagaaggagaagctgaagaccgtgaaggagaactggaagaacctgagcgacagcgagaaggagctgtacatccagcacgccaaggaggacgagaccagataccacaacgagatgaagagctgggaggagcagatgatcgaggtgggcagaaaggacctgctgagaagaaccatcaagaagcagagaaagtacggcgccgaggagtgctag

SEQ ID NO: 95620 - DNA, 645 bp, Artificial Sequence
  derived and/or modified sequence
atggcttttctcaggagcatgtggggagttttgagcgcactgggccgcagcggcgcagagttgtgtactggatgcggaagcaggctgaggtcaccgtttagtttcgtgtatctgccccgctggttttcttctgtgctggcgagctgtcccaagaagcccgtgtcgtcatacttgaggttctccaaggaacagctcccaatcttcaaggcccagaatccagatgcgaaaactactgagctcatcagacgcatcgcccaacgatggagagagctgcccgactctaaaaagaagatctaccaggacgcctatcgggctgagtggcaagtctacaaagaagaaatatcccgttttaaagaacaactgacaccgtcacagataatgtctctggagaaagagatcatggacaaacacttgaagcgtaaggcaatgactaaaaaaaaggaaaaacttaagactgttaaagagaattggaagaatttatctgattcagagaaagagctgtacatccaacacgccaaggaagacgaaactagatatcacaacgaaatgaagtcttgggaggagcaaatgatagaggttggtcggaaggacctgctgagacgcacgattaagaagcaacggaagtatggcgccgaggagtgttag

SEQ ID NO: 95621 - DNA, 645 bp, Artificial Sequence
  derived and/or modified sequence
atggccttcctgcgctccatgtggggcgtgctgagcgccctgggccgctctggagctgagctgtgcaccggctgcggcagccggctgcggagccccttctcctttgtgtacctgccccgctggttcagctctgtgctggccagctgccccaagaagcctgtgagcagctacctgcgcttcagcaaggagcagctgcccatcttcaaggcccagaacccagatgccaagaccacagagctgatccgccgcatcgcccagcgctggagggagctgcctgacagcaagaagaagatctaccaggatgcctacagagctgagtggcaggtgtacaaggaggagatcagccgcttcaaggagcagctgacccccagccagatcatgagcctggagaaggagatcatggacaagcacctgaagaggaaggccatgaccaagaagaaggagaagctgaagacagtgaaggagaactggaagaacctgagtgacagcgagaaggagctgtacatccagcacgccaaggaggatgagacccgctaccacaatgagatgaagtcctgggaggagcagatgattgaggtgggcaggaaggacctgctgcggaggaccatcaagaagcagaggaaatatggagcagaagaatgttag

SEQ ID NO: 95622 - DNA, 645 bp, Artificial Sequence
  derived and/or modified sequence
atggccttcctgcggagcatgtggggcgtgctgagcgccctgggccgctccggagcggagctgtgtacgggatgtgggtcaagactgcggagtcctttctccttcgtctacctgcctaggtggttctcctccgtgctcgcgagttgtcccaagaaaccagtcagtagttaccttagattttccaaagaacagctgccaatttttaaggcccagaaccccgacgccaaaaccaccgaactgattcgacggattgcgcagcgatggcgcgagcttcccgactcgaagaagaagatctaccaggacgcataccgcgcagagtggcaggtgtataaggaggagatatcccggtttaaggagcagctgacgccttcgcagattatgagtctggagaaggagataatggataagcatctgaaacggaaagccatgacgaaaaagaaagaaaaactgaaaaccgtgaaagaaaactggaaaaacctgtcagactccgagaaggaactgtacatacagcacgcaaaggaggacgagactaggtaccacaatgaaatgaaaagctgggaagaacagatgattgaagtggggcgcaaggacctcctgcggcgaacgatcaagaagcagaggaagtatggagctgaggagtgttag

SEQ ID NO: 95623 - DNA, 645 bp, Artificial Sequence
  derived and/or modified sequence
atggccttcctgagatcaatgtggggggttttgtcggcacttggcaggtccggagctgaattatgtacaggttgtggcagcaggctgcgcagtcccttctcattcgtctacctcccgagatggttttcttccgtattggccagttgcccaaaaaaacctgtgtcttcctaccttagattttcaaaggagcagctccctatcttcaaagcgcagaaccccgacgccaagaccaccgaactgatcaggcggatcgcccagcgatggcgtgaactaccggattcaaaaaagaagatctaccaggatgcctatcgcgctgaatggcaggtctacaaagaagagatcagcagattcaaggaacagttgactcccagtcaaatcatgagcctcgaaaaagaaattatggacaagcacttaaagcggaaggccatgactaagaaaaaggagaagctcaagacggttaaggagaactggaagaatctgagcgacagtgagaaggaactctacattcagcatgctaaagaggatgagacgcgatatcacaatgaaatgaaatcctgggaagaacagatgattgaagtggggagaaaagacttgctgcggcgtacgatcaagaaacagagaaagtatggggctgaagaatgctag

SEQ ID NO: 95624 - DNA, 973 bp, Artificial Sequence
  derived and/or modified sequence
tgataacacacgccggagggtcgcacgcgggttccagttgtgattgctggagttgtgtattgccaggaggctctccgagattggggtcgggtcactgcctcatccaccggagcgatggcgtttctccgaagcatgtggggcgtgctgagtgccctgggaaggtctggagcagagctgtgcaccggctgtggaagtcgactgcgctcccccttcagttttgtgtatttaccgaggtggttttcatctgtcttggcaagttgtccaaagaaacctgtaagttcttaccttcgattttctaaagaacaactacccatatttaaagctcagaacccagatgcaaaaactacagaactaattagaagaattgcccagcgttggagggaacttcctgattcaaagaaaaaaatatatcaagatgcttatagggcggagtggcaggtatataaagaagagataagcagatttaaagaacagctaactccaagtcagattatgtctttggaaaaagaaatcatggacaaacatttaaaaaggaaagctatgacaaaaaaaaaagaaaagctgaagactgtaaaggaaaactggaaaaatctgtctgactctgaaaaggaattatatattcagcatgctaaagaggacgaaactcgttatcataatgaaatgaagtcttgggaagaacaaatgattgaagttggacgaaaggatcttctacgtcgcacaataaagaaacaacgaaaatatggtgctgaggagtgttaaaagtagaagattgagatgtgttcacaatggataggcacaggaaaccagttaggtctcaatacctgaagctatcgtaaaattaagaaaggataaagttggtaaaccttttatatttagtatctttttattcagctcatggacttctgccagcataatacttgctttggaaaacccagataaaggttcatgcaaactttattttgtgtttaggaac

SEQ ID NO: 95625 - protein, 282 aa, Artificial Sequence
  derived and/or modified sequence
MPPHHLLPWLAQVPSAEGELVRLVSRAGGRGACFWPAVTMEMAVAAGCVCKGGGCCHREPSQDHHESQEHRGPLVGSQTCLVHQAEGTAEKVSSLGKDWHKFCLKCERCSKTLTPGGHAEHDGKPFCHKPCYATLFGPKGVNIGGAGSYIYEKPLAEGPQVTGPIEVPAARAEERKASGPPKGPSRASSVTTFTGEPNTCPRCSKKVYFAEKVTSLGKDWHRPCLRCERCGKTLTPGGHAEHDGQPYCHKPCYGILFGPKGVNTGAVGSYIYDRDPEGKVQP

SEQ ID NO: 95626 - DNA, 849 bp, Artificial Sequence
  derived and/or modified sequence
atgcccccccaccacctgctgccttggctcgcccaagtcccatctgccgagggggagttggttcgtttggtgtccagagcaggcggtcggggcgcttgtttctggcccgcagtcaccatggaaatggccgtggccgccgggtgcgtatgtaaaggtggtgggtgctgccacagggagccatctcaagaccatcatgaaagccaggaacacagaggacccctagtcggcagccagacctgcctggtccatcaggcagagggtactgctgaaaaagtcagctccctgggcaaagattggcataagttttgtctgaagtgtgagagatgttcaaagactttgacacctggcgggcacgcagagcacgatgggaaacccttctgtcacaaaccctgctacgctaccctgttcgggcccaaaggtgtgaacatcggcggcgcaggtagctacatttacgagaaacccctcgctgagggtccccaggttacaggccctatcgaagtgccagcagcacgcgctgaggaacgtaaggcctcaggtccccctaaagggcccagtcgcgccagcagtgtgacgacatttacgggagaaccaaacacttgtccccggtgttctaagaaggtatactttgccgagaaggtcaccagcctgggtaaggattggcataggccctgtttgaggtgcgaacgttgtggcaagacgcttacacccggggggcacgcagagcacgatgggcagccctactgtcataagccatgctacggcattctgtttgggcctaagggggttaataccggcgccgtaggctcatacatctatgacagagaccccgaaggcaaagtccagccttag

SEQ ID NO: 95627 - DNA, 849 bp, Artificial Sequence
  derived and/or modified sequence
atgccaccccaccacctgctgccctggctggcccaggtgcccagcgctgagggggagctggtgcggctggtgtccagagctgggggccgcggggcctgcttctggccagctgtgaccatggagatggctgtggccgccggctgtgtgtgcaagggcggcggctgctgccaccgggagcccagccaggaccaccacgagagccaggagcaccggggccccctggtgggcagccagacctgcctggtgcaccaggccgagggcacagctgagaaggtgagcagcctgggcaaggactggcacaagttctgcctgaagtgtgagcgctgcagcaagaccctgaccccaggcggccatgctgagcatgatggcaagcccttctgccacaagccctgctacgccaccctgtttggccccaagggcgtgaacattggaggagctggcagctacatctatgagaagcccctggccgagggcccccaggtgacaggccccatcgaggtgcctgctgcccgggcagaggagaggaaggccagcggcccccccaagggccccagccgggccagctctgtgaccaccttcaccggggagcccaacacctgcccccgctgcagcaagaaggtgtactttgctgagaaggtgaccagcctgggcaaggactggcaccggccctgcctgcgctgtgagcgctgtgggaagaccctgacccctgggggccacgccgagcatgatggccagccctactgccacaagccctgctacggcatcctgtttggccccaagggcgtgaacacaggagctgtgggcagctacatctatgaccgggaccctgagggcaaggtgcagccctag

SEQ ID NO: 95628 - DNA, 849 bp, Artificial Sequence
  derived and/or modified sequence
atgcccccccaccacctgctgccctggctggcccaggtgcccagcgcagagggcgagctggtacggctcgtgtcccgggccggtgggagaggcgcctgtttttggcccgccgttacaatggagatggccgtggcagccggatgcgtttgtaagggcggtggatgctgtcacagggaacctagccaggaccatcatgagtcacaagaacataggggacccctggtagggagtcagacatgcctcgtacaccaggccgaagggaccgcggaaaaagtgtccagcctcggcaaggattggcataaattctgtttgaagtgcgagagatgttctaaaacccttactcccggtggccatgctgagcatgatggcaaaccattctgccacaagccctgctatgcaacactgttcggccctaaaggggtgaacatcggaggcgctgggtcatatatttacgaaaagcctcttgctgaggggccgcaggttaccggtccgatcgaagtgcccgccgccagagccgaggagaggaaggccagcggcccacctaaagggccttccagagctagcagcgtaaccacgttcacaggagagccaaacacgtgccctcgatgtagcaaaaaagtgtattttgctgaaaaggtcacctcactggggaaagattggcatagaccgtgcctgaggtgtgagcggtgcgggaagacccttacccccggtggtcacgcggaacatgacggccagccatactgccataagccctgctatggcatattgtttggccccaagggagtgaacacgggggccgtcgggtcttatatttacgaccgggaccccgaaggcaaagtgcaaccttag

SEQ ID NO: 95629 - DNA, 849 bp, Artificial Sequence
  derived and/or modified sequence
atgccaccgcaccatttgctgccctggctcgcccaggtgccaagcgccgaaggcgagttagtgagactggtgtcgcgcgcagggggtcgtggagcctgcttttggcctgcggtgactatggaaatggccgttgccgcaggatgcgtctgtaaaggaggcggatgttgccatcgcgaacccagccaggatcatcacgagagtcaagagcaccgcggtcccctggtgggtagtcaaacgtgtctggttcaccaggccgaaggaaccgcggagaaggtgagctcccttggcaaggactggcacaagttttgtctgaaatgcgaaagatgctcaaaaacattaacacctggcggtcatgccgagcacgacggtaagcctttctgccacaaaccttgttacgccaccctcttcggacctaaaggtgtgaatattgggggagcaggcagttatatctacgaaaaacccctggccgaaggaccgcaggtcactgggccaattgaggtgcctgccgctagagctgaagaacgcaaggctagcggtcccccaaagggaccctctcgagccagcagcgttacaacgtttacaggggaacccaacacttgtccccgttgcagtaaaaaggtgtattttgcagagaaagtcacctctctgggcaaagattggcatcggccatgtctgaggtgtgaacgctgcgggaaaaccttgactcctggaggtcatgcggaacacgatgggcagccctattgccacaagccttgctatgggatattgtttgggccaaagggcgtaaacaccggcgctgtcggcagttacatctacgacagggatcccgaagggaaggtgcaaccatag

SEQ ID NO: 95630 - DNA, 1176 bp, Artificial Sequence
  derived and/or modified sequence
ggctggggaccttggggcaggtggtctccctccagaagagccctgtgttcagccagccctgtcctccagagcaagccccacaggtagcaagccccacaggtagcaaagtcagggagggtaatggcttagccccaggctcccaagctgggcagaacagggcagggagctggagagggtttggcagtgggcccatgaatccagcctgggcaaggccctgctgtgagggacccctagggacccctgggcctgccagggaggaagggctgcccagaaaaggtactgactgatgcctcctcaccatcttctgccttggctggcacaggtcccaagtgcagagggggagctggtcaggctggtcagtcgggcgggggggcggggggcatgtttctggcctgctgtcaccatggaaatggcagtggctgcagggtgtgtgtgcaagggaggagggtgctgccacagagagcccagccaggaccaccatgaaagccaggagcaccgagggcctctggttggctcacaaacatgcctggtgcaccaggcagagggaacagccgagaaggtgagctccctggggaaggactggcacaagttctgcctcaagtgcgagcgctgcagcaagacgctgacgcccgggggccacgccgagcatgacgggaagccgttctgccacaagccgtgctacgccaccctgttcggacccaaaggcgtgaacatcgggggcgcgggctcctacatctacgagaagcccctggcggaggggccgcaggtcaccggccccatcgaggtccccgcggcccgagcagaggagcggaaggcgagcggccccccgaaggggcccagcagagcctccagtgtcaccactttcaccggggagcccaacacgtgcccgcgctgcagcaagaaggtgtacttcgctgagaaggtgacgtctctgggcaaggattggcaccggccctgcctgcgctgcgagcgctgcgggaagacactgacccccggcgggcacgcggagcacgacggccagccctactgccacaagccctgctatggaatcctcttcggacccaagggagtgaacaccggtgcggtgggcagctacatctatgaccgggaccccgaaggcaaggtccagccctaggctacagcggctctcatgatgtgggctcacctgcgccccag

SEQ ID NO: 95631 - DNA, 849 bp, Artificial Sequence
  derived and/or modified sequence
atgcccccccaccacctgctgccctggctggcccaggtgcccagcgccgagggcgagctggtgagactggtgagcagagccggcggcagaggcgcctgcttctggcccgccgtgaccatggagatggccgtggccgccggctgcgtgtgcaagggcggcggctgctgccacagagagcccagccaggaccaccacgagagccaggagcacagaggccccctggtgggcagccagacctgcctggtgcaccaggccgagggcaccgccgagaaggtgagcagcctgggcaaggactggcacaagttctgcctgaagtgcgagagatgcagcaagaccctgacccccggcggccacgccgagcacgacggcaagcccttctgccacaagccctgctacgccaccctgttcggccccaagggcgtgaacatcggcggcgccggcagctacatctacgagaagcccctggccgagggcccccaggtgaccggccccatcgaggtgcccgccgccagagccgaggagagaaaggccagcggcccccccaagggccccagcagagccagcagcgtgaccaccttcaccggcgagcccaacacctgccccagatgcagcaagaaggtgtacttcgccgagaaggtgaccagcctgggcaaggactggcacagaccctgcctgagatgcgagagatgcggcaagaccctgacccccggcggccacgccgagcacgacggccagccctactgccacaagccctgctacggcatcctgttcggccccaagggcgtgaacaccggcgccgtgggcagctacatctacgacagagaccccgagggcaaggtgcagccctag

SEQ ID NO: 95632 - protein, 104 aa, Artificial Sequence
  derived and/or modified sequence
  misc_feature (1)..(1): Xaa can be any naturally occurring amino acid
XPGGERAEGAGRPGAPTMASKCPKCDKTVYFAEKVTSLGKDWHRPCLRCERCGKTLTPGGHAEHDGQPYCHKPCYGILFGPKGVNTGAVGSYIYDRDPEGKVQP

SEQ ID NO: 95633 - DNA, 315 bp, Artificial Sequence
  derived and/or modified sequence
tgaccaggcggggagcgtgctgaaggcgcaggacgcccgggagctccaaccatggcaagtaagtgcccaaaatgcgacaagactgtgtatttcgcggagaaggtgacttcactgggaaaagactggcacagaccctgtctccgatgcgagcggtgtgggaaaactttgaccccaggcggacatgctgagcacgacggccaaccctactgtcacaagccttgttatgggatactctttggccctaagggagtcaacaccggcgctgtcggctcgtatatctacgatagggacccagaaggaaaagtgcagccttag

SEQ ID NO: 95634 - DNA, 315 bp, Artificial Sequence
  derived and/or modified sequence
tgaccaggaggagagagagctgagggcgccggccggcctggggcccccaccatggccagcaaatgtcccaagtgtgacaagacagtgtactttgctgagaaggtgaccagcctgggcaaggactggcaccggccctgcctgcgctgtgagcgctgtgggaagaccctgacccctgggggccacgccgagcatgatggccagccctactgccacaagccctgctacggcatcctgtttggccccaagggcgtgaacacaggagctgtgggcagctacatctatgaccgggaccctgagggcaaggtgcagccctag

SEQ ID NO: 95635 - DNA, 315 bp, Artificial Sequence
  derived and/or modified sequence
tgacccggcggcgagcgggccgagggcgccggccggcccggcgccccaactatggcatcaaagtgcccaaaatgcgacaaaaccgtatactttgccgaaaaggtcacctctcttggcaaagactggcatagaccatgtctccggtgcgaaagatgcggaaaaactcttacccctggtggccatgctgagcacgatggacaaccttattgccataagccctgctacgggattctgtttggtcctaagggggtaaatacgggcgctgtcgggtcttatatctatgacagggatccggaggggaaagtacaaccgtag

SEQ ID NO: 95636 - DNA, 315 bp, Artificial Sequence
  derived and/or modified sequence
taaccgggaggggagcgagccgaaggcgctgggaggcctggcgcaccaacgatggcgagcaaatgccctaagtgcgataagacagtttacttcgccgaaaaggttacttcgctcggcaaggattggcatcgaccatgtttgcggtgcgagaggtgtgggaaaacactgacacccggtggccatgcagagcacgacggtcagccctactgccacaaaccatgttatggcatcctctttggacctaaaggcgtcaatacgggagcagttggaagctacatttatgatagagatcccgagggcaaggtacaaccctag

SEQ ID NO: 95637 - DNA, 817 bp, Artificial Sequence
  derived and/or modified sequence
gcccggaggagaacgggcggagggcgcgggccgaccgggcgcaccgaccatggcctccaaatgccccaagtgcgacaagaccgtgtacttcgctgagaaggtgacgtctctgggcaaggattggcaccggccctgcctgcgctgcgagcgctgcgggaagacactgacccccggcgggcacgcggagcacgacggccagccctactgccacaagccctgctatggaatcctcttcggacccaagggagtgaacaccggtgcggtgggcagctacatctatgaccgggaccccgaaggcaaggtccagccctaggctacagcggctctcatgatgtgggctcacctgcgccccagaccctgcaggggcccccctgcttggctctgctgggagagtgctcagccgcccagtcctgcctgcaagcccagggcgagtattggaggaggggcagccacgggcagagcaccatgcccatccccgagtctctggtgtgtctgccccctctggcatcctctgggcgtcccatgatcccttctgtgtctgcgtgtccgaatccccgtgtgaccctgtcccagcattttcccgccgaccctgcgtgtccccgtggcgctgtccgctctccctctcctgctgcccacccacctgccagtgttatttatgctcccttcgtgggtgatggccacgccctcaccatgtccctggcagagggcttccctccgggatcccctgcctggtgcccacactgcctcgcaagcgctcgccaccctcacgtggctcacctgctgttgagccttgtgctgtcaataaacggtttgagga

SEQ ID NO: 95638 - DNA, 315 bp, Artificial Sequence
  derived and/or modified sequence
tgacccggcggcgagagagccgagggcgccggcagacccggcgcccccaccatggccagcaagtgccccaagtgcgacaagaccgtgtacttcgccgagaaggtgaccagcctgggcaaggactggcacagaccctgcctgagatgcgagagatgcggcaagaccctgacccccggcggccacgccgagcacgacggccagccctactgccacaagccctgctacggcatcctgttcggccccaagggcgtgaacaccggcgccgtgggcagctacatctacgacagagaccccgagggcaaggtgcagccctag

SEQ ID NO: 95639 - protein, 253 aa, Artificial Sequence
  derived and/or modified sequence
MAPKLLLLLCLFSGLHARSRKVEEDEYEDSSSNQKWVLAPKSQDTDVTLILNKLLREYDKKLRPDIGIKPTVIDVDIYVNSIGPVSSINMEYQIDIFFAQTWTDSRLRFNSTMKILTLNSNMVGLIWIPDTIFRNSKTAEAHWITTPNQLLRIWNDGKILYTLRLTINAECQLQLHNFPMDEHSCPLIFSSYGYPKEEMIYRWRKNSVEAADQKSWRLYQFDFMGLRNTTEIVTTSAGRNLLKEAQLSKAREA

SEQ ID NO: 95640 - DNA, 1405 bp, Artificial Sequence
  derived and/or modified sequence
agagtagatacctgtcccgcccgccgcggccagcagcctcggaggaagccagggcaaagagggccggcggagaccaggtccgcgccggaggaagccgcgcccggccgaggccccggaccctgcgccccgagctccacggcaccatggccccgaagctgctgctcctcctctgcctgttctcgggcttgcacgcgcggtccagaaaggtggaagaggatgaatatgaagattcatcatcaaaccaaaagtgggtcttggctccaaaatcccaagacaccgacgtgactcttattctcaacaagttgctaagagaatatgataaaaagctgaggccagatattggaataaaaccgaccgtaattgacgttgacatttatgttaacagcattggtcctgtgtcatcaataaacatggaataccaaattgacatattttttgctcagacctggacagatagtcgccttcgattcaacagcacaatgaaaattcttactctgaacagcaacatggtggggttaatctggatcccagacaccatcttccgcaattctaaaaccgcagaggctcactggatcaccacacccaatcagctcctccggatttggaatgacgggaaaatcctttacactttgaggctcaccatcaatgctgagtgccagctgcagctgcacaacttccccatggacgaacactcctgcccgctgattttctccagctatggctatcccaaagaagaaatgatttatagatggagaaaaaattcagtggaggcagctgaccagaaatcatggcggctttatcagtttgacttcatgggcctcagaaacaccacagaaatcgtgacaacgtctgcaggtaggaatttactgaaagaggcacagctctcaaaagccagagaggcctaaggccatatgtagtcatatccttaatgtacaagccttttgggcaaccatgatacataagtgatatttgagacaaaacaagtgattcaaagtgaaactatgttttcatgttttaattggtatgggagagggatgttagaaataattcatatttttgaatccaggctgtgtttgcataatgtctataaacctagctataaacttaacctaactcattactgaccatatttacataaaccaattttgctgatggggagagttctgcaaatttccacgtacataagaagaatcaaatattattgagaatccacacataaaagaagctggtgtgatatgtcctttgagtttcaattgcttttatttactctaagttttatctttaactttgagtttctttttcaatgattgaaagtaattacctaccaatttgattttatgaagtgatcattatatgcatattcaaaatcctgtaattaaataaaaagagttgttctgcctatgaa

SEQ ID NO: 95641 - DNA, 762 bp, Artificial Sequence
  derived and/or modified sequence
atggcccccaaactgctgctcctcctctgcctgtttagcggcctgcatgctaggagccggaaggtcgaggaggacgaatacgaggattctagctcaaatcaaaagtgggtgctggcccctaaatcccaagacacggacgtcacactcatcctgaacaagctcctccgggagtacgataagaagcttagacccgacataggaatcaagccaacagtaattgacgtggatatctacgtgaacagtattggtccagtcagtagcatcaatatggagtatcagatagacatctttttcgcccagacctggacggacagcagactgcggttcaactctaccatgaagattctcacgttaaactctaacatggttggtctcatttggatcccggacaccatatttaggaattccaaaaccgctgaagcccattggataacgacgccgaaccagcttctgcgaatatggaatgacggcaagattttatacactctcaggcttactattaatgctgagtgtcagctgcagctccacaacttccccatggatgaacattcatgtccgctgattttttcatcttacggctatcctaaagaggagatgatctacaggtggcgtaaaaattctgtcgaggctgccgatcagaagagctggaggctataccagttcgattttatgggtttgcgtaatacaaccgagatcgtgacaacttctgccgggaggaacctgcttaaggaggctcagctttccaaagcacgcgaggcttag

SEQ ID NO: 95642 - DNA, 762 bp, Artificial Sequence
  derived and/or modified sequence
atggcccccaagctgctgctgctgctgtgcctcttcagcggcctgcacgcccggagcaggaaggtggaggaggatgaatatgaggacagcagcagcaaccagaagtgggtgctggcccccaagagccaggacacagatgtgaccctcatcctgaacaagctgctgcgggagtatgacaagaagctgcggccagacatcggcatcaagcccaccgtgattgatgtggacatctacgtgaacagcatcggccctgtgagcagcatcaacatggagtaccagattgacatcttctttgcccagacctggacagacagccggctgcgcttcaacagcaccatgaagatcctgaccctgaacagcaacatggtgggcctcatctggatcccagacaccatcttcaggaacagcaagacagctgaggcccactggatcaccacccccaaccagctgctgcgcatctggaatgatggcaagatcctgtacaccctgcggctgaccatcaatgctgagtgccagctgcagctgcacaacttccccatggatgagcacagctgccccctcatcttcagcagctatggctaccccaaggaggagatgatctaccgctggaggaagaacagcgtggaggccgctgaccagaagtcctggaggctgtaccagtttgacttcatgggcctgaggaacaccacagagatcgtgaccaccagcgctggaagaaacctgctgaaggaggcccagctgagcaaggcccgggaggcctag

SEQ ID NO: 95643 - DNA, 762 bp, Artificial Sequence
  derived and/or modified sequence
atggcccccaagctgctgctgctgctgtgcctgttcagcggcctgcatgcaaggagtcgcaaggtcgaggaagatgaatatgaagatagcagttccaatcaaaaatgggttctcgcccccaagtctcaggacaccgacgttacgttgatcttgaataagctgctaagagagtatgacaagaaacttagacccgatatcggcattaaacctacagttattgacgtcgacatttacgtaaatagcatcggccccgtgtccagtatcaacatggagtaccaaattgacatctttttcgctcagacatggaccgactctaggcttaggtttaatagtaccatgaaaatactgacactcaatagtaatatggtggggctcatctggattccggataccatctttcgaaacagcaagactgccgaggctcattggattacgacaccaaatcagttgctgcgaatatggaatgatggcaaaattttatatacccttagactcaccatcaatgctgaatgccagctccagcttcacaacttccctatggatgagcactcctgcccgctgatcttctcaagctacggttaccctaaggaagagatgatatataggtggcgaaaaaattcagttgaggccgctgaccagaaaagctggcggttgtaccagttcgatttcatgggccttaggaatactactgaaattgtgactacatcagccggcaggaatctgcttaaggaggctcaactgtctaaagcacgggaagcttag

SEQ ID NO: 95644 - DNA, 762 bp, Artificial Sequence
  derived and/or modified sequence
atggctcctaaactactgctgcttctctgtctgttcagtggactgcacgcgagatctaggaaagtggaggaagacgaatacgaggacagctcctcgaatcagaagtgggtccttgcacctaagagtcaggacaccgatgtgaccttaattttgaacaagctacttagagagtatgataaaaagctgaggccggatatcggaatcaaaccgactgtaattgacgtggatatctacgtgaattcaattggacccgtaagctcaatcaacatggaataccagatcgatatcttcttcgctcaaacgtggactgactccaggttacgctttaacagcacaatgaagattctgacgttaaattcgaatatggtgggacttatctggatccccgatacaatctttaggaattctaagaccgctgaggcacactggattaccactcccaaccaactcctgaggatctggaacgacggcaagatactatacactctacggttgactataaatgccgaatgtcaattacagctgcataactttccaatggacgagcattcatgcccattaatattcagcagctatgggtacccaaaggaggagatgatctatcggtggcgaaagaactcagtggaggccgctgatcagaaatcttggcgcctgtatcagttcgacttcatggggttgagaaatacaaccgaaatcgtcacgacctccgctggcagaaacctccttaaagaagcacagcttagcaaggctagagaggcttag

SEQ ID NO: 95645 - DNA, 762 bp, Artificial Sequence
  derived and/or modified sequence
atggcccccaagctgctgctgctgctgtgcctgttcagcggcctgcacgccagaagcagaaaggtggaggaggacgagtacgaggacagcagcagcaaccagaagtgggtgctggcccccaagagccaggacaccgacgtgaccctgatcctgaacaagctgctgagagagtacgacaagaagctgagacccgacatcggcatcaagcccaccgtgatcgacgtggacatctacgtgaacagcatcggccccgtgagcagcatcaacatggagtaccagatcgacatcttcttcgcccagacctggaccgacagcagactgagattcaacagcaccatgaagatcctgaccctgaacagcaacatggtgggcctgatctggatccccgacaccatcttcagaaacagcaagaccgccgaggcccactggatcaccacccccaaccagctgctgagaatctggaacgacggcaagatcctgtacaccctgagactgaccatcaacgccgagtgccagctgcagctgcacaacttccccatggacgagcacagctgccccctgatcttcagcagctacggctaccccaaggaggagatgatctacagatggagaaagaacagcgtggaggccgccgaccagaagagctggagactgtaccagttcgacttcatgggcctgagaaacaccaccgagatcgtgaccaccagcgccggcagaaacctgctgaaggaggcccagctgagcaaggccagagaggcctag

SEQ ID NO: 95646 - DNA, 201 bp, Artificial Sequence
  derived and/or modified sequence
atgaagaagagccccgagatcatcagcggcagaatgaccttcgccctgtgctgctacagcctgaccttcatgagattcgcctacaaggtgcagcccagaaactggctgctgttcgcctgccacgccaccaacgaggtggcccagctgatccagggcggcagactgatcaagcacgagatgaccaagaccgccagcgcctag

SEQ ID NO: 95647 - DNA, 201 bp, Artificial Sequence
  derived and/or modified sequence
atgaaaaagtcaccagaaattataagtggaagaatgactttcgccctgtgctgttactcgttaactttcatgcgctttgcctataaagttcaacctcggaactggctgctcttcgcatgccatgccactaatgaggtggctcagttaatacagggcggaagattgatcaagcatgagatgacgaaaaccgcttcagcctag

SEQ ID NO: 95648 - DNA, 201 bp, Artificial Sequence
  derived and/or modified sequence
atgaagaagagccctgagatcatcagcggccgcatgacctttgccctgtgctgctacagcctgaccttcatgagatttgcctacaaggtgcagcccaggaactggctgctgtttgcctgccacgccaccaatgaggtggcccagctgatccagggcggccgcctcatcaagcatgagatgaccaagacagccagcgcctag

SEQ ID NO: 95649 - DNA, 201 bp, Artificial Sequence
  derived and/or modified sequence
atgaagaagagccccgagatcatcagcggccggatgaccttcgccttgtgttgctattctttgacctttatgcgctttgcttacaaggtgcagccaaggaattggctcctgtttgcttgtcatgccacaaacgaggtggctcagctaatccagggaggccgcctcatcaagcacgagatgacaaagacagccagcgcttag

SEQ ID NO: 95650 - DNA, 201 bp, Artificial Sequence
  derived and/or modified sequence
atgaagaagagcccagaaattatttctgggaggatgactttcgctctgtgttgttactcactgacattcatgcgcttcgcttataaggtgcagcccagaaattggctactgtttgcttgccacgctaccaacgaggttgctcagctcatccaaggtggaagactgattaagcacgaaatgaccaagaccgcctcagcgtag

SEQ ID NO: 95651 - protein, 242 aa, Artificial Sequence
  derived and/or modified sequence
MRLVILDNYDLASEWAAKYICNRIIQFKPGQDRYFTLGLPTGLPRNHPESYHSYMWNNFFKHIDIDPNNAHILDGNAADLQAECDAFENKIKEAGGIDLFVGGIGPDGHIAFNEPGSSLVSRTRLKTLAMDTILANAKYFDGDLSKVPTMALTVGVGTVMDAREVMILITGAHKAFALYKAIEEGVNHMWTVSAFQQHPRTIFVCDEDATLELRVKTVKYFKGLMHVHNKLVDPLFSMKDGN

SEQ ID NO: 95652 - DNA, 639 bp, Artificial Sequence
  derived and/or modified sequence
atgaagttaattatactggaacattacagccaggcttctgaatgggctgcgaagtatatccggaaccggatcatccagtttaatccaggaccagagaagtattttactctgggtcttccaaccgggtccacgccactcggctgctacaagaagttgatcgaatactacaagaacggagacctctcattcaagtatgtgaagactttcaatgaacctgggagttccttggtgtctagaactagggtcaaaacattggctatggataccatcctagccaacgcgagattctttgatggggagttgacaaaggtgccaaccatggctctcacagttggggttggtacagttatggatgcgagagaagtgatgatcctcatcaccggggcccacaaagccttcgccctatataaagccatcgaggagggagtgaaccacatgtggacagtgtctgcctttcaacagcatccccggactgttttcgtctgcgatgaagacgcgacactcgagctgaaagtcaaaaccgtgaaatattttaagggactcatgctggtccacaacaagctggtggacccactgtactccatcaaggagaaggagaccgaaaagagccaatcttctaaaaagccttacagcgattag

SEQ ID NO: 95653 - DNA, 729 bp, Artificial Sequence
  derived and/or modified sequence
atgcgtcttgtgattcttgataactatgaccttgcaagtgagtgggcagcaaagtatatctgcaatcggatcatccaatttaagccgggccaggacagatatttcacactgggattgcctaccggccttcctagaaaccaccctgagagttaccattcctatatgtggaataacttttttaaacacatcgacatagatcccaacaatgcccacatcctggatggtaatgctgccgacctgcaagcagagtgtgacgcctttgagaacaagatcaaggaggccgggggcatcgaccttttcgttggcgggatagggcctgatggtcacatcgccttcaatgaacctgggtccagccttgtatcacgcaccaggctgaagacgttagcaatggacactatcctggcaaacgcgaagtattttgacggagatctgagcaaagtgccaactatggccctgaccgttggtgtgggcacagttatggatgcacgcgaggtaatgatactgattacaggagcccacaaagcatttgcactgtacaaggccattgaggagggcgtgaaccacatgtggactgtgtcggcctttcagcagcacccacgcactatctttgtgtgtgatgaggacgcaactctggagctgagggtgaaaactgtgaagtactttaaagggctgatgcatgtgcataacaagctagtggatccactgtttagtatgaaagatggtaactag

SEQ ID NO: 95654 - DNA, 1063 bp, Artificial Sequence
  derived and/or modified sequence
gcagtcgctgcagccgccgcgggaggcgtccgtgacaagatgaagctcatcatcctggagcactattctcaggcgagcgagtgggcggctaaatacatcaggaaccgcatcatccagtttaacccagggccagagaagtacttcaccctggggctccccactgggagtaccccacttggctgctacaagaagctgattgaatactataagaatggggacctgtcctttaaatatgtgaagaccttcaacgagccaggctccagtctggtgtccaggacccgtgtgaagacgctggccatggataccatcctggccaatgctaggttcttcgatggagaactcaccaaggtgcccaccatggccttgacggtgggggtgggcactgtcatggatgctagagaggtgatgatccttatcacaggtgctcacaaggcatttgctctgtacaaggccatcgaggagggagtgaaccacatgtggaccgtgtctgccttccagcagcatccccgcaccgtgtttgtgtgtgacgaggatgccaccttggagctgaaagtgaagactgtcaagtatttcaaaggtttaatgcttgttcataacaagttggtggaccccttgtacagtatcaaagagaaagaaactgagaaaagccaatcttcgaagaaaccatacagcgattagcctgtgctgggacctagtgtcaagtacccatagggaaaggcaggtctttctggaaattgtctttagaagaaagaattgtatttctttaatctagtatggttactccagataagtgggtgaacttattgttcttggccatgaggctgggagcctagtcacggagtttagctatagggagaatgtttgtaacttaatcagaaaaaaaatatctgcaaaatgtactccatcattttgatgtctgccaaacccaggttgggagttttaaactttttgttctgcttcagccatggttcacacatatgacacactcccgtcaggaatttctctccttacacgcactgattttcaagtgggagggaattaggggcttatgtatattggatac

SEQ ID NO: 95655 - DNA, 2074 bp, Artificial Sequence
  derived and/or modified sequence
gggattcgcgctccactggtcagctggggtcgctctcgggtggttgggtgttgcttgttcccgctgttccagcatcgaagaaccattgggtctgccggtttgaacttgttctggaagctgtgcgtcaccgtaatgaggcttgtaattcttgataactatgacttggctagtgaatgggcagccaaatacatctgtaatcgcatcattcagttcaaacctggacaggacagatattttacactgggtttaccaacaggacttccaagaaatcatcctgaaagctaccattcttatatgtggaataatttttttaagcatatcgatatagatcctaataatgcacatatccttgacgggaatgctgcagatttacaagcagaatgtgatgcttttgaaaacaaaataaaagaagctggaggaatagatctttttgttggaggaattggtccagatggtcatatcgctttcaatgagcctggatccagtttagtgtcaaggacaagattaaagactctagcaatggataccatcttggcaaatgccaaatattttgatggagatttatcaaaagtgccaactatggctctaactgttggtgtggggacagtgatggatgctagagaagtaatgatccttataacaggggcacacaaggcatttgccctgtacaaagcaatagaagaaggagtcaatcacatgtggactgtttccgctttccagcagcatccccggactatttttgtatgcgatgaagatgctactttagaattaagagttaaaactgtgaaatactttaaaggtctaatgcatgtgcacaataaacttgtggatccactattcagtatgaaagatggaaactgaaggagactggagcaaaattcagcttgaatgaacagagcactttttactaagtagtagatgaattttcagctatgcaatatgacaaaacatggggaattttgaagattgtcattttttcattcgagtctctatgttaaacattccatattttgaatatttatatcttgtacttgggtttaagagaagtagctggctctcaagattgactggctatttattataaagtactgaagtcacatagccacctataaaacagcatagaaatgtctgcctgtttaaaaagtcattttaaaggtagagtgtccacatcaggcaccatttgtgatatgactccagtggcgtatatttcattttttaatgacaagacactccaaacctttcagataacaaactatcattgcagaccttcacttttggaatgcaatctttatattttctgtgcatcacacacatgcttttctgcacgtggttgccttagtcatcttcctacagcaccatctagacatcaaaaattgtgctatatatcattggtaaaggaaatttgaagagatgacagtgcctaaaagtacagtttacatccttttggaaagtatgtgtaagtgcatgttttttgtgcaccttcttctatagcacttttttacaaatatcttatttttatttaacgacttgggttcatgtccctaatataagtatcttgacaattatgagctttatacctagcaagccacttcaggaaattcttttggagaatattttctgattattgttaaacttaatatacaattagctttattccttataaaatgtctaaaagaataatacgaagtatatataaaaggaattactgtaaactacattgccatagcaatttacataaaagtatattgttttttatctttaactcaaataaagcgtgtaataaataagttatctaaatttccagaagtgaacctgaagaatacatgcattcgactcccaacaattatagtacatgtgaacctgcattcattttgggtttgttaccatcatgcattaggagagttaggttaaaagatgtctttgcctctgtggggagcaaaaaaatgctccttttgcttattttgcatttcataagcccacctggtagaagaagccttacttatctgcttgtctatgtgattaaaatgtagtttcttaaaatattaaaatagcaaataaattaatgaaataaaat

SEQ ID NO: 95656 - DNA, 639 bp, Artificial Sequence
  derived and/or modified sequence
atgaagctgatcatcctggagcactacagccaggccagcgagtgggccgccaagtacatccggaaccgcatcatccagttcaaccctggccctgagaagtacttcaccctgggcctgcccaccggcagcacccccctgggctgctacaagaagctgattgagtactacaagaatggagacctgtccttcaagtatgtgaagaccttcaatgagcccggcagcagcctggtgtccaggaccagggtgaagaccctggccatggacaccatcctggccaatgcccgcttctttgatggagagctgaccaaggtgcccaccatggccctgactgtgggcgtgggcaccgtgatggatgcccgggaggtgatgatcctgatcactggagcccacaaggcctttgccctgtacaaggccatcgaggagggcgtgaaccacatgtggacagtgtctgccttccagcagcaccccaggacagtgtttgtgtgtgatgaagatgccaccctggagctgaaggtgaagacagtgaagtacttcaagggcctgatgctggtgcacaacaagctggtggaccccctgtacagcatcaaggagaaggagacagagaagagccagagcagcaagaagccctacagcgactag

SEQ ID NO: 95657 - DNA, 729 bp, Artificial Sequence
  derived and/or modified sequence
atgaggctggtgatcctggacaactatgacctggccagcgagtgggccgccaagtacatctgcaaccgcatcatccagttcaagccaggccaggaccgctacttcaccctgggcctgcccaccggcctgcccaggaaccaccctgagagctaccacagctacatgtggaacaacttcttcaagcacattgatattgaccccaacaatgcccacatcctggatggaaatgctgctgacctgcaggctgaatgtgatgcctttgagaacaagatcaaggaggccggcggcatcgacctgtttgtgggcggcatcggcccagatggccacatcgccttcaatgaacctggcagcagcctggtgtccaggacccggctgaagaccctggccatggacaccatcctggccaatgccaagtactttgatggagacctgagcaaggtgcccaccatggccctgactgtgggcgtgggcaccgtgatggatgcccgggaggtgatgatcctgatcaccggggcccacaaggcctttgccctgtacaaggccatcgaggagggcgtgaaccacatgtggacagtgtctgccttccagcagcaccccaggaccatctttgtgtgtgatgaagatgccaccctggagctgcgggtgaagacagtgaagtacttcaagggcctgatgcacgtgcacaacaagctggtggaccccctcttctccatgaaggatggcaactag

SEQ ID NO: 95658 - DNA, 639 bp, Artificial Sequence
  derived and/or modified sequence
atgaagctgatcatcctggagcactacagccaggccagcgagtgggcagctaagtacatacgaaataggattattcagtttaatcccggtccagaaaagtattttacactgggtctgcccacaggatcaaccccactgggatgttataagaagcttatcgaatactacaaaaatggggatttgtcattcaagtacgttaaaactttcaatgagccaggttcctctctggtatctagaacccgagtaaagaccttggcgatggatacaatcctggctaacgctcggttcttcgatggcgagttaactaaggtccctacaatggctctcaccgtaggcgtcgggaccgtcatggatgctcgggaggtaatgatactcatcaccggtgctcataaagcctttgcattgtacaaggccattgaagagggagttaaccatatgtggactgtgtccgcctttcagcaacacccaaggacggttttcgtttgcgacgaggacgcaactttagaactgaaagtgaaaacagtgaaatacttcaagggcctgatgctcgttcataataagctggtggaccccctgtactctatcaaggagaaggagacagagaaaagtcagtcttccaagaagccttatagcgactag

SEQ ID NO: 95659 - DNA, 729 bp, Artificial Sequence
  derived and/or modified sequence
atgcggctggtgatcctggacaactacgacctggccagcgagtgggccgccaagtacatttgcaatagaattattcaattcaaaccaggccaggatcgctatttcacacttggactgcctaccggccttcccaggaaccaccctgaatcatatcactcatatatgtggaataattttttcaagcacatcgacatcgaccccaataatgctcacattctggacgggaacgcagctgacctgcaggccgagtgcgacgctttcgagaacaaaataaaagaggcagggggtatcgatttgtttgtgggtggcattggccctgatggccatattgccttcaacgaacctggaagtagcctggtttcccggacgcggttgaaaacacttgcgatggataccatcctggccaatgcaaaatactttgacggggacctgagcaaggtgcccaccatggctctaaccgtgggagttggaacagttatggatgctcgcgaggtcatgatcctcatcaccggcgctcacaaagccttcgctttgtacaaagcaattgaggaaggagttaatcatatgtggacggtgtctgcattccagcagcacccacggactatcttcgtctgtgatgaagatgccacccttgaactgcgcgtgaaaacagtcaaatatttcaagggcctgatgcatgtccataataagctggtggaccctctgttctccatgaaagatggaaactag

SEQ ID NO: 95660 - DNA, 639 bp, Artificial Sequence
  derived and/or modified sequence
atgaagctcattatcctggaacactattctcaggccagcgaatgggcagcaaagtacattcgcaacagaataatacagtttaaccctggccctgagaaatacttcacgctggggctcccgaccggatcaaccccactcggatgctataagaaattgattgaatactacaagaacggagacctcagctttaaatacgtaaaaacgtttaacgaacccggaagctctctcgtatctcgcacacgcgtgaagacattggcgatggacaccatcctggcaaatgcgcgtttcttcgacggagagttaaccaaggtgccaacaatggccctaactgtaggggtgggcaccgttatggatgcaagagaggttatgatactgattactggcgcacataaggcttttgcactatataaggctatcgaagaaggcgtgaatcacatgtggaccgtgagcgcgtttcagcagcaccctcggaccgtcttcgtctgcgatgaagacgccactttagaacttaaagtcaagacagttaagtatttcaaaggactgatgcttgtacataacaaactcgtcgatcctctgtattctattaaagagaaagagacggaaaagtctcagagcagcaagaagccttactctgactag

SEQ ID NO: 95661 - DNA, 729 bp, Artificial Sequence
  derived and/or modified sequence
atgcgactggtaatccttgataactatgatcttgcaagcgagtgggctgcgaagtacatatgcaataggataatccagtttaaaccaggccaggataggtactttactttgggcctaccaacaggactccctcggaaccaccccgaaagctaccacagctacatgtggaataatttttttaagcatattgacattgatccaaataatgctcatattttggatgggaatgctgccgatctacaggcagagtgtgatgccttcgaaaacaagatcaaggaggctggtggtatcgacctgtttgtggggggtattggccctgacgggcacatagcgttcaatgaacctggttcaagcctcgtatctcgaacccggctgaagaccctggcgatggatacaattcttgccaacgccaaatatttcgatggagacctgtccaaggtccccacaatggcacttaccgtgggcgtcggcacagtgatggacgcacgggaagtcatgattctgataaccggggcacataaggcttttgcactgtataaggccattgaggagggcgtaaaccacatgtggactgtgtccgccttccagcagcaccctcgaaccatatttgtctgtgatgaggacgctacgcttgaactgcgcgtaaaaacagtaaagtatttcaaagggttaatgcacgtgcacaataagctggtcgatcccctgtttagtatgaaagacggtaattag

SEQ ID NO: 95662 - DNA, 639 bp, Artificial Sequence
  derived and/or modified sequence
atgaagctgatcatcctggagcactacagccaggccagcgagtgggccgccaagtacatcagaaacagaatcatccagttcaaccccggccccgagaagtacttcaccctgggcctgcccaccggcagcacccccctgggctgctacaagaagctgatcgagtactacaagaacggcgacctgagcttcaagtacgtgaagaccttcaacgagcccggcagcagcctggtgagcagaaccagagtgaagaccctggccatggacaccatcctggccaacgccagattcttcgacggcgagctgaccaaggtgcccaccatggccctgaccgtgggcgtgggcaccgtgatggacgccagagaggtgatgatcctgatcaccggcgcccacaaggccttcgccctgtacaaggccatcgaggagggcgtgaaccacatgtggaccgtgagcgccttccagcagcaccccagaaccgtgttcgtgtgcgacgaggacgccaccctggagctgaaggtgaagaccgtgaagtacttcaagggcctgatgctggtgcacaacaagctggtggaccccctgtacagcatcaaggagaaggagaccgagaagagccagagcagcaagaagccctacagcgactag

SEQ ID NO: 95663 - DNA, 729 bp, Artificial Sequence
  derived and/or modified sequence
atgagactggtgatcctggacaactacgacctggccagcgagtgggccgccaagtacatctgcaacagaatcatccagttcaagcccggccaggacagatacttcaccctgggcctgcccaccggcctgcccagaaaccaccccgagagctaccacagctacatgtggaacaacttcttcaagcacatcgacatcgaccccaacaacgcccacatcctggacggcaacgccgccgacctgcaggccgagtgcgacgccttcgagaacaagatcaaggaggccggcggcatcgacctgttcgtgggcggcatcggccccgacggccacatcgccttcaacgagcccggcagcagcctggtgagcagaaccagactgaagaccctggccatggacaccatcctggccaacgccaagtacttcgacggcgacctgagcaaggtgcccaccatggccctgaccgtgggcgtgggcaccgtgatggacgccagagaggtgatgatcctgatcaccggcgcccacaaggccttcgccctgtacaaggccatcgaggagggcgtgaaccacatgtggaccgtgagcgccttccagcagcaccccagaaccatcttcgtgtgcgacgaggacgccaccctggagctgagagtgaagaccgtgaagtacttcaagggcctgatgcacgtgcacaacaagctggtggaccccctgttcagcatgaaggacggcaactag

SEQ ID NO: 95664 - protein, 296 aa, Artificial Sequence
  derived and/or modified sequence
MAAEARVSRWYFGGLASCGAACCTHPLDLLKVHLQTQQEVKLRMTGMALRVVRTDGILALYSGLSASLCRQMTYSLTRFAIYETVRDRVAKGSQGPLPFHEKVLLGSVSGLAGGFVGTPADLVNVRMQNDVKLPQGQRRNYAHALDGLYRVAREEGLRRLFSGATMASSRGALVTVGQLSCYDQAKQLVLSTGYLSDNIFTHFVASFIAAAGDEPPPQGGCATFLCQPLDVLKTRLMNSKGEYQGVFHCAVETAKLGPLAFYKGLVPAGIRLIPHTVLTFVFLEQLRKNFGIKVPS

SEQ ID NO: 95665 - DNA, 891 bp, Artificial Sequence
  derived and/or modified sequence
atggcagctgaggcaagagtttcgaggtggtattttggcgggctggcttcctgtggggcagcctgctgcacgcatccactagacctgttgaaggtgcatctgcagacacagcaggaggtgaaactacgcatgacggggatggccctcagagtggttaggactgacggtatcctggcgttatactcgggactgtcagccagcctctgccgacagatgacctatagccttactagatttgcaatctatgagaccgtgcgcgatagggtggccaagggctctcagggccccctgccatttcatgaaaaagtgctcttagggtccgtctccggacttgccggcgggttcgtgggcactccagctgatttggtcaacgtccgcatgcagaacgacgtgaagttgccccagggtcagcgtcgcaattacgcccacgctctggatgggctctatcgtgtggcacgcgaggaggggttgagacgactcttcagcggggctaccatggccagcagccgaggggcactggtcacagtgggccagctctcctgttatgatcaggccaagcaattagtgctatcgacgggctacctgagcgacaacatatttacgcacttcgtcgccagttttatagccgctgcaggcgacgagccgccgccgcagggcggttgtgctaccttcctctgtcagcctctggacgtcttgaaaaccagattgatgaattcaaagggggagtatcagggggtgtttcactgtgcagtggaaactgccaaattgggcccgctggcgttttacaagggcctggtgcctgctggcattcgtctcatcccccatacagttctcacattcgtgtttctggagcagcttagaaagaattttggcattaaggtgccgagttag

SEQ ID NO: 95666 - DNA, 891 bp, Artificial Sequence
  derived and/or modified sequence
atggctgctgaggcccgggtgagccgctggtactttggaggcctggccagctgtggggccgcctgctgcacccaccccctggacctgctgaaggtgcacctgcagacccagcaggaggtgaagctgaggatgacaggcatggccctgcgggtggtgaggacagatggcatcctggccctgtacagcggcctgagcgccagcctgtgccggcagatgacctacagcctgaccaggtttgccatctatgagaccgtgcgggacagagtggccaagggcagccagggccccctgcccttccacgagaaggtgctgctgggctctgtgtctggcctggccggcggctttgtgggcaccccagctgacctggtgaatgtgaggatgcagaatgatgtgaagctgccccagggccagaggagaaattatgcccacgccctggatggcctgtacagagtggcccgggaggagggcctgcggcggctcttcagcggggccaccatggccagcagcagaggagccctggtgacagtgggccagctgagctgctatgaccaggccaagcagctggtgctgagcacaggctacctgagtgacaacatcttcacccactttgtggccagcttcatcgctgctgctggagatgagcccccaccccagggcggctgtgccaccttcctgtgccagcccctggatgtgctgaagacccggctgatgaacagcaagggggagtaccagggcgtcttccactgtgctgtggagacagccaagctgggccccctggccttctacaagggcctggtgcctgctggcatccgcctcatcccccacacagtgctgacctttgtgttcctggagcagctgaggaagaactttggcatcaaggtgcccagctag

SEQ ID NO: 95667 - DNA, 1945 bp, Artificial Sequence
  derived and/or modified sequence
cgcgcgggcggcgctttgaaccgggcgcggggcgcggggcgcggggcgctgcggccggtacacgccggggtagggccggggtcgggttgtggtcgggccgggattgggctctcctgggccatggcagccgaggcgcgcgtgtcgcgctggtacttcggggggctggcctcctgcggggccgcctgctgcacgcacccgctggacctgctcaaggtgcatctgcagacgcagcaggaggtgaagctgcgcatgacgggcatggcgctgcgggtggtgcgtaccgacggcatcctggcactctacagcggcctgagcgcctcgctgtgcagacagatgacctactccctgactcggttcgccatctacgagactgtgcgggaccgtgtggccaagggcagccaggggcctctccccttccacgagaaggtgttgctgggctccgtcagcggtttagctggaggcttcgtggggacgcccgcagacttggtcaacgtcaggatgcagaacgacgtgaagctgccccagggtcagcggcgcaactacgcccatgcgctggatggcctgtaccgcgtagctcgtgaagagggtctcaggagactgttctcgggtgcaaccatggcatccagccgaggggccttagtcactgtgggccagctgtcctgctacgaccaggccaagcagctggtccttagcaccgggtacctctctgacaacatcttcactcactttgtcgccagctttattgcagccgctggtgacgagccccctcctcagggtggatgtgccacgttcctgtgccagcccctggatgtgctgaagactcgcctgatgaactccaagggggagtatcagggcgttttccactgcgccgtggagacagcgaagctcgggcctctggccttttacaagggcctcgtcccagctggcatccgcctcatcccccacaccgtgctcacttttgtgtttctggaacagctacgcaaaaactttggcatcaaagtgccatcctgaccagccgtgggaatggctgggctgccaggccagacacgctaggttcttccaaagagtcccaagcccagcacctgctcctggggccacgacctccctggccgtggccacccgtcctccgcagcaggcccctgctgtccccccacctgctggctgagctcctcctggcctcgtcccctctcagctgtagctgcaccacccccgctctggctaccaggctctcccggctgggcactgcgtggccttgcccctctcccgctggcagctcctcaggggaacaggggctaccagaggctgatttctcccctctcctgggccaggggaggggtattatccctgcctcctgcccccgatgcccaaagcagcatcttccagcactttccatcgaggacttgggtggcagagtgtgggtgcagcctggctgttgctcacccaagtgctagctctgcacttcgtgtctgctgagagcaaccagaccttccatgtcctcgggcagctgcaactccccgcgagaccccgcagctgggtgggatgaacaagcaacgcagaccacaagcgagtgcctgggagggagtggcccagggtggttctggagccattgtgggtgagggtcgagggccaccgaggtcccgcgcaccgctgcctgccctgcagtggctttaacagttagttttgccaaagcctctccactcaccagcaggcggtctctgtcttcagggattgtgcctgcgtccctcgggcacctgggcccccccgcttggctccctgggggaatggcccaggcgggccgcggttcctccttagggccttctccccgacaaggagtccgacggggcggatgctgcatcctctgcctccctggtcgctgggcttcaccccacctgggaagggcagtgtgctctgtgggggctgcaatcaataaatgccgggagctgcc

SEQ ID NO: 95668 - DNA, 891 bp, Artificial Sequence
  derived and/or modified sequence
atggccgccgaggcccgggtgagccggtggtacttcggcggcctggcttcttgtggagcagcatgctgtacccatcccctggatctgttgaaggtgcacctgcagacccagcaggaggtaaagcttcgcatgactggcatggccctcagggtcgtgcgtactgatggaattttggccctgtatagcgggctaagtgcatcgctgtgccgccagatgacttattccctcactagatttgccatatatgaaacggtgcgcgatagagtggccaaaggaagtcagggccctctcccatttcatgagaaagtgcttttgggcagcgttagtggcctcgccggggggtttgttggaaccccggccgacctggttaacgtgcggatgcagaacgacgtgaagcttccacaaggacagcgaaggaattacgctcatgcccttgacggactgtaccgtgtggcccgtgaggagggcctccgaaggctcttctccggcgccaccatggcctcgtcccgtggcgcacttgttaccgtcggtcaactctcttgttacgaccaggccaaacaattggtgctctccaccggctatctctccgacaatatattcactcacttcgtcgcttcctttatcgctgccgccggtgacgagcctcctccacagggcggctgcgccacgttcctctgccagcctcttgacgttttaaagaccaggctgatgaatagtaaaggcgagtatcagggagtgttccattgcgccgtggagactgcaaaactcggacctctggccttttacaagggcctcgtgccggcaggaatcagactgatcccccatacagtgttgacgtttgtctttctggagcagctcagaaagaacttcggcatcaaggtaccttcttag

SEQ ID NO: 95669 - DNA, 891 bp, Artificial Sequence
  derived and/or modified sequence
atggccgcagaagcaagggtgtcaaggtggtactttggtgggctcgcttcctgtggtgcagcgtgctgtacacaccctctggatctcctcaaggttcaccttcagacccagcaggaagtaaaactgcgcatgaccgggatggcattgagagtcgtaaggactgacggaatattggccctgtactccgggctctctgcctctttgtgccgacaaatgacttactcccttacacgcttcgccatctatgaaacggtgagagatagggtcgccaaaggttcccagggcccactgcccttccacgagaaggtcctgctgggatccgtttccggcctcgcgggagggttcgtgggcacgcctgccgacctcgtcaacgtgaggatgcaaaatgacgtcaaattaccccagggacagaggcgaaactacgcgcatgctttagatggcctttatagagtagcaagggaagaaggcctccgcagattgttttcaggggcaactatggcaagcagtcggggagcccttgtgactgtgggacagctatcttgctacgatcaggcaaagcagctcgttctgtctactggatacctgagcgacaacatcttcacccactttgtggcctcctttatcgccgcagctggcgacgagcccccaccgcaaggtgggtgcgccacatttctgtgccagcccttagatgttctcaagacacgactgatgaactctaagggtgagtaccaaggggtttttcattgcgcggtcgaaaccgctaagttgggcccactcgcattctataaagggttggtgcccgctggaatcagattaataccccacactgtgctgaccttcgtctttcttgagcagctcagaaagaacttcgggattaaagtcccgtcctag

SEQ ID NO: 95670 - DNA, 891 bp, Artificial Sequence
  derived and/or modified sequence
atggccgccgaggccagagtgagcagatggtacttcggcggcctggccagctgcggcgccgcctgctgcacccaccccctggacctgctgaaggtgcacctgcagacccagcaggaggtgaagctgagaatgaccggcatggccctgagagtggtgagaaccgacggcatcctggccctgtacagcggcctgagcgccagcctgtgcagacagatgacctacagcctgaccagattcgccatctacgagaccgtgagagacagagtggccaagggcagccagggccccctgcccttccacgagaaggtgctgctgggcagcgtgagcggcctggccggcggcttcgtgggcacccccgccgacctggtgaacgtgagaatgcagaacgacgtgaagctgccccagggccagagaagaaactacgcccacgccctggacggcctgtacagagtggccagagaggagggcctgagaagactgttcagcggcgccaccatggccagcagcagaggcgccctggtgaccgtgggccagctgagctgctacgaccaggccaagcagctggtgctgagcaccggctacctgagcgacaacatcttcacccacttcgtggccagcttcatcgccgccgccggcgacgagccccccccccagggcggctgcgccaccttcctgtgccagcccctggacgtgctgaagaccagactgatgaacagcaagggcgagtaccagggcgtgttccactgcgccgtggagaccgccaagctgggccccctggccttctacaagggcctggtgcccgccggcatcagactgatcccccacaccgtgctgaccttcgtgttcctggagcagctgagaaagaacttcggcatcaaggtgcccagctag

SEQ ID NO: 95671 - DNA, 1344 bp, Artificial Sequence
  derived and/or modified sequence
atgccggacctggagaaccgcgtgctggatcaaatcgaattcttagatacaaagtacagcgttggtatccataatctgctggcctacgttaaacacctgaagggacagaacgaggaggcgttgaaaagcctaaaagaggcagagaatctgatgcaggaggaacacgataatcaggcaaatgtgaggagcctggtgacatggggcaatttcgcttggatgtattaccatatgggacgcctggccgaagctcagacatatctcgataaagtcgagaatatttgcaaaaaactctcgaaccccttcaggtatcgaatggagtgtcccgagatcgactgcgaagaagggtgggcactactgaagtgtggcggcaaaaattacgagcgcgctaaggcttgttttgagaaggttcttgaagtcgatccagagaaccccgagtcctctgctggatatgcaatctcggcctatcgtttagacgggttcaagctcgctacgaagaatcacaagcctttttcgcttctgcccctgaggcaggctgttagactcaacccagacaacggctacatcaaggttctcttagcactcaagctgcaggacgaaggtcaagaggctgagggtgagaagtacatcgaggaggccctggccaatatgtcctctcagacatacgtctttcgttacgccgccaaattctataggcgcaagggctctgtggacaaggcactcgaacttcttaagaaagcactgcaggagacaccaacctccgtgctgctgcatcaccagattggcctttgctataaggcccagatgatccagattaaggaagcgacgaaagggcagcctaggggccaaaaccgcgaaaaactggataagatgatccgctcagccatctttcacttcgaaagtgctgtcgagaaaaagcccactttcgaagtagcacacctggatctggctaggatgtatatcgaggccggcaaccatcgcaaggcagaggagaattttcagaaactcttgtgtatgaagccggtcgttgaggagactatgcaggatatccattttcactatgggagatttcaggagttccaaaaaaagtcggacgtgaacgccattatccactacttgaaagcaattaagatagaacaggctagtctgactagagacaagagcatcaattcactgaaaaagcttgtgttgaggaagctgaggagaaaagccctagatctggagtcactttcattattgggctttgtctacaagcttgagggtaatatgaatgaagcactggaatactacgagcgagcgctgcgcctcgctgccgacttcgaaaacagcgtgaggcaggggccttag

SEQ ID NO: 95672 - DNA, 1344 bp, Artificial Sequence
  derived and/or modified sequence
atgccagacctggagaacagagtgctggaccagatcgagttcctggacaccaagtacagcgtgggcatccacaacctgctggcctacgtgaagcacctgaagggccagaatgaggaggccctgaagagcctgaaggaggccgagaacctgatgcaggaggagcatgacaaccaggccaacgtgcgcagcctggtgacctggggcaactttgcctggatgtactaccacatgggccgcctggccgaggcccagacctacctggacaaggtggagaacatctgcaagaagctgagcaaccccttccgctacaggatggagtgcccagaaattgactgtgaggagggctgggccctgctgaagtgtggcggcaagaactatgaaagagccaaggcctgctttgagaaggtgctggaggtggaccctgagaaccctgagagcagcgctggctacgccatcagcgcctaccgcctggatggcttcaagctggccaccaagaaccacaagcccttcagcctgctgcccctgcggcaggccgtgcggctgaacccagacaatggctacatcaaggtgctgctggccctgaagctgcaggatgagggccaggaggccgagggggagaagtacatcgaggaggccctggccaacatgagcagccagacctacgtgttccgctatgctgccaagttctacagaagaaaaggatctgtggacaaggccctggagctgctgaagaaggccctgcaggagacccccacctctgtgctgctgcaccaccagatcggcctgtgctacaaggcccagatgatccagatcaaggaggccaccaagggccagccccggggccagaaccgggagaagctggacaagatgatccgcagcgccatcttccactttgagagcgctgtggagaagaagcccacctttgaggtggcccacctggacctggccaggatgtacatcgaggccggcaaccacaggaaggccgaggagaacttccagaagctgctgtgcatgaagcctgtggtggaggagaccatgcaggacatccacttccactacggccgcttccaggagttccagaagaagagtgatgtgaatgccatcatccactacctgaaggccatcaagattgagcaggccagcctgacccgggacaagagcatcaacagcctgaagaagctggtgctgaggaagctgcggaggaaggccctggacctggagagcctgagcctgctgggctttgtgtacaagctggagggcaacatgaatgaggccctggagtactatgagcgggccctgcggctggccgctgactttgagaacagcgtgcggcagggcccctag

SEQ ID NO: 95673 - DNA, 1344 bp, Artificial Sequence
  derived and/or modified sequence
atgcccgacctggagaaccgggtgctggaccagatcgagttcctggataccaagtactcagtcggcattcataatctgctggcgtatgtgaaacacctcaagggccaaaacgaagaagcgttgaagagcttaaaagaagcggagaacctgatgcaggaggagcatgacaaccaagctaacgtccgctccctggtgacatggggcaatttcgcttggatgtactaccatatgggtcgcctcgctgaggctcagacctatcttgacaaggttgagaatatttgcaagaaattatcaaaccctttcagataccggatggagtgccctgagatcgattgtgaggagggatgggcattacttaaatgcgggggcaaaaactacgaacgtgccaaggcttgttttgagaaagttctggaggtggaccccgagaaccctgagagttcagcaggatatgcaattagcgcatatcgtttggacggctttaaactagcgacaaagaaccacaaaccatttagtttattaccactgagacaggccgtgcgactcaaccctgataatggctacattaaggtcttgctagcacttaaattacaggatgagggccaagaggccgagggagagaagtacattgaggaagctctggcaaatatgagctcccagacttacgtctttaggtatgctgctaaattttacagacggaaggggtccgtcgataaagcactggaactgctgaagaaggctctgcaggagacacccaccagcgttctgctccaccaccaaatagggctttgctataaagcacaaatgatccagatcaaggaggctacaaaaggtcagccgagaggtcaaaatagagaaaagctcgacaagatgatccgcagcgctatttttcactttgagtccgcagttgagaaaaaacccacattcgaggtcgctcatttggaccttgccaggatgtatatcgaggcgggcaatcaccgcaaggctgaagaaaatttccagaagctcttgtgcatgaagcctgtggtcgaggaaaccatgcaggacattcactttcactacgggaggttccaggaattccagaaaaaatccgatgtgaacgcgatcattcactatctcaaagctatcaagatagaacaagcaagtttgacacgagacaagtctattaatagtctcaaaaagctcgtactccgaaagctcaggaggaaagccctagacttagagtccttgagcctgctcggctttgtgtacaagctcgaaggtaacatgaacgaggcccttgagtattatgaacgtgccctgcgcctggccgctgattttgagaacagcgtgcggcagggaccttag

SEQ ID NO: 95674 - DNA, 1344 bp, Artificial Sequence
  derived and/or modified sequence
atgcccgaccttgagaatcgcgtgctggaccagattgagtttctggatactaagtactctgttggaatccataatctgcttgcgtacgtaaagcatctgaagggccagaacgaagaagcactgaagtccctcaaagaagcggaaaatctgatgcaagaggaacacgacaatcaggccaatgtcagatcactcgtgacctggggtaactttgcttggatgtattaccatatggggagactggccgaggcacagacatacctcgacaaagtggagaatatctgcaaaaagcttagtaaccccttccgctaccggatggaatgtcccgagatagactgcgaggaggggtgggcactgctgaaatgtggcggaaaaaattatgaaagagctaaagcttgtttcgagaaggttctcgaagtcgacccggaaaatcctgaatcgtcagcgggatacgcgatctcagcataccggctggatggatttaaactggcaactaaaaaccacaagcctttctcgctcctgcctctgcgtcaggctgtgcggctgaatcccgacaatggctatatcaaagtcctcctggccctgaagctgcaggacgaaggacaggaagcagaaggtgagaaatacattgaggaagctctcgctaatatgtcgtcacagacgtatgttttcaggtacgcggctaaattttatagacgcaagggaagtgtggacaaagctttagagcttcttaagaaagctctgcaggagacacccacaagtgtgttattacatcatcaaattgggctctgttacaaagcccaaatgattcagattaaggaagcaaccaagggacagcctcgaggccagaatagagaaaaactggataagatgataagaagtgcaatctttcatttcgagtctgcggtggagaaaaagcctaccttcgaggtggcccacttggatctggcaaggatgtatatcgaagccggaaatcacagaaaggcagaggaaaatttccagaagcttctgtgtatgaaacccgtagtcgaggagactatgcaggacattcacttccattacggccgttttcaggagtttcagaaaaaatccgacgttaatgctattattcattaccttaaggccatcaaaatcgagcaggcgtcactaacgagagataagtctattaacagtctcaagaaacttgtcctgcggaaactccgaagaaaggctttagatctggaatctttgtctctgcttggatttgtgtacaagctggaaggaaacatgaacgaggcactggaatactacgagagggccttacggctggccgcagactttgaaaactccgtcaggcagggtccctag

SEQ ID NO: 95675 - DNA, 1344 bp, Artificial Sequence
  derived and/or modified sequence
atgcccgacctggagaacagagtgctggaccagatcgagttcctggacaccaagtacagcgtgggcatccacaacctgctggcctacgtgaagcacctgaagggccagaacgaggaggccctgaagagcctgaaggaggccgagaacctgatgcaggaggagcacgacaaccaggccaacgtgagaagcctggtgacctggggcaacttcgcctggatgtactaccacatgggcagactggccgaggcccagacctacctggacaaggtggagaacatctgcaagaagctgagcaaccccttcagatacagaatggagtgccccgagatcgactgcgaggagggctgggccctgctgaagtgcggcggcaagaactacgagagagccaaggcctgcttcgagaaggtgctggaggtggaccccgagaaccccgagagcagcgccggctacgccatcagcgcctacagactggacggcttcaagctggccaccaagaaccacaagcccttcagcctgctgcccctgagacaggccgtgagactgaaccccgacaacggctacatcaaggtgctgctggccctgaagctgcaggacgagggccaggaggccgagggcgagaagtacatcgaggaggccctggccaacatgagcagccagacctacgtgttcagatacgccgccaagttctacagaagaaagggcagcgtggacaaggccctggagctgctgaagaaggccctgcaggagacccccaccagcgtgctgctgcaccaccagatcggcctgtgctacaaggcccagatgatccagatcaaggaggccaccaagggccagcccagaggccagaacagagagaagctggacaagatgatcagaagcgccatcttccacttcgagagcgccgtggagaagaagcccaccttcgaggtggcccacctggacctggccagaatgtacatcgaggccggcaaccacagaaaggccgaggagaacttccagaagctgctgtgcatgaagcccgtggtggaggagaccatgcaggacatccacttccactacggcagattccaggagttccagaagaagagcgacgtgaacgccatcatccactacctgaaggccatcaagatcgagcaggccagcctgaccagagacaagagcatcaacagcctgaagaagctggtgctgagaaagctgagaagaaaggccctggacctggagagcctgagcctgctgggcttcgtgtacaagctggagggcaacatgaacgaggccctggagtactacgagagagccctgagactggccgccgacttcgagaacagcgtgagacagggcccctag

SEQ ID NO: 95676 - protein, 799 aa, Artificial Sequence
  derived and/or modified sequence
MSKKGRNKGEKPEALIVALQAANEDLRTKLTDIQIELHQEKSKVSKLEREKTQEAKRIRELEQRKHTVLVTELKAKLHEEKMKELQAVRENLIKQHEQEMSRTVKVRDGEIQRLKSALCALRDGSSDKVRTALTIEAREEARKLFDTERLKLLQEIADLKTAKKQVDEALSNMIQADKIKAGDLRSEHQSHQEAISKIKWESERDIRRLMDEIKAKDRIIFSLEKELETQTGYVQKLQLQKEALDEQLFLVKEAECNMSSPKREIPGRAGDGSEHCSSPDLRRNQKRIAELNATIRKLEDRNTLLGDERNELLKRVRETEKQCKPLLERNKCLAKRNDELMVSLQRMEEKLKAVTKENSEMREKITSHPPLKKLKSLNDLDQANEEQETEFLKLQVIEQQNIIDELTRDREKLIRRRKHRRSSKPIKRPVLDPFIGYDEDSMDSETSSMASFRTDRTPATPDDDLDESLAAEESELRFRQLTKEYQALQRAYALLQEQTGGIIDAEREAKAQEQLQAEVLRYKAKIEDLEATLAQKGQIEKQEAENHRLQQELQDARDQNELLEFRNLELEERERRSPPFNLQIHPFSDGVSALQIYCMKEGVKDVNIPDLIKQLDILGDNGNLRNEEQVAIIQASTVLSLAEKWIQQIEGAEAALHQKMMELESDMEQFCKIKGYLEEELDYRKQALDQAYMRIQELEATLYNALQQETVIKFGELLSEKQQEELRTAVEKLRRQMLRKSREYDCQILQERMELLQQAHQRIRDLEDKTDIQKRQIKDLEEKFLFLFLFFSLAFILWP

SEQ ID NO: 95677 - protein, 789 aa, Artificial Sequence
  derived and/or modified sequence
MSKKGRNKGEKPEALIVALQAANEDLRTKLTDIQIELHQEKSKVSKLEREKTQEAKRIRELEQRKHTVLVTELKAKLHEEKMKELQAVRENLIKQHEQEMSRTVKVRDGEIQRLKSALCALRDGSSDKVRTALTIEAREEARKLFDTERLKLLQEIADLKTAKKQVDEALSNMIQADKIKAGDLRSEHQSHQEAISKIKWESERDIRRLMDEIKAKDRIIFSLEKELETQTGYVQKLQLQKEALDEQLFLVKEAECNMSSPKREIPGRAGDGSEHCSSPDLRRNQKRIAELNATIRKLEDRNTLLGDERNELLKRVRETEKQCKPLLERNKCLAKRNDELMVSLQRMEEKLKAVTKENSEMREKITSHPPLKKLKSLNDLDQANEEQETEFLKLQVIEQQNIIDELTRDREKLIRRRKHRRSSKPIKRPVLDPFIGYDEDSMDSETSSMASFRTDRTPATPDDDLDESLAAEESELRFRQLTKEYQALQRAYALLQEQTGGIIDAEREAKAQEQLQAEVLRYKAKIEDLEATLAQKGQIEKQEAENHRLQQELQDARDQNELLEFRNLELEERERRSPPFNLQIHPFSDGVSALQIYCMKEGVKDVNIPDLIKQLDILGDNGNLRNEEQVAIIQASTVLSLAEKWIQQIEGAEAALHQKMMELESDMEQFCKIKGYLEEELDYRKQALDQAYMRIQELEATLYNALQQETVIKFGELLSEKQQEELRTAVEKLRRQMLRKSREYDCQILQERMELLQQAHQRIRDLEDKTDIQKRQIKDLEEKSNRMPA

SEQ ID NO: 95678 - DNA, 2400 bp, Artificial Sequence
  derived and/or modified sequence
atgagcaagaagggcagaaacaagggcgagaagcccgaggccctgatcgtggccctgcaggccgccaacgaggacctgagaaccaagctgaccgacatccagatcgagctgcaccaggagaagagcaaggtgagcaagctggagagagagaagacccaggaggccaagagaatcagagagctggagcagagaaagcacaccgtgctggtgaccgagctgaaggccaagctgcacgaggagaagatgaaggagctgcaggccgtgagagagaacctgatcaagcagcacgagcaggagatgagcagaaccgtgaaggtgagagacggcgagatccagagactgaagagcgccctgtgcgccctgagagacggcagcagcgacaaggtgagaaccgccctgaccatcgaggccagagaggaggccagaaagctgttcgacaccgagagactgaagctgctgcaggagatcgccgacctgaagaccgccaagaagcaggtggacgaggccctgagcaacatgatccaggccgacaagatcaaggccggcgacctgagaagcgagcaccagagccaccaggaggccatcagcaagatcaagtgggagagcgagagagacatcagaagactgatggacgagatcaaggccaaggacagaatcatcttcagcctggagaaggagctggagacccagaccggctacgtgcagaagctgcagctgcagaaggaggccctggacgagcagctgttcctggtgaaggaggccgagtgcaacatgagcagccccaagagagagatccccggcagagccggcgacggcagcgagcactgcagcagccccgacctgagaagaaaccagaagagaatcgccgagctgaacgccaccatcagaaagctggaggacagaaacaccctgctgggcgacgagagaaacgagctgctgaagagagtgagagagaccgagaagcagtgcaagcccctgctggagagaaacaagtgcctggccaagagaaacgacgagctgatggtgagcctgcagagaatggaggagaagctgaaggccgtgaccaaggagaacagcgagatgagagagaagatcaccagccacccccccctgaagaagctgaagagcctgaacgacctggaccaggccaacgaggagcaggagaccgagttcctgaagctgcaggtgatcgagcagcagaacatcatcgacgagctgaccagagacagagagaagctgatcagaagaagaaagcacagaagaagcagcaagcccatcaagagacccgtgctggaccccttcatcggctacgacgaggacagcatggacagcgagaccagcagcatggccagcttcagaaccgacagaacccccgccacccccgacgacgacctggacgagagcctggccgccgaggagagcgagctgagattcagacagctgaccaaggagtaccaggccctgcagagagcctacgccctgctgcaggagcagaccggcggcatcatcgacgccgagagagaggccaaggcccaggagcagctgcaggccgaggtgctgagatacaaggccaagatcgaggacctggaggccaccctggcccagaagggccagatcgagaagcaggaggccgagaaccacagactgcagcaggagctgcaggacgccagagaccagaacgagctgctggagttcagaaacctggagctggaggagagagagagaagaagcccccccttcaacctgcagatccaccccttcagcgacggcgtgagcgccctgcagatctactgcatgaaggagggcgtgaaggacgtgaacatccccgacctgatcaagcagctggacatcctgggcgacaacggcaacctgagaaacgaggagcaggtggccatcatccaggccagcaccgtgctgagcctggccgagaagtggatccagcagatcgagggcgccgaggccgccctgcaccagaagatgatggagctggagagcgacatggagcagttctgcaagatcaagggctacctggaggaggagctggactacagaaagcaggccctggaccaggcctacatgagaatccaggagctggaggccaccctgtacaacgccctgcagcaggagaccgtgatcaagttcggcgagctgctgagcgagaagcagcaggaggagctgagaaccgccgtggagaagctgagaagacagatgctgagaaagagcagagagtacgactgccagatcctgcaggagagaatggagctgctgcagcaggcccaccagagaatcagagacctggaggacaagaccgacatccagaagagacagatcaaggacctggaggagaagttcctgttcctgttcctgttcttcagcctggccttcatcctgtggccctag

SEQ ID NO: 95679 - DNA, 2370 bp, Artificial Sequence
  derived and/or modified sequence
atgagcaagaagggcagaaacaagggcgagaagcccgaggccctgatcgtggccctgcaggccgccaacgaggacctgagaaccaagctgaccgacatccagatcgagctgcaccaggagaagagcaaggtgagcaagctggagagagagaagacccaggaggccaagagaatcagagagctggagcagagaaagcacaccgtgctggtgaccgagctgaaggccaagctgcacgaggagaagatgaaggagctgcaggccgtgagagagaacctgatcaagcagcacgagcaggagatgagcagaaccgtgaaggtgagagacggcgagatccagagactgaagagcgccctgtgcgccctgagagacggcagcagcgacaaggtgagaaccgccctgaccatcgaggccagagaggaggccagaaagctgttcgacaccgagagactgaagctgctgcaggagatcgccgacctgaagaccgccaagaagcaggtggacgaggccctgagcaacatgatccaggccgacaagatcaaggccggcgacctgagaagcgagcaccagagccaccaggaggccatcagcaagatcaagtgggagagcgagagagacatcagaagactgatggacgagatcaaggccaaggacagaatcatcttcagcctggagaaggagctggagacccagaccggctacgtgcagaagctgcagctgcagaaggaggccctggacgagcagctgttcctggtgaaggaggccgagtgcaacatgagcagccccaagagagagatccccggcagagccggcgacggcagcgagcactgcagcagccccgacctgagaagaaaccagaagagaatcgccgagctgaacgccaccatcagaaagctggaggacagaaacaccctgctgggcgacgagagaaacgagctgctgaagagagtgagagagaccgagaagcagtgcaagcccctgctggagagaaacaagtgcctggccaagagaaacgacgagctgatggtgagcctgcagagaatggaggagaagctgaaggccgtgaccaaggagaacagcgagatgagagagaagatcaccagccacccccccctgaagaagctgaagagcctgaacgacctggaccaggccaacgaggagcaggagaccgagttcctgaagctgcaggtgatcgagcagcagaacatcatcgacgagctgaccagagacagagagaagctgatcagaagaagaaagcacagaagaagcagcaagcccatcaagagacccgtgctggaccccttcatcggctacgacgaggacagcatggacagcgagaccagcagcatggccagcttcagaaccgacagaacccccgccacccccgacgacgacctggacgagagcctggccgccgaggagagcgagctgagattcagacagctgaccaaggagtaccaggccctgcagagagcctacgccctgctgcaggagcagaccggcggcatcatcgacgccgagagagaggccaaggcccaggagcagctgcaggccgaggtgctgagatacaaggccaagatcgaggacctggaggccaccctggcccagaagggccagatcgagaagcaggaggccgagaaccacagactgcagcaggagctgcaggacgccagagaccagaacgagctgctggagttcagaaacctggagctggaggagagagagagaagaagcccccccttcaacctgcagatccaccccttcagcgacggcgtgagcgccctgcagatctactgcatgaaggagggcgtgaaggacgtgaacatccccgacctgatcaagcagctggacatcctgggcgacaacggcaacctgagaaacgaggagcaggtggccatcatccaggccagcaccgtgctgagcctggccgagaagtggatccagcagatcgagggcgccgaggccgccctgcaccagaagatgatggagctggagagcgacatggagcagttctgcaagatcaagggctacctggaggaggagctggactacagaaagcaggccctggaccaggcctacatgagaatccaggagctggaggccaccctgtacaacgccctgcagcaggagaccgtgatcaagttcggcgagctgctgagcgagaagcagcaggaggagctgagaaccgccgtggagaagctgagaagacagatgctgagaaagagcagagagtacgactgccagatcctgcaggagagaatggagctgctgcagcaggcccaccagagaatcagagacctggaggacaagaccgacatccagaagagacagatcaaggacctggaggagaagagcaacagaatgcccgcctag

SEQ ID NO: 95680 - DNA, 2400 bp, Artificial Sequence
  derived and/or modified sequence
atgtccaagaaaggacgaaataagggagagaagcccgaagccctgatcgtcgcactgcaggccgccaatgaagaccttcggactaagctcacagacatacagattgagctccaccaagaaaagtcaaaggtttcgaagctggagcgggagaagacccaggaggccaagagaattcgcgaactcgaacaacgcaagcatacggtgcttgtaacagagctcaaagcaaaattgcatgaagagaaaatgaaagagttgcaggcggtgcgagaaaatttgatcaaacagcatgagcaggagatgagccgaacggtgaaggtgagggatggcgagatccagagactgaagagcgccctgtgtgccctgagagatggatcatccgacaaggtgaggaccgctttaacaatcgaggcgcgtgaagaggcccggaaactgttcgacactgaacgcctgaagctcctgcaggagattgccgacttgaagaccgccaagaaacaggtggacgaggcactgagcaatatgatacaggctgataagattaaggcgggagatctgcggagcgagcaccagtcacaccaggaggcaatttctaaaattaagtgggagtctgaaagagatataaggagattgatggatgaaatcaaagcaaaagatcgtatcatcttcagtctcgagaaggaattagaaacccagaccgggtacgtccagaagttacagcttcagaaagaagctctggatgaacagttgttcctggtgaaagaagccgagtgcaacatgtcgtccccgaagagagagattcctggacgtgcgggggacggatccgaacactgctcatctccagacctccgtcgcaaccaaaagagaatagccgaactcaacgccaccattcgaaaactggaagaccggaacacactgctgggggacgagcgaaacgagctgctcaagcgagtgcgagagacagagaagcaatgtaagccactgctggagaggaacaagtgccttgccaaaagaaacgacgagctcatggtctccctgcagcggatggaagagaagttgaaggccgtgaccaaagagaattccgaaatgagggagaagataacttcccatccacccctcaagaagcttaaaagcctgaacgacttagaccaggctaacgaggagcaggagactgagtttcttaaactccaagtaattgaacaacagaatatcatcgacgagttgacgagggacagggaaaaactcattcgcagaaggaaacaccgcaggagtagtaaaccaataaaacgtcccgttctcgatcctttcatcggctatgatgaggactcaatggacagtgaaaccagctccatggctagcttccggactgaccggactcccgcaaccccagatgacgaccttgatgagagcctggccgcagaagagagtgaactccgattcaggcagctgacaaaagagtatcaagctctacaacgcgcctatgccttgctccaggagcagaccgggggcataattgacgccgaaagagaagcaaaggctcaagaacagttgcaagccgaggtcctgcgctacaaagcaaagatcgaagacctggaggccaccttagcacagaaggggcagatcgaaaagcaggaggctgaaaaccatcgattacagcaagagctgcaggacgcccgcgaccagaatgagttgctcgagttcagaaacctcgagctggaagagagggagcgccgatcccctcccttcaatctccagattcatcctttcagcgacggagtatctgccctacagatctactgcatgaaggaaggggttaaggacgtaaatattcccgaccttataaagcagcttgacatactaggcgacaatggcaatctccgtaatgaggaacaggttgccatcatccaagcctccaccgtcctctcacttgccgagaagtggattcagcagatagaaggagccgaggccgcactgcatcagaaaatgatggagttggaatctgacatggaacagttttgcaaaattaaggggtatctagaagaagaacttgattatcgcaagcaggccctggatcaggcctacatgcggatccaagagctggaggcgacactgtacaacgctttacaacaagagactgtaatcaaatttggagaacttctgtctgaaaagcagcaggaggaactcagaactgctgtggagaagcttaggcgccaaatgctgaggaagtctagggagtatgattgccagattctgcaggaaaggatggagctactgcaacaggcacatcaacgaataagagatctcgaggataaaacggatattcagaagaggcagataaaggatctcgaggagaagttcctgttcctatttctatttttttctctcgcctttatcctctggccctag

SEQ ID NO: 95681 - DNA, 2370 bp, Artificial Sequence
  derived and/or modified sequence
atgagtaagaaaggccggaataagggggaaaaacctgaggctctcattgtagcactgcaagccgccaatgaagacctgcgcaccaaattgaccgacattcagatcgagctacaccaggaaaagtcgaaggtaagtaagctcgaacgagagaagacacaggaggctaaaagaattcgagaactcgaacagcgcaaacacaccgttctggttaccgaactcaaagccaaacttcatgaggaaaaaatgaaggaattgcaggcagtcagagaaaacctcattaaacagcatgaacaggaaatgtcccgcacagtgaaggtgcgcgacggagagattcagagactgaaatccgccctctgcgcattacgggatggatcgtccgacaaggtgcggaccgccttgactatcgaggccagggaggaagctcggaagctcttcgatacggaaaggcttaagttgctgcaagagattgccgacctcaaaacagctaaaaaacaggttgatgaagccctgtctaatatgatccaggccgataagatcaaggctggagatctcagatcagaacatcagagccaccaggaggcaatttccaagataaaatgggagagtgagcgggacattcgccggctaatggacgagatcaaggccaaagatcgcatcatctttagtctggaaaaggaactcgagacccagacaggctacgtgcaaaagctgcagttgcagaaggaggcattggatgagcaactcttcctggtgaaggaggccgaatgcaatatgagttctcctaaacgagaaatcccgggacgcgccggcgacgggtccgaacattgcagcagccccgacctcagacggaaccagaaaagaatcgccgagctgaatgctactatacggaagctcgaggaccgaaacacactactgggcgacgaacggaacgaactgctgaaaagagttcgagaaactgaaaaacaatgcaaaccactgttggagagaaataagtgcctcgccaaaaggaacgacgagctcatggtgtccctgcagcgtatggaagagaagttgaaggccgtgaccaaggagaacagtgaaatgcgagagaagatcacaagccacccccctctaaagaagcttaagtctctgaacgacttggatcaggctaacgaggaacaggaaactgagttcctgaagctgcaggtgattgagcagcagaatatcattgatgaactgacccgcgaccgagagaaacttataagacgaaggaagcatcggagaagcagtaagcccatcaaacgccccgtgctggacccctttatcggttatgatgaagattctatggatagtgaaactagctctatggcttcgtttaggaccgataggacccccgctacacccgacgatgacctcgacgagagtctggccgccgaggaaagtgagttgcgttttaggcagcttaccaaggagtaccaggcactccagcgcgcttacgctctgctgcaggagcagacaggaggaataattgatgcggagcgggaggcaaaagcacaggagcagttacaggccgaggttctcagatacaaagctaagattgaagatttggaagcaacacttgcgcagaagggccagatcgagaagcaggaggcagagaaccacaggctccaacaagagctgcaagacgcgcgtgatcagaatgaattgttagagttcaggaatctggagttggaagaaagggaacgacgttctcctccttttaaccttcagatccatccgtttagcgatggcgtcagcgccttacagatctactgcatgaaggaaggtgtgaaggatgtcaatattcccgatctcatcaagcaactggatatcttgggcgacaatggcaacctccgaaatgaggagcaagtcgccataatccaggctagtacggtgctgtctctggccgaaaagtggatacagcagatcgagggtgccgaagccgctctccatcagaagatgatggagcttgaatccgacatggagcagttttgcaagatcaagggctacttggaggaggagctggactatagaaagcaggctttggatcaagcatacatgagaatacaagaactcgaggctaccctgtataatgcccttcagcaggagacggttatcaagttcggggagctacttagcgagaaacaacaagaagaactgaggactgccgtggaaaagctgcggaggcagatgttgagaaagagccgcgagtatgattgccagattctgcaggaaaggatggagctgctgcaacaggcccatcagcgaatccgtgatctagaggacaaaactgacatccagaagcgccaaattaaagatctggaagagaagtctaaccgcatgcccgcttag

SEQ ID NO: 95682 - DNA, 5915 bp, Artificial Sequence
  derived and/or modified sequence
ggaggctgcatccgactcggtcacaaggaaaatggattcagtttgcatctctccctcctttaaacagcttctccgggtctcagcatgggcttccagggcagcgattgaggagaccttaccaaggagcaccacacagtagatgctgagacatcgtactccaggataagaaacagtaacatggcagcacctgcttgaaagaaattaaaaaccaacagactccatttagaaaggaacaatgtccaagaaagggcgaaataagggcgagaagcccgaggcactcattgttgcccttcaagctgccaatgaagacctcaggaccaagctcacagacattcagatagagctgcatcaagagaagtccaaggtatcaaagcttgaaagagagaagactcaagaagcgaagaggattcgtgagctggagcagcgcaagcacacggtgctggtgacagaactcaaagccaagctccatgaggagaagatgaaggagctgcaggctgtgagggagaaccttatcaagcagcacgagcaggaaatgtcaaggacggtgaaggtacgtgatggagagatccagaggctcaagtctgctctctgtgctctccgcgacggcagcagtgacaaagtaaggacagcgctcaccattgaggcccgggaggaggcccggaaactgtttgacacagagcgccttaagctcttacaggaaattgcggacctgaaaacggccaagaagcaggtggacgaggctctgagcaatatgatccaagcagataaaatcaaggctggggaccttcggagtgagcatcagtcccaccaagaagccatctcgaagatcaagtgggagtcggagcgggatattcggaggctgatggatgaaatcaaagccaaggacaggatcatcttttccctggaaaaggaactggagacccagacaggctatgtacagaaactccaacttcagaaggaggctttggacgaacaactctttctggtcaaggaggctgagtgcaacatgagcagcccaaaacgagaaattccaggaagggcaggtgatggttccgaacactgcagcagtcctgatttgcgaagaaatcaaaagagaatagctgaattgaatgccactataagaaaattagaagacaggaataccttgcttggagatgaacgaaatgaactgttaaaacgtgtgcgggaaaccgaaaagcaatgtaaacctctcctggaaaggaacaagtgcctcgccaagagaaacgatgaactgatggtgtccttgcagcgcatggaagaaaaactaaaagccgttaccaaggaaaattcagaaatgagagaaaaaataacatcccatccacccctgaagaaattaaaatctctgaatgacctcgaccaagctaatgaagaacaagaaacagagtttctaaaacttcaggtcattgagcaacagaacattattgatgagctcacaagggaccgagaaaagctcatccgtagaagaaagcatagaagaagttccaagccaattaagaggcctgttttggacccgtttattggctatgatgaggactctatggattcagagacatcatccatggcctcatttagaacagacagaacaccagctactcctgatgatgacttggatgaaagtttagcagctgaagaatctgaactaagatttcgacaattaacaaaagaatatcaggccctccaaagagcatatgccctcctacaggagcagacgggaggcatcatcgacgctgaacgagaagccaaggctcaagaacagctccaagcagaggtgctaaggtataaagccaaaattgaagacctggaagcgactctggctcagaaagggcagatagaaaaacaggaggcagaaaatcaccggttacaacaagaactacaggacgccagagaccagaatgagctgctggagtttcgaaacctagagctagaagagagagagagacgatcccctccatttaatctccaaattcacccattctcagatggtgtgagtgctctacagatctactgtatgaaagaaggtgttaaggatgtgaacatccctgatctcataaagcagcttgatatcttgggtgataatgggaatttaagaaatgaagaacaagtggccataattcaggccagcactgtgctgtccctggcagagaagtggatccagcagattgaaggagctgaggctgccctacaccagaaaatgatggaattggaaagtgacatggaacagttctgcaaaataaaaggctatctggaggaagaactagactacagaaaacaagctcttgaccaagcatatatgagaatccaggaactagaagctactttgtacaatgctctacagcaagaaactgttatcaagtttggtgaattattaagtgaaaaacagcaagaggagctgaggacggcagtagaaaagttacggcggcaaatgctgaggaagagcagagagtatgactgtcagattcttcaggagagaatggagctcttacagcaagcccatcagagaattcgtgacttagaagataaaacagacatccagaaaagacaaataaaagacttagaagaaaagtttctgtttctattcttgttcttctctcttgcctttattctatggccttgatgtcaaggtgcctcttaaagagtaaccgaaaacatggataagatcccaggaagacaagtgcttctaaaccttcaaagatggcaaaattgtttacaccagtgagagggagatcaaaagctaagaactaccctgtagccaggactacaactgtgtattttaaagccattattcaaggtttcttacttgacagttcctacacaaccctgttgaaaatctacaatatatgctgcatttaatgaaacatgtatatgtcaaatcagaagagaagaactataaacatatattgtgtaaagaaaaagttcagcaatggaactagtttctgcagatcaagcaaagatgtgtcttgggcatggaaccaaagttacaatgaaatattcaacccctgctgtgcaggggggtcattttaatgtaacaccacaccccatggaaacactagtcctgataataaacatcattttaaaagatcaaaacaaacaaacaaaaaaaacaagggtgggtggggagtgaagcacgaggaatacctatgaagagctatttacaataaaatgtttcatttgaaaagtctggtttcttactacagggatttgcttttctgtctttatgattgttttaaactcaggaacagagacatccgcatcgtaaatgggaagaaaaacactctctgttttgtttttctgcaaaaggtggagcttgtggaattcattccacagacgacagatgagaagtggatcacagtgaccacaacaaaactggtaacgaagtcaaaggacccgagcgaatgtgacatgtgaaataaaagcagattcgatgcttccttgtcctactctcacatctgcattcctctatcaacaatggactgatctcattcatattgaaaactaagaagatgatactgtaaatcacatgctccctgacttagttctgtttagaacgccaacatctatagggaacatgggccagagagcatctctgaatctttcatttccaaaatactgtttttcaaatggctgcttaaaattgcctgcaaatgaatatgctatatgatttgggcaaaaacacagcagaatcaatgagtaaatttctaccaagagtcgggtttgccacagagatgtgaatattaaactaaactattattttttaaagaatcctcacatgcctagagcattctgacctcttcttgtttagagtgataacattttttcccagacagatgacagcaacaagatagctctacttttttatatggaaataacattatgttactgacaaggtcattttctaccagagacaattagaggactggtacttttcctaagttgtgtattactgagtcttggagtcatctctgagagcaaatgtatgttcctgaaaagctaattttacacctcatttactgtagataacagaacaacctcaatttttcaaatttttgaagttttatttatggggctagaattcccatgcatagagaatatgtgtagggagccagaaactctttctatgaaatgctatacaaatctttccatatgtgggttcactatcatccttcagttttagcactggcatttgcaaagccagaacaataactgaagaatgtacaataaaaactagaatgctggggtcccactttttgttcttacatttactgctgacccaggtatctttggcccagtcacttaacctctctgtgcctcagtttcctcatctgcaaaatggggttaaaatgctttttcataaagttttatttgcaattttagaacaagaggtgcttaaagtagcacaatgtgctttgtaattattacaagtgctgtattatttgactttcttgtgttgttgacaaaaagattccctcatgtaataaaatagtgcttcagtttggttaaatttaagcactatagcactgaagcttgcttatcaagctacttgggacattattagcaataaaaattgagagattcaaaaccaggatctttaataatctataggaaatagatcatctcatgctattgaacaagatagaagagtgtgtcatttctatgataagcatctcccagctctcttgattgcatatgcatgccatcatacagaaccccacttttaccacaggagagccagtcattaaacaaaggcttggagcaaactgacagtatcacataattagcttgattatcttttattctggaggaaagccaggtggtatgccctactgggaagatacaaaacagactatcctgctgtattcttttttttttttttttttgagatggagtcttgctctgttgcccatgctggagtgcattggcacaatctcggctcatggcaagctccacctcctggattcaagtgattctcctgcctcaacctccctagtagctgggattacaggtgcacaccaccacacctggctaatttttgtatttttagtagagacagggtttcactatgctggtcaggctggtctcgaactcctgacctcaagtgatctgcctgcctcagcctcccaaagtgctaggattacaggtgtaagccactgtgcccggcctcctgctggattctttattcaactaggtaggttccagattaaatatgagccatatgctcattaggcaagaaatgtgaaagagggtgcctctacagtgttggtgacccaacactagccaacttgagtcagaaaatatggaagaggataaattactctcacatatctaagacttttccatttttcttcactttctgttgcagggcccatatgagtaaatctatattccgtctgctccaacacacaccttccttctcttaattttgctttcccacccaccaagaaatttgtaagtcaaaatttatttccatgagtaactatttctaaatgattgaaaatttttgaaaaagtggtatggtttatatacctaatctgcttatctgctataagtcatatgagaacaacagctaggatgattgtccaagcagctttagatgtgtttagggccaggcaaaaggtttgcttgttttttctttttgcttaagatctgggagattagcaaatttctcaagactatagactgaactgtaatttttaccaactcttgctcatgagcctcaaaatgaatatatccttgaataaagtataaatatttcaatagatacatctctctattatccattttcacaattataaaagcatcagcaaaattgtggatatgtgttccagtcactcatggatccatggaaatggaccgtgtttaaatgaatgcttcccttggatgggatgttcagcaatagc

SEQ ID NO: 95683 - DNA, 2749 bp, Artificial Sequence
  derived and/or modified sequence
gtgatgctgctgctgctgctgctgccgccgccgccgcctctattgctgatactctagtggggctggaagggtggttcctattcgcaccatcgccaaccagagacagagggaaaaaaaaaaccggcagccactgctgatgttgggttcggaggctgcatccgactcggtcacaaggaaaatggattcagtttgcatctctccctcctttaaacagcttctccgggtctcagcatgggcttccagggcagcgattgaggagaccttaccaaggagcaccacacagtagatgctgagacatcgtactccaggataagaaacagtaacatggcagcacctgcttgaaagaaattaaaaaccaacagactccatttagaaaggaacaatgtccaagaaagggcgaaataagggcgagaagcccgaggcactcattgttgcccttcaagctgccaatgaagacctcaggaccaagctcacagacattcagatagagctgcatcaagagaagtccaaggtatcaaagcttgaaagagagaagactcaagaagcgaagaggattcgtgagctggagcagcgcaagcacacggtgctggtgacagaactcaaagccaagctccatgaggagaagatgaaggagctgcaggctgtgagggagaaccttatcaagcagcacgagcaggaaatgtcaaggacggtgaaggtacgtgatggagagatccagaggctcaagtctgctctctgtgctctccgcgacggcagcagtgacaaagtaaggacagcgctcaccattgaggcccgggaggaggcccggaaactgtttgacacagagcgccttaagctcttacaggaaattgcggacctgaaaacggccaagaagcaggtggacgaggctctgagcaatatgatccaagcagataaaatcaaggctggggaccttcggagtgagcatcagtcccaccaagaagccatctcgaagatcaagtgggagtcggagcgggatattcggaggctgatggatgaaatcaaagccaaggacaggatcatcttttccctggaaaaggaactggagacccagacaggctatgtacagaaactccaacttcagaaggaggctttggacgaacaactctttctggtcaaggaggctgagtgcaacatgagcagcccaaaacgagaaattccaggaagggcaggtgatggttccgaacactgcagcagtcctgatttgcgaagaaatcaaaagagaatagctgaattgaatgccactataagaaaattagaagacaggaataccttgcttggagatgaacgaaatgaactgttaaaacgtgtgcgggaaaccgaaaagcaatgtaaacctctcctggaaaggaacaagtgcctcgccaagagaaacgatgaactgatggtgtccttgcagcgcatggaagaaaaactaaaagccgttaccaaggaaaattcagaaatgagagaaaaaataacatcccatccacccctgaagaaattaaaatctctgaatgacctcgaccaagctaatgaagaacaagaaacagagtttctaaaacttcaggtcattgagcaacagaacattattgatgagctcacaagggaccgagaaaagctcatccgtagaagaaagcatagaagaagttccaagccaattaagaggcctgttttggacccgtttattggctatgatgaggactctatggattcagagacatcatccatggcctcatttagaacagacagaacaccagctactcctgatgatgacttggatgaaagtttagcagctgaagaatctgaactaagatttcgacaattaacaaaagaatatcaggccctccaaagagcatatgccctcctacaggagcagacgggaggcatcatcgacgctgaacgagaagccaaggctcaagaacagctccaagcagaggtgctaaggtataaagccaaaattgaagacctggaagcgactctggctcagaaagggcagatagaaaaacaggaggcagaaaatcaccggttacaacaagaactacaggacgccagagaccagaatgagctgctggagtttcgaaacctagagctagaagagagagagagacgatcccctccatttaatctccaaattcacccattctcagatggtgtgagtgctctacagatctactgtatgaaagaaggtgttaaggatgtgaacatccctgatctcataaagcagcttgatatcttgggtgataatgggaatttaagaaatgaagaacaagtggccataattcaggccagcactgtgctgtccctggcagagaagtggatccagcagattgaaggagctgaggctgccctacaccagaaaatgatggaattggaaagtgacatggaacagttctgcaaaataaaaggctatctggaggaagaactagactacagaaaacaagctcttgaccaagcatatatgagaatccaggaactagaagctactttgtacaatgctctacagcaagaaactgttatcaagtttggtgaattattaagtgaaaaacagcaagaggagctgaggacggcagtagaaaagttacggcggcaaatgctgaggaagagcagagagtatgactgtcagattcttcaggagagaatggagctcttacagcaagcccatcagagaattcgtgacttagaagataaaacagacatccagaaaagacaaataaaagacttagaagaaaagtcaaacagaatgccagca

SEQ ID NO: 95684 - DNA, 2400 bp, Artificial Sequence
  derived and/or modified sequence
atgagcaagaagggcaggaacaagggggagaagccagaggccctgattgtggccctgcaggccgccaatgaagacctgcggaccaagctgacagacatccagatcgagctgcaccaggagaagagcaaggtgtccaagctggagcgggagaagacccaggaggccaagaggatccgggagctggagcagaggaagcacacagtgctggtgacagagctgaaggccaagctgcacgaggagaagatgaaggagctgcaggccgtgcgggagaacctgatcaagcagcacgagcaggagatgagcaggacagtgaaggtgagagatggagagatccagaggctgaagagcgccctgtgtgccctgagagatggcagcagtgacaaggtgaggacagccctgaccatcgaggcccgggaggaggccaggaagctgtttgacacagagcggctgaagctgctgcaggagattgctgacctgaagacagccaagaagcaggtggatgaggccctgagcaacatgatccaggccgacaagatcaaggccggggacctgcggtctgagcaccagagccaccaggaggccatcagcaagatcaagtgggagagcgagcgggacatccggcggctgatggatgagatcaaggccaaggaccgcatcatcttcagcctggagaaggagctggagacccagacaggctacgtgcagaagctgcagctgcagaaggaggccctggatgagcagctgttcctggtgaaggaggccgagtgcaacatgagcagccccaagcgggagatccctggccgggctggagatggcagcgagcactgcagcagcccagacctgcggaggaaccagaagagaattgctgagctgaatgccaccatcaggaagctggaggacaggaacaccctgctgggagatgaaagaaatgagctgctgaagagggtgcgggagacagagaagcagtgcaagcccctgctggagaggaacaagtgcctggccaagagaaatgatgagctgatggtgtccctgcagaggatggaggagaagctgaaggctgtgaccaaggaaaattctgagatgagggagaagatcaccagccacccccccctgaagaagctgaagagcctgaatgacctggaccaggccaatgaggagcaggagacagagttcctgaagctgcaggtgattgagcagcagaacatcattgatgagctgacccgggaccgggagaagctgatcagaagaaggaagcaccggcgcagcagcaagcccatcaagaggcctgtgctggaccccttcatcggctatgatgaagattccatggacagcgagaccagctccatggccagcttcagaacagacaggaccccagccaccccagatgatgacctggatgagagcctggccgctgaggagagcgagctgcgcttccggcagctgaccaaggagtaccaggccctgcagagggcctatgccctgctgcaggagcagacaggaggcatcattgatgctgagcgggaggccaaggcccaggagcagctgcaggccgaggtgctgcgctacaaggccaagattgaggacctggaggccaccctggcccagaagggccagatcgagaagcaggaggccgagaaccaccggctgcagcaggagctgcaggatgcccgggaccagaatgagctgctggagttcaggaacctggagctggaggagcgggagaggaggagcccccccttcaacctgcagatccaccccttcagtgatggagtgtctgccctgcagatctactgcatgaaggagggcgtgaaggatgtgaacatcccagacctgatcaagcagctggacatcctgggggacaatggaaacctgagaaatgaggagcaggtggccatcatccaggccagcacagtgctgagcctggccgagaagtggatccagcagattgaaggagctgaggccgccctgcaccagaagatgatggagctggagagtgacatggagcagttctgcaagatcaagggctacctggaggaggagctggactacaggaagcaggccctggaccaggcctacatgaggatccaggagctggaggccaccctgtacaatgccctgcagcaggagaccgtcatcaagtttggagagctgctgtctgagaagcagcaggaggagctgaggacagctgtggagaagctgcggcggcagatgctgaggaagagccgggagtatgactgccagatcctgcaggagaggatggagctgctgcagcaggcccaccagaggatccgggacctggaggacaagacagacatccagaagaggcagatcaaggacctggaggagaagttcctgttcctgttcctgttcttcagcctggccttcatcctgtggccctag

SEQ ID NO: 95685 - DNA, 2370 bp, Artificial Sequence
  derived and/or modified sequence
atgagcaagaagggcaggaacaagggggagaagccagaggccctgattgtggccctgcaggccgccaatgaagacctgcggaccaagctgacagacatccagatcgagctgcaccaggagaagagcaaggtgtccaagctggagcgggagaagacccaggaggccaagaggatccgggagctggagcagaggaagcacacagtgctggtgacagagctgaaggccaagctgcacgaggagaagatgaaggagctgcaggccgtgcgggagaacctgatcaagcagcacgagcaggagatgagcaggacagtgaaggtgagagatggagagatccagaggctgaagagcgccctgtgtgccctgagagatggcagcagtgacaaggtgaggacagccctgaccatcgaggcccgggaggaggccaggaagctgtttgacacagagcggctgaagctgctgcaggagattgctgacctgaagacagccaagaagcaggtggatgaggccctgagcaacatgatccaggccgacaagatcaaggccggggacctgcggtctgagcaccagagccaccaggaggccatcagcaagatcaagtgggagagcgagcgggacatccggcggctgatggatgagatcaaggccaaggaccgcatcatcttcagcctggagaaggagctggagacccagacaggctacgtgcagaagctgcagctgcagaaggaggccctggatgagcagctgttcctggtgaaggaggccgagtgcaacatgagcagccccaagcgggagatccctggccgggctggagatggcagcgagcactgcagcagcccagacctgcggaggaaccagaagagaattgctgagctgaatgccaccatcaggaagctggaggacaggaacaccctgctgggagatgaaagaaatgagctgctgaagagggtgcgggagacagagaagcagtgcaagcccctgctggagaggaacaagtgcctggccaagagaaatgatgagctgatggtgtccctgcagaggatggaggagaagctgaaggctgtgaccaaggaaaattctgagatgagggagaagatcaccagccacccccccctgaagaagctgaagagcctgaatgacctggaccaggccaatgaggagcaggagacagagttcctgaagctgcaggtgattgagcagcagaacatcattgatgagctgacccgggaccgggagaagctgatcagaagaaggaagcaccggcgcagcagcaagcccatcaagaggcctgtgctggaccccttcatcggctatgatgaagattccatggacagcgagaccagctccatggccagcttcagaacagacaggaccccagccaccccagatgatgacctggatgagagcctggccgctgaggagagcgagctgcgcttccggcagctgaccaaggagtaccaggccctgcagagggcctatgccctgctgcaggagcagacaggaggcatcattgatgctgagcgggaggccaaggcccaggagcagctgcaggccgaggtgctgcgctacaaggccaagattgaggacctggaggccaccctggcccagaagggccagatcgagaagcaggaggccgagaaccaccggctgcagcaggagctgcaggatgcccgggaccagaatgagctgctggagttcaggaacctggagctggaggagcgggagaggaggagcccccccttcaacctgcagatccaccccttcagtgatggagtgtctgccctgcagatctactgcatgaaggagggcgtgaaggatgtgaacatcccagacctgatcaagcagctggacatcctgggggacaatggaaacctgagaaatgaggagcaggtggccatcatccaggccagcacagtgctgagcctggccgagaagtggatccagcagattgaaggagctgaggccgccctgcaccagaagatgatggagctggagagtgacatggagcagttctgcaagatcaagggctacctggaggaggagctggactacaggaagcaggccctggaccaggcctacatgaggatccaggagctggaggccaccctgtacaatgccctgcagcaggagaccgtcatcaagtttggagagctgctgtctgagaagcagcaggaggagctgaggacagctgtggagaagctgcggcggcagatgctgaggaagagccgggagtatgactgccagatcctgcaggagaggatggagctgctgcagcaggcccaccagaggatccgggacctggaggacaagacagacatccagaagaggcagatcaaggacctggaggagaagagcaacaggatgcctgcctag

SEQ ID NO: 95686 - DNA, 2400 bp, Artificial Sequence
  derived and/or modified sequence
atgagcaagaagggccggaacaagggcgagaagcccgaggccctgattgtggctttgcaggcggccaatgaggacctccggacaaagctcacggacatacagatcgaactgcaccaagaaaagtcgaaggtgtcaaaattggagagagagaagacccaggaggccaagcgaattagagagctcgagcagagaaagcataccgtgctcgtaacagagctgaaggcaaagctacacgaggagaaaatgaaggagctgcaggccgtgcgagaaaatctgatcaagcagcacgaacaggaaatgagtcgaaccgtgaaggttcgggacggcgaaatacagagactgaagagtgctctatgtgctctgagggacgggtcctcagacaaggtgaggactgcccttacgatcgaggcacgggaagaagcgcggaaacttttcgatactgagcggctcaaactcctgcaagagatcgcagacctgaagacagccaagaaacaagttgacgaagcattgtctaacatgatacaggctgataagattaaggcaggtgacttgcgatctgaacaccagtcacaccaagaggcaataagcaagattaagtgggagtccgagagagatattcggcgacttatggatgagatcaaagccaaggaccgaatcatcttctctctcgaaaaggaacttgaaactcagactggatatgtgcaaaaactgcagcttcaaaaagaggctctcgatgagcagctgtttttggtgaaggaggccgagtgcaatatgtctagccctaagcgcgagattccagggagggccggggatggcagcgaacattgctccagccccgacctgcggcgcaatcagaagagaattgccgaactgaatgccactattcggaagttagaggaccggaacaccctccttggagatgagcgtaatgagcttctgaaacgtgtgagagagactgaaaagcagtgcaaacccctgttggaacgtaataagtgcctggcaaagcgaaacgacgaattgatggtgagcctccagagaatggaggaaaaactgaaggcagtcactaaggaaaactccgagatgcgagaaaaaatcacaagtcacccaccgttgaagaagctgaagtcacttaatgacctggatcaggcaaatgaggaacaggagactgaattcctcaagcttcaggttattgaacagcagaatataatcgacgagctaacacgagatcgggagaaactgatccgccgcaggaaacacagaaggtcttccaagcccatcaagagacctgtcctggaccctttcataggctatgacgaagattccatggattctgagacgtccagcatggcttctttccgtactgatcggacccccgccacaccagatgatgaccttgacgaaagcctggccgcggaggagtcagagttaaggtttcgccagcttacaaaagaatatcaggcattgcaaagagcctatgcattgttgcaagaacaaaccggcggtattattgacgccgaaagagaggccaaggcccaggagcaactgcaggcggaagtgcttcgctacaaagctaagatcgaagatctagaggccacactcgcccagaaaggacagatcgagaaacaggaggctgaaaatcataggcttcagcaggagctccaggatgcccgagatcagaacgagctgttggagttccgtaacctggaacttgaagagagggaaaggcggtcaccaccctttaacttgcagattcaccctttctccgacggcgtaagtgctttgcagatctactgcatgaaggagggggtcaaggacgtcaatatacccgacttgattaagcaactggatatactcggcgataatgggaacctcagaaacgaagaacaggttgctattatccaggcttcgactgttctgtcccttgccgaaaaatggatccagcagattgaaggggctgaggctgcattacaccagaagatgatggagttggagagtgatatggagcagttttgtaaaattaagggctacctggaagaggaactggattatcgcaagcaggcgctggaccaggcttacatgagaattcaggagttagaggcaaccctctataacgctctgcagcaggagaccgtgatcaaattcggcgagctgctctctgaaaagcaacaggaagaactccggacggccgtcgagaagctgcgtaggcagatgctgcgaaaatcgcgcgagtatgattgtcagatattacaggagcgaatggaactcctccaacaggcgcaccaaagaatccgggacctcgaggacaagacagatattcaaaaacggcagataaaagaccttgaggaaaaattcctttttttgttcctcttcttctcgctggcgttcattctctggccttag

SEQ ID NO: 95687 - DNA, 2370 bp, Artificial Sequence
  derived and/or modified sequence
atgagcaagaagggccggaacaagggcgagaagcccgaggccctgattgtcgccctgcaggctgctaacgaggatttacgcacgaaactcactgacatacagatagaactccatcaagaaaaatctaaagttagtaaattggagagagagaagacgcaggaagccaagcggattagggagctagagcaacggaagcacactgtgttagtgaccgaactcaaagctaaactccacgaggaaaaaatgaaggagctgcaagcagtcagggaaaacctgattaaacaacacgaacaggagatgagtcgcactgtgaaggtgagagatggggaaattcagagactgaagtcggcactgtgtgccctccgtgacgggtccagcgacaaggtcagaacagccctgacgatcgaagcccgggaggaggcaagaaaactgttcgacaccgagcgcctcaagcttttacaggaaattgccgatctcaagacagctaagaagcaggtggacgaggccctgagtaatatgattcaagccgacaagataaaggctggcgacttgagatcagaacaccagagccaccaggaggccattagtaagattaagtgggaaagtgaaagagatatccgccgccttatggatgagattaaagccaaagacaggataattttctcactggaaaaagaactcgagacacagactggttatgtgcagaagctacagctgcagaaggaggctttagatgagcagttatttctcgtgaaagaggcagagtgtaacatgagcagtcctaagcgggagattcccgggcgcgccggcgacggctctgaacactgctcatccccagacttgagaagaaaccagaagcgcatcgcggagctaaacgccactattcgaaagttggaagacagaaatactctgctcggagatgagcgtaacgaactcctgaagcgcgtgcgggagactgaaaaacagtgtaaacccctactcgaaagaaacaaatgcttggctaagaggaacgacgaactcatggtttcgctccagcggatggaagaaaagctgaaggccgtgaccaaagagaattcagaaatgcgtgaaaagatcacatcccatccaccactaaagaaattaaagagtttaaatgatctggaccaggccaatgaggagcaggagactgaattcctcaagcttcaggtgattgaacagcagaatatcatcgacgagctcacgagggaccgtgagaaactgatcagacgccggaagcatcgccgttcctcaaagccaattaaacggcctgtcctggatccctttatcggctacgacgaggactccatggactctgagacctcatcaatggcgtcatttcggacagatcgcacaccagctacacctgacgacgatctcgacgagagcctggctgccgaagagtcggagctgcgattccggcagctcaccaaggaatatcaggcactgcagagggcgtatgcactgctgcaggagcagacaggcggtatcattgacgccgaacgggaggcaaaggcacaggagcagttacaggcagaggtgctcaggtacaaagcaaaaatcgaggacctggaagcgactttagcacagaagggccaaatagaaaaacaggaagccgagaaccacaggctgcaacaggagctacaggacgctcgagaccagaacgagctactggagttcagaaacctggaactcgaagagcgggagcgccggagcccaccgtttaacctgcagatccaccctttttcagatggggtatcggcactgcaaatctactgtatgaaagaaggtgtcaaggacgtgaacatccccgacttgatcaagcaacttgacatcctcggcgataatggcaacctgcgaaacgaagagcaagttgcaataatccaggccagtacggtgctctcgctcgccgagaagtggatccagcagatagagggcgccgaagccgctttgcaccagaaaatgatggagctggaatccgatatggagcagttttgtaagataaaaggctacctggaagaggagcttgattatagaaagcaggcactggaccaggcttatatgcgaattcaggagcttgaggccacactgtacaacgcactgcaacaagagactgtgatcaaattcggggagctgctgagtgaaaaacagcaggaggagctccggaccgcggtagaaaagctccggcgccaaatgttaagaaagagtagggagtacgactgccagatcctgcaggaaaggatggaacttctccagcaggcacaccagaggatccgcgacctggaagacaagacagatattcagaagcgacagataaaagatctggaggagaaatccaaccgcatgcccgcctag

SEQ ID NO: 95688 - DNA, 2400 bp, Artificial Sequence
  derived and/or modified sequence
atgagcaaaaaaggaagaaataagggcgaaaaaccagaagctctaattgtagccctgcaggccgcaaatgaggacttaagaaccaagctgacggacatccagatcgagctccatcaagagaaatctaaagtttcaaaactcgagcgcgaaaagacccaagaggccaagaggatacgagagctggagcaaagaaaacacacggtgctcgttaccgaattaaaggcgaaactacacgaagagaagatgaaggagcttcaggcggttcgcgaaaacctgatcaaacagcatgaacaagagatgtcgcgcacagtcaaagttagagatggcgaaatacaacgattaaagtccgcgttgtgtgctctcagggatgggagcagtgataaggttagaacagcactgacaatcgaagcccgagaggaagcgaggaagctgtttgacaccgagagactgaagctgctccaggaaatcgcagatctgaaaactgcaaagaagcaggtagacgaagctttatctaacatgattcaagcggacaagatcaaggctggcgacctaagaagtgaacaccagtcccatcaagaagccatcagcaagattaaatgggaaagcgaacgggacatccgcaggctcatggacgagatcaaagcaaaggacagaattatcttctccctggaaaaggagctggagacacaaactggttacgtgcagaagctgcaactacaaaaggaggccttggacgaacaactcttcctcgtgaaggaggccgaatgtaatatgtcgagcccaaaaagggaaataccaggaagggccggtgatgggagcgaacactgctcctcacccgacctgagacgaaatcagaagcggattgccgagctgaacgccacgatccggaagctggaggacagaaacacactgttgggagacgagcgcaacgagctgttgaagagggtgagggaaaccgaaaaacagtgtaaaccacttctcgaacgcaacaagtgcctagcaaagcgaaacgatgagctaatggtctctttacagagaatggaagagaagttaaaggcagtcacgaaggaaaacagtgaaatgcgcgaaaaaatcacaagtcatcctccgttgaaaaaacttaagtcactaaatgatcttgaccaggccaacgaggagcaagagacggaatttctgaagttgcaagtcatcgaacagcagaacattatagacgagctgactcgtgatcgggagaagctcataagacgtcgtaagcaccgaagatcaagcaaacccattaagaggcccgtgctggacccattcatcgggtatgatgaagatagtatggatagtgaaaccagctctatggcttcattccgcaccgacaggacccctgctacccccgacgacgaccttgatgaatccctggcggcagaggaaagcgaattgaggttcagacaactgaccaaggaatatcaagccctgcaacgagcctacgcattacttcaggaacagacagggggtattattgacgctgaacgggaggccaaagcccaggaacagctgcaagccgaagtcctgcggtacaaagctaaaattgaggatctggaggctactctggcccagaagggtcaaattgaaaagcaggaagccgagaaccacagattgcagcaggaactgcaggacgctagagatcagaatgaactgctggaatttcggaacctcgagctggaggagagggagagaagatctcccccattcaatctccagatccatccctttagcgatggtgtgtccgccttacagatttattgcatgaaggagggggtgaaagacgtgaacatacccgatctgattaagcaactggatattctgggagataacgggaatcttaggaacgaggagcaggtcgccattatccaggccagcacggtgctgtctttggctgagaagtggatccagcagatcgagggtgcagaggccgcactgcaccaaaaaatgatggagctcgaatccgatatggagcagttctgcaaaatcaaagggtacctggaggaagagttggattaccgcaagcaggcgcttgatcaggcctatatgcggatacaggagctcgaagcaacactctacaatgcactgcagcaggaaacggtgattaagttcggtgaactgctgtccgagaagcaacaggaagagctacggacagcggtggaaaagcttaggcgccagatgctgcgcaaatcacgagaatacgattgtcagatcctgcaggaaaggatggaattgctacagcaggcacatcagaggattagagatctggaggacaagacagacatacaaaagagacagatcaaagaccttgaggaaaagttcttgttcctgtttctgtttttctctttggcgttcatcctgtggccatag

SEQ ID NO: 95689 - DNA, 2370 bp, Artificial Sequence
  derived and/or modified sequence
atgtcaaaaaaaggcagaaataagggggaaaagccggaggccttgatcgttgcgctgcaggctgcaaacgaggacctgaggaccaagctgaccgatattcaaattgagcttcatcaggagaagtcgaaggtgtcaaagctcgagagagaaaagactcaggaagcaaagagaattcgggagctggagcagagaaaacataccgtgttggttactgaactgaaagcaaaactgcatgaagagaagatgaaagaactccaggccgtgcgggaaaacctgattaaacaacacgaacaagaaatgagcaggactgtgaaagttagggacggcgaaattcagcggctgaagtctgccctgtgcgccctgagggatggcagttcagataaggtgcgcaccgccctcacgatcgaagctagagaggaagctcgcaagctatttgacacagagagactcaagctactgcaggagatcgcagaccttaagacggcaaagaaacaggttgatgaggcgttatccaatatgatccaggccgataagatcaaggcaggcgaccttcgaagtgagcatcagagccatcaggaggctataagtaagattaagtgggaaagcgaacgggacatccggcgtctcatggatgagattaaagcgaaagaccgcatcatcttctccctcgaaaaggagttggagacacagaccgggtatgttcagaagctgcagttgcagaaggaggctttggatgaacagttattcctggtgaaggaggccgagtgcaacatgtcaagtccgaagcgcgagatccccggaagggcgggtgatgggagtgagcattgctcaagccccgaccttcggaggaatcagaagagaattgctgaactcaatgccaccatcagaaagctcgaggatagaaacacactcctcggagatgaaagaaatgaactgctgaagcgcgtgagagagacagagaaacaatgcaaaccactgctggagagaaacaaatgtctggccaaaaggaacgatgagctgatggtgtctctgcagcggatggaggagaagttgaaagccgtgaccaaggaaaactccgaaatgagagaaaagataacttcacacccccctttgaagaagctcaaatcgctgaatgatttagaccaggccaacgaagagcaggagactgagttcctgaaactgcaggtcattgagcagcaaaatatcattgacgagctgaccagagacagggaaaagttgattaggagacgtaagcaccgacggagctccaaacccatcaagagaccagtcttagacccctttataggatatgatgaagactccatggactccgagactagctccatggccagctttagaaccgatcgaactcctgctacaccagatgatgatctggatgaatcccttgcagctgaggagtctgagcttcgttttagacagttaaccaaagagtatcaggcacttcagcgggcttacgccttactccaggaacaaacaggcggtattattgatgctgaacgcgaagccaaagcgcaggagcaactgcaggctgaggtgctgagatacaaggccaaaatcgaggatttagaggcaactctggcccagaaaggacagattgagaaacaggaggcggagaaccatcggctgcagcaggaacttcaggacgccagggatcagaacgagcttttagaatttcgaaacctcgagctggaagaacgcgagcgcagatcccctccattcaatttgcagatccacccatttagcgacggtgtatctgccttacagatctactgtatgaaggagggcgtgaaagacgtgaacattcccgatcttattaagcagctggatattttaggcgataacgggaaccttaggaacgaagaacaggtggccataatccaggcatcaactgttctgtccctggcggagaagtggattcaacagattgaaggtgccgaagccgcactgcatcagaaaatgatggagctggagtccgatatggagcagttttgtaaaatcaaggggtacctggaagaggagttagactaccggaaacaggctctcgaccaggcctatatgaggatccaagaactggaggctacgctatacaacgcgttgcaacaggagaccgtgattaagtttggagagctgctctcagaaaaacagcaggaagagctccggaccgctgttgagaaactcagaaggcaaatgcttagaaaaagtcgcgaatacgattgtcagattctgcaggaacgaatggagctgcttcagcaggcccatcagaggattcgcgacctagaggataagaccgacattcagaagcgtcagatcaaagatctggaagaaaagtctaataggatgcccgcttag

SEQ ID NO: 95690 - DNA, 3336 bp, Artificial Sequence
  derived and/or modified sequence
atgacggagttttttcatgactgtacaaccaatgagagaaagcgcgagatcgaggaacttctcaacaactttgcacagcaaattggggcatggaggttctgcctgtactttctgtcgagtaccagaaacgactatgttatgatgtatagcttaaccgtgttcgagaacctcatcaataaaatgtggctgggtgtgccatcccaagacaagatggagataagatcctgtctgccaaagcttctgctcgcccaccacaagactttgccatacttcatccgcaacaagctctgtaaagtgatcgtggacattgggagacaggattggcccatgttctatcacgacttcttcaccaatatcttacagttaatccaaagccccgtgactacacccctcggactgatcatgcttaagaccacgtctgaggagctggcttgcccacgcgaggatcttagtgtggcccgcaaggaagagctcagaaagctcctcctcgaccaagtacagaccgtgctgggtctgctgacaggaattttagaaacagtttgggacaagcattccgtaactgctgctacacctcccccttcgcccacgtccggtgagtctggggaccttctctctaacctgctgcagtcgccatcctccgcaaaacttctgaaccaaccgatccctattttggatgtggagtccgagtacatatgtagcctcgctttagaatgcttggctcatttgtttagctggatcccactgagtgcctccatcacaccttccctgctaactaccatcttccacttcgctagatttggatgcgacatccgggcgcgtaagatggcttccgtgaatggctcatctcagaactgcgtcagcggccaagaacgcggaagactgggtgtcctggccatgagctgtatcaatgaattaatgtcgaaaaactgcgtgcccatggaatttgaagaataccttttgcggatgttccagcagaccttttacctcctccaaaagatcacaaaggataacaacgcacacactgtcaagtctcgcctcgaggaactggacgagtcctacattgagaaattcaccgatttcctgaggctgtttgtgtcagtgcacttgagacgaattgaaagttatagtcagtttcccgtggtggagttcctgactctgctgttcaaatatacttttcaccagcctacacacgaaggttacttcagctgcctcgacatatggacactcttcttggattacttgacttctaaaatcaagtccaggctgggcgacaaggaggctgtactaaataggtacgaagacgcgctcgtgctgctgctgactgaggtactgaataggatacaattccggtataaccaagcacagctggaggagctggacgacgagacccttgatgacgaccagcagacggaatggcaaagatatctccgccaatcattggaagttgtggctaaggtgatggagcttctcccgactcacgccttcagtaccttattccctgttcttcaggacaatttggaggtgtacctcggtctccagcaattcatagtgacctcagggtcgggccataggttgaacatcaccgcagagaacgactgcagaagactacactgctctcttagagacctctcttcacttctgcaggcagtgggcaggctggcagagtactttatcggcgatgtttttgctgctcgcttcaatgatgctctgaccgtggtggagagactggtgaaagttacattgtacgggagccagatcaaactgtataatatcgagacggcagtcccgtctgtcctgaaacccgatttgatcgacgtgcatgcccagagccttgccgcactgcaggcctatagccactggttagcacagtactgctccgaggtgcaccggcagaacacccagcaattcgtcacactgatctccactaccatggacgcaatcactcctttaataagtacaaaggttcaggataagctgctgctatcagcatgtcacctgttagtgagcctggctaccacggtgcgccctgtcttcctgatcagtatcccggccgtgcagaaggtttttaataggatcacagatgcgagcgccctgcgactcgtggataaagcacaggtgctggtctgcagagctctttccaacatcctgttgctgccttggccgaacttaccagaaaacgaacagcaatggcccgtacgtagcatcaaccacgcgtccttaatttctgcattgtccagggattaccgcaatcttaaaccgtcagccgtggctccacaacggaagatgcctttggatgacacaaagcttattatccaccagacccttagtgtactggaagacatagttgagaacattagcggagaatctacaaaatcacgtcagatatgttatcagagcctccaggagagcgttcaagtaagcctcgccctttttcctgcatttattcatcaaagcgacgtaactgatgagatgctctcgttctttcttactttgttccgggggctgcgggtgcaaatgggagtacctttcactgaacagatcatccaaactttccttaatatgtttacacgcgagcagctcgccgaatctattttgcatgagggcagcaccggctgcagggtggtggagaagtttctaaagatcctgcaggtcgtagtgcaagaaccaggccaggtcttcaagccgttcctgccaagtatcatcgcactttgcatggagcaggtctacccaattattgccgagagaccaagccccgacgtgaaagcagaattgttcgagttgctgtttcgaactttgcaccacaactggaggtacttctttaagagcacagtgctcgcgtccgtccagaggggaatcgcagaggagcagatggaaaatgaacctcagttttccgccatcatgcaggcattcggacaatcatttctgcagcctgacatccatctctttaaacagaacctgttttatctcgagactttgaataccaagcaaaagctgtaccacaagaaaatctttcgcacggccatgttgttccagttcgtcaacgtgctgctgcaggtgctagttcataaaagccacgacctgctacaagaagaaatcggtatagctatttataacatggcttcggtggactttgacgggttttttgccgccttcctgcctgaatttctgacatcctgtgacggcgttgatgcgaatcagaaatctgtgctcggcagaaactttaagatggatagggacttgccctcctttacccagaatgtgcaccgtctcgttaacgacctgaggtattacagattgtgcaatgacagcctccctccagggactgtcaagctctag

SEQ ID NO: 95691 - DNA, 3336 bp, Artificial Sequence
  derived and/or modified sequence
atgacagagttcttccatgactgcaccaccaatgaaaggaagcgggagattgaggagctgctgaacaactttgcccagcagatcggggcctggaggttctgcctgtacttcctgagcagcaccagaaatgactatgtgatgatgtacagcctgactgtgtttgaaaatctcatcaacaagatgtggctgggcgtgcccagccaggacaagatggagatccgcagctgcctgcccaagctgctgctggcccaccacaagaccctgccctacttcatccggaacaagctgtgcaaggtgattgtggacatcggccggcaggactggcccatgttctaccatgacttcttcaccaacatcctgcagctgatccagagccctgtgaccacccccctgggcctcatcatgctgaagaccaccagcgaggagctggcctgcccccgggaggacctgtctgtggccaggaaggaggagctgaggaagctgctgctggaccaggtgcagacagtgctgggcctgctgaccggcatcctggagaccgtgtgggacaagcacagcgtgacagctgccaccccaccacccagccccaccagcggggagagcggggacctgctgagcaacctgctgcagagccccagcagcgccaagctgctgaaccagcccatccccatcctggatgtggagagcgagtacatctgcagcctggccctggagtgcctggcccacctgttctcctggatccccctgagcgccagcatcacccccagcctgctgaccaccatcttccactttgcccgcttcggctgtgacatccgggccaggaagatggcctctgtgaatggcagcagccagaactgtgtgtctggccaggagcggggccgcctgggcgtgctggccatgagctgcatcaatgagctgatgagcaagaactgtgtgcccatggagtttgaggagtacctgctgaggatgttccagcagaccttctacctgctgcagaagatcaccaaggacaacaatgcccacacagtgaagagccggctggaggagctggatgagagctacatcgagaagttcacagacttcctgcggctgtttgtgtctgtgcacctgcggcgcatcgagagctacagccagtttcctgtggtggagttcctgaccctgctcttcaagtacaccttccaccagcccacccatgagggctacttcagctgcctggacatctggaccctcttcctggactacctgaccagcaagatcaagagccggctgggggacaaggaggccgtgctgaacagatatgaagatgccctggtgctgctgctgacagaggtgctgaaccgcatccagttccgctacaaccaggcccagctggaggagctggatgatgagaccctggatgatgaccagcagacagagtggcagcgctacctgcggcagagcctggaggtggtggccaaggtgatggagctgctgcccacccacgccttcagcaccctcttccctgtgctgcaggacaacctggaggtgtacctgggcctgcagcagttcatcgtgaccagcggcagcggccaccggctgaacatcacagcagaaaatgactgccggcggctgcactgcagcctgcgggacctgagcagcctgctgcaggccgtgggccgcctggccgagtacttcatcggagatgtgtttgctgcccgcttcaatgatgccctgactgtggtggagcggctggtgaaggtgaccctgtatggcagccagatcaagctgtacaacattgaaacagctgtgcccagcgtgctgaagccagacctgattgatgtgcacgcccagagcctggccgccctgcaggcctacagccactggctggcccagtactgcagcgaggtgcaccggcagaacacccagcagtttgtgaccctcatcagcaccaccatggatgccatcacccccctcatcagcaccaaggtgcaggacaagctgctgctgagcgcctgccacctgctggtgtccctggccaccaccgtgcggcctgtgttcctgatcagcatcccagctgtgcagaaggtgttcaaccgcatcacagatgccagcgccctgcggctggtggacaaggcccaggtgctggtgtgccgggccctgagcaacatcctgctgctgccctggcccaacctgcctgaaaatgagcagcagtggcctgtgcgcagcatcaaccacgccagcctcatcagcgccctgagccgggactacagaaacctgaagcccagcgctgtggccccccagaggaagatgcccctggatgacaccaagctgatcatccaccagaccctgtctgtgctggaggacatcgtggagaacatcagcggggagagcaccaagagccggcagatctgctaccagagcctgcaggagagcgtgcaggtgtccctggccctcttccctgccttcatccaccagagtgatgtgacagatgagatgctgtccttcttcctgaccctcttccggggcctgcgggtgcagatgggcgtgcccttcacagagcagatcatccagaccttcctgaacatgttcacccgggagcagctggccgagagcatcctgcacgagggcagcacaggctgccgggtggtggagaagttcctgaagatcctgcaggtggtggtgcaggagcccggccaggtgttcaagcccttcctgcccagcatcatcgccctgtgcatggagcaggtgtaccccatcatcgccgagcggcccagcccagatgtgaaggccgagctgtttgagctgctcttccgcaccctgcaccacaactggagatacttcttcaagagcacagtgctggcctctgtgcagaggggcattgctgaggagcagatggagaatgagccccagttcagcgccatcatgcaggccttcggccagagcttcctgcagcctgacatccacctgttcaagcagaacctcttctacctggagaccctgaacaccaagcagaagctgtaccacaagaagatcttcagaacagccatgctgttccagtttgtgaatgtgctgctgcaggtgctggtgcacaagagccatgacctgctgcaggaggagatcggcatcgccatctacaacatggcctctgtggactttgatggcttctttgctgccttcctgcctgagttcctgaccagctgtgatggagtggatgccaaccagaagtctgtgctgggcaggaacttcaagatggaccgggacctgcccagcttcacccagaatgtgcaccggctggtgaatgacctgcgctactaccgcctgtgcaatgacagcctgcccccaggcaccgtgaagctgtag

SEQ ID NO: 95692 - DNA, 3336 bp, Artificial Sequence
  derived and/or modified sequence
atgaccgagttcttccacgactgcaccaccaacgagcggaagcgggagatcgaagaactattgaataactttgcccagcagatcggggcttggagattctgcctttatttcctatcttccacacgcaacgactacgtgatgatgtatagtctgacggtgtttgaaaatctgattaataagatgtggctcggcgtgcctagccaagataaaatggagattcgcagttgcttgccaaaactgctcctggctcaccacaagactctgccctatttcatccgcaataagctctgcaaggtgatcgtagacatcggccgtcaggactggcccatgttctaccatgatttttttacgaacatccttcagctcatccagtcccccgtgactacgcctctgggcctaatcatgctgaagactacctcggaagaactcgcctgccctagagaagatttgagcgtggcccgaaaagaggagctccgcaaacttttactggaccaggtccagaccgtgttagggctgcttactggcattttagaaacagtctgggataaacacagtgtgaccgcagctactccccctccctcccccacgtccggggaaagtggggatctgcttagcaatctcctacaaagtccctcatcagccaaactcctgaaccagccaatacccatcctggacgttgagtccgaatatatctgcagtctggccttagagtgtcttgcccacctgttcagctggatccctctttccgcttcaatcactccgtcactcctcaccaccatattccatttcgcacgttttggctgtgatattcgagcacgtaagatggcctccgtcaatggcagctcccaaaactgcgtcagcgggcaagagagaggacggctcggcgtcttggcgatgtcatgtattaacgagttgatgtcaaagaactgcgtccccatggaatttgaagaatatctgttgcggatgttccaacagaccttctatctgctgcagaaaataactaaggataataacgcccatactgtgaaatccagactggaagagctcgacgaatcctatatcgagaaattcactgacttcctgcgcttattcgtctcagtgcacttgagacgaattgaatcctactcccagttccctgttgtcgaatttcttactctcttgtttaagtatacctttcaccagcctacccatgaaggatacttctcttgtctggatatatggaccttgtttctcgactaccttaccagcaagatcaagtcgaggctcggagataaggaggccgtgctcaatcgctacgaggacgcactcgtcctactactgaccgaggtgttaaaccgaattcagtttagatataaccaggcccagctggaggagttggacgacgaaacattggacgacgatcaacagacagaatggcagcgatacctgcggcagtcactggaggtggtggccaaggttatggagctcctgccgacacacgcattttcaactttgttccccgttctccaggacaacttggaagtgtatcttggattacagcagtttattgtgacttctggaagtggacacaggcttaacattacggctgaaaacgattgtagaaggctgcactgctcactgcgcgacctttctagccttctgcaagccgtcggccggctcgcagagtattttattggggatgtttttgccgctagattcaacgatgctctgaccgtggttgaaagacttgtgaaggttacactgtacggcagccagattaagctttataacatcgagacagcagtgccatcggtactcaaacctgaccttatagatgtccacgctcagagtctcgccgctcttcaggcatatagccattggctggcccaatactgctccgaggtgcaccggcaaaatacccagcagttcgttaccctgataagtacgacaatggacgccatcactccgttaatttctaccaaagtacaggacaaactgcttttaagcgcctgccacctactggtctctttagccactacggtgcgcccggtatttctgatcagtatacctgccgtgcagaaggtcttcaacagaattactgatgccagcgctctgcgcttagtggacaaggcacaggtcctcgtgtgtcgggctctaagcaatattttgcttctgccttggcctaatctgccagaaaacgaacagcagtggcccgtccgctctatcaatcatgcatcattgataagtgcactgtctagagactatagaaatctcaagccttcggccgtggcgccccagaggaagatgcctctggatgacacaaagcttatcatccatcagactctatccgttctggaagatattgtagagaacatctccggagaatctaccaagagtcgtcagatctgctaccagtctcttcaggagtccgtgcaggtatctcttgccctgtttcctgcattcattcatcagtccgacgttaccgacgagatgctgagtttctttctcacgctttttagagggctgcgcgtacagatgggtgtcccatttacggaacagattatccagacatttctgaatatgtttacccgcgagcagctggcggagagcatccttcacgaaggttcgaccggctgcagggtggtggagaagtttctgaaaattctgcaagtcgtggtacaggaacctgggcaagtatttaagccattcctaccgtctattattgctctttgtatggagcaggtgtaccctatcattgccgagcggcctagccccgatgtaaaggcagagctgtttgagcttttatttcggacactgcaccacaactggcgctactttttcaagtccacagtgttagcttccgttcagagaggcatcgccgaagaacagatggagaacgaacctcaattctccgcaatcatgcaggcctttggacagtcctttctgcagccagatattcatctgttcaagcaaaatctgttttacctggagacccttaatacaaaacaaaaactctaccacaaaaagatttttaggaccgctatgttatttcagttcgtcaacgtgctgctgcaggtactggttcataagtcccatgacctgctacaagaagaaatcggtatcgctatctacaatatggcttctgtcgattttgacggcttttttgccgctttcctgcccgaattcttaacatcatgcgatggggtcgacgctaaccaaaagtccgtgctgggccgcaatttcaagatggatcgcgacctcccaagcttcactcagaatgttcatcggttagtcaatgacctgcgttactacaggctgtgtaacgactctctgccaccagggactgtgaagctgtag

SEQ ID NO: 95693 - DNA, 3336 bp, Artificial Sequence
  derived and/or modified sequence
atgactgaattcttccacgattgtacaaccaacgagagaaagcgcgagattgaggaactgctcaataacttcgcccaacagataggtgcatggcggttctgcctctacttcttatccagcactcgtaacgactacgtgatgatgtactcccttacagtgtttgaaaatctcattaataagatgtggcttggagtgccttcccaggacaagatggagatcagatcatgcttacccaaactacttctcgctcaccacaagactctgccatattttattagaaacaaactgtgcaaagttattgtcgatatagggcgacaggattggcccatgttttatcatgactttttcacgaatatcttgcaactcatccagagtccggtcacaacccccttgggactgattatgctcaaaaccacctcagaggagttagcgtgccccagggaggatctttcagtggcccgaaaagaggagctcaggaaacttcttctggatcaggtgcagacagtcctggggctgctgaccgggattctggaaactgtttgggataagcacagcgtgacggcagctacccctcctccatctcccaccagtggcgagtccggagacttgctgtcaaacttgctccagagtccttccagcgctaagctgctcaatcagcctataccaatattggacgtcgagtccgagtacatttgttcactagctctggagtgcttggctcatcttttctcctggattccattgagtgccagtatcaccccctcactgttgacaaccatctttcactttgccaggttcggctgcgatattcgggcacgaaaaatggcaagtgtaaacggatcatcccaaaattgtgtctccggccaagagagaggtaggctgggcgtgctagccatgtcctgtattaacgaactgatgtctaaaaattgcgtcccaatggaatttgaggagtacttgctgagaatgtttcagcagaccttctacctactgcagaaaatcacaaaggataacaacgcccatacggtgaaatcccgcctggaggagctagatgaatcctacatagaaaagttcaccgatttccttcggctatttgtgtccgtacaccttagacgcatcgaaagctattctcagtttccggtggtcgagtttctgactctgctgtttaagtacacattccaccagccgacacacgaaggctatttctcctgcctagatatctggacattgtttttggattacctgactagcaaaatcaaatccagactgggagataaagaggcagtgctaaatagatacgaggatgccctcgtgttgctcttgactgaggttttaaatcggatacagttccgatacaatcaggctcagttggaggagctggatgatgagacattggatgacgaccagcaaaccgaatggcagcgctatctgagacagagcctcgaagtggtggctaaagtcatggaacttctccctactcatgccttttccacccttttccctgtgctacaggacaacttggaggtctacctaggtctccagcagtttattgtcacatctggaagcggccaccgcctcaacatcacggccgagaacgactgccgtagattacactgcagcctgcgagacttgtcttcgctgctgcaagccgttggcaggctggcggaatattttatcggtgacgttttcgccgctcggttcaacgacgcactgacagtagtggaaaggctcgtcaaggttacattgtacggctcgcagattaagctgtacaacattgaaaccgcggtgccttccgttctcaagcccgatctaatcgatgtgcatgcgcagtcactggccgctctgcaggcatatagccattggttagcgcagtattgtagcgaagtccatcggcagaatacccagcagttcgtgactcttataagcaccacaatggacgccattacccccttgatatccacgaaagttcaggacaagctgctactgagtgcatgccacctgcttgtgagtcttgccactacggtgaggccagtgtttctcataagcattccagcagttcagaaggtcttcaatagaattacagatgccagcgctctcagactcgtcgataaagctcaggtgttagtgtgccgggctctgtccaatattctgctcctaccatggccaaatctgccagagaatgagcaacagtggccggtccgttccatcaaccacgcctcactgatttcagctttaagtagagattacaggaacttgaaacctagtgcggtggcccctcaacggaaaatgcctctggacgatactaagttgattatacaccagactctgagcgtgctggaggacatcgtggaaaatatctccggggagtctactaaaagcaggcaaatttgctaccaaagcctgcaggagagcgtgcaggttagccttgctttgtttccagcatttatccaccagtctgacgtaactgacgagatgctgtcattctttctgacactctttcggggtctgcgtgttcaaatgggcgtgcctttcactgaacaaatcatccagaccttcttgaatatgttcaccagagagcagctcgctgagtccattttacatgaaggctctaccggttgtcgggtcgtggagaagtttttgaagatccttcaggtggtggtccaagagcccggacaggtctttaaacccttcctcccctctataatagccctttgcatggagcaagtgtatccgataatagccgaacgaccatctcccgacgttaaggcagaactcttcgaacttcttttcaggaccctgcatcacaactggcgttactttttcaagtctaccgtgttagcaagtgttcagcgtggtatagccgaggaacagatggaaaatgaaccccagttctctgcaatcatgcaggctttcgggcagagctttcttcagcccgacattcatctgtttaaacagaatctgttctacctggaaactctcaatacaaaacagaagctataccataagaagattttcaggactgccatgttatttcagttcgttaacgtgctgctacaagtgttagtgcacaagagccacgacctcctccaagaggaaattgggattgccatctacaatatggcctcagtagattttgacggattcttcgccgcattccttccagagttcctaacttcatgtgacggggtagatgctaaccaaaagtcggtcctcggacgaaactttaaaatggatagagacttaccatcattcactcagaacgtacatcgcctggtaaacgaccttcgctactaccggttatgcaacgactcactccctcccggaacagtaaaactgtag

SEQ ID NO: 95694 - DNA, 3336 bp, Artificial Sequence
  derived and/or modified sequence
atgaccgagttcttccacgactgcaccaccaacgagagaaagagagagatcgaggagctgctgaacaacttcgcccagcagatcggcgcctggagattctgcctgtacttcctgagcagcaccagaaacgactacgtgatgatgtacagcctgaccgtgttcgagaacctgatcaacaagatgtggctgggcgtgcccagccaggacaagatggagatcagaagctgcctgcccaagctgctgctggcccaccacaagaccctgccctacttcatcagaaacaagctgtgcaaggtgatcgtggacatcggcagacaggactggcccatgttctaccacgacttcttcaccaacatcctgcagctgatccagagccccgtgaccacccccctgggcctgatcatgctgaagaccaccagcgaggagctggcctgccccagagaggacctgagcgtggccagaaaggaggagctgagaaagctgctgctggaccaggtgcagaccgtgctgggcctgctgaccggcatcctggagaccgtgtgggacaagcacagcgtgaccgccgccacccccccccccagccccaccagcggcgagagcggcgacctgctgagcaacctgctgcagagccccagcagcgccaagctgctgaaccagcccatccccatcctggacgtggagagcgagtacatctgcagcctggccctggagtgcctggcccacctgttcagctggatccccctgagcgccagcatcacccccagcctgctgaccaccatcttccacttcgccagattcggctgcgacatcagagccagaaagatggccagcgtgaacggcagcagccagaactgcgtgagcggccaggagagaggcagactgggcgtgctggccatgagctgcatcaacgagctgatgagcaagaactgcgtgcccatggagttcgaggagtacctgctgagaatgttccagcagaccttctacctgctgcagaagatcaccaaggacaacaacgcccacaccgtgaagagcagactggaggagctggacgagagctacatcgagaagttcaccgacttcctgagactgttcgtgagcgtgcacctgagaagaatcgagagctacagccagttccccgtggtggagttcctgaccctgctgttcaagtacaccttccaccagcccacccacgagggctacttcagctgcctggacatctggaccctgttcctggactacctgaccagcaagatcaagagcagactgggcgacaaggaggccgtgctgaacagatacgaggacgccctggtgctgctgctgaccgaggtgctgaacagaatccagttcagatacaaccaggcccagctggaggagctggacgacgagaccctggacgacgaccagcagaccgagtggcagagatacctgagacagagcctggaggtggtggccaaggtgatggagctgctgcccacccacgccttcagcaccctgttccccgtgctgcaggacaacctggaggtgtacctgggcctgcagcagttcatcgtgaccagcggcagcggccacagactgaacatcaccgccgagaacgactgcagaagactgcactgcagcctgagagacctgagcagcctgctgcaggccgtgggcagactggccgagtacttcatcggcgacgtgttcgccgccagattcaacgacgccctgaccgtggtggagagactggtgaaggtgaccctgtacggcagccagatcaagctgtacaacatcgagaccgccgtgcccagcgtgctgaagcccgacctgatcgacgtgcacgcccagagcctggccgccctgcaggcctacagccactggctggcccagtactgcagcgaggtgcacagacagaacacccagcagttcgtgaccctgatcagcaccaccatggacgccatcacccccctgatcagcaccaaggtgcaggacaagctgctgctgagcgcctgccacctgctggtgagcctggccaccaccgtgagacccgtgttcctgatcagcatccccgccgtgcagaaggtgttcaacagaatcaccgacgccagcgccctgagactggtggacaaggcccaggtgctggtgtgcagagccctgagcaacatcctgctgctgccctggcccaacctgcccgagaacgagcagcagtggcccgtgagaagcatcaaccacgccagcctgatcagcgccctgagcagagactacagaaacctgaagcccagcgccgtggccccccagagaaagatgcccctggacgacaccaagctgatcatccaccagaccctgagcgtgctggaggacatcgtggagaacatcagcggcgagagcaccaagagcagacagatctgctaccagagcctgcaggagagcgtgcaggtgagcctggccctgttccccgccttcatccaccagagcgacgtgaccgacgagatgctgagcttcttcctgaccctgttcagaggcctgagagtgcagatgggcgtgcccttcaccgagcagatcatccagaccttcctgaacatgttcaccagagagcagctggccgagagcatcctgcacgagggcagcaccggctgcagagtggtggagaagttcctgaagatcctgcaggtggtggtgcaggagcccggccaggtgttcaagcccttcctgcccagcatcatcgccctgtgcatggagcaggtgtaccccatcatcgccgagagacccagccccgacgtgaaggccgagctgttcgagctgctgttcagaaccctgcaccacaactggagatacttcttcaagagcaccgtgctggccagcgtgcagagaggcatcgccgaggagcagatggagaacgagccccagttcagcgccatcatgcaggccttcggccagagcttcctgcagcccgacatccacctgttcaagcagaacctgttctacctggagaccctgaacaccaagcagaagctgtaccacaagaagatcttcagaaccgccatgctgttccagttcgtgaacgtgctgctgcaggtgctggtgcacaagagccacgacctgctgcaggaggagatcggcatcgccatctacaacatggccagcgtggacttcgacggcttcttcgccgccttcctgcccgagttcctgaccagctgcgacggcgtggacgccaaccagaagagcgtgctgggcagaaacttcaagatggacagagacctgcccagcttcacccagaacgtgcacagactggtgaacgacctgagatactacagactgtgcaacgacagcctgccccccggcaccgtgaagctgtag

SEQ ID NO: 95695 - protein, 112 aa, Artificial Sequence
  derived and/or modified sequence
MDVLASYSIFQELQLVHDTGYFSALPSLEETWQQTCLELERYLQTEPRRISETFGEDLDCFLHASPPPCIEESFRRLDPLLLPVEAAICEKSSAVDILLSRDKLLSETCLSL

SEQ ID NO: 95696 - protein, 60 aa, Artificial Sequence
  derived and/or modified sequence
MDVLASYSIFQELQLVHDTGYFSALPSLEETWQQTCLELERYLQTEPRRISETFGEDLDC

SEQ ID NO: 95697 - DNA, 339 bp, Artificial Sequence
  derived and/or modified sequence
atggatgttctggcatcctactctatattccaggagttacagctggtgcatgacacaggctactttagcgctttgccaagcttagaagagacttggcaacaaacctgcctagaactggagcggtatcttcagactgagccccgccgcatttctgagacttttggagaggacctggactgctttcttcacgcttccccccccccttgcattgaagagtcatttagaaggctggatccactgctactcccggtagaggccgccatctgcgaaaagagctcagccgtggatattctcctctctagagacaaactgctatccgagacctgtctaagcctgtag

SEQ ID NO: 95698 - DNA, 183 bp, Artificial Sequence
  derived and/or modified sequence
atggacgtgctggctagctactctatatttcaggagctgcaactagtgcacgacacgggctacttttccgccctaccctccctggaagagacctggcagcaaacttgcctggagttagaacggtatctccagacagagccgcgtcgcatttccgagacttttggcgaggatctggactgttag

SEQ ID NO: 95699 - DNA, 750 bp, Artificial Sequence
  derived and/or modified sequence
acacgcggcctaatggacgccctcctcgagatcccacggctgcgcggagaaccgaacggagggagggagtttggggagggggaagagcaggaggaggagaaaagggagggggaagactacaaactagcaaggatggggtggggggtggggagggaagggaaggggggggaagagaagcgatcgcgagagaaaaaaatgcaacctcccaaaataaagagcaaagattgcattaggagcgaacagcgctgcagaaatagatggcagcttcgtgtcattgactgaaacaaaacaaaacaaaagggccactggatgtctgccttcttggggggtgagccagacagactgacaaacaaacagccccaactgtgttcgggggagggtttcgcctcccgttttgcccggcagcagcagcatggacgtgttggctagttatagtatattccaggagctacaacttgtccacgacaccggctacttctcagctttaccatccctggaggagacctggcagcagacatgccttgaattggaacgctacctacagacggagccccggaggatctcagagacctttggtgaggacttggactgtttcctccacgcttcccctcccccgtgcattgaggaaagcttccgtcgcttagaccccctgctgctccccgtggaagcggccatctgtgagaagagctcggcagtggacatcttgctctctcgggacaagttgctatctgagacctgcctcagcctcca

SEQ ID NO: 95700 - DNA, 594 bp, Artificial Sequence
  derived and/or modified sequence
attgtgcagggttttcatctcagatgtaacagatctctctatgtctacatcccaactccagaaaacgagaaatcgagttcctcctctcaccatcgaagctctgcagacacctcgctggagaccccatggtgagcctcatcacgtaaaggccccctcgcaagctgccggctccagcttgcgccccacgtctacctaggctccctctagcctctttaacgcacagtcgagcaacaggccccttgcaatcaactctagccgccggactcccgaccagttgactgaaacaaaacaaaacaaaagggccactggatgtctgccttcttggggggtgagccagacagactgacaaacaaacagccccaactgtgttcgggggagggtttcgcctcccgttttgcccggcagcagcagcatggacgtgttggctagttatagtatattccaggagctacaacttgtccacgacaccggctacttctcagctttaccatccctggaggagacctggcagcagacatgccttgaattggaacgctacctacagacggagccccggaggatctcagagacctttggtgaggacttggactgttt

SEQ ID NO: 95701 - DNA, 339 bp, Artificial Sequence
  derived and/or modified sequence
atggatgtgctggccagctacagcatcttccaggagctgcagctggtgcatgacaccggctacttcagcgccctgcccagcctggaggagacctggcagcagacctgcctggagctggagcgctacctgcagacagagccccggcgcatcagcgagaccttcggggaggacctggactgcttcctgcacgccagccccccaccctgcatcgaggagagcttccggcggctggaccccctgctgctgcctgtggaggccgccatctgtgagaagagcagcgctgtggacatcctgctgagccgggacaagctgctgtctgagacctgcctgagcctgtag

SEQ ID NO: 95702 - DNA, 183 bp, Artificial Sequence
  derived and/or modified sequence
atggatgtgctggccagctacagcatcttccaggagctgcagctggtgcatgacaccggctacttcagcgccctgcccagcctggaggagacctggcagcagacctgcctggagctggagcgctacctgcagacagagccccggcgcatcagcgagaccttcggggaggacctggactgctag

SEQ ID NO: 95703 - DNA, 339 bp, Artificial Sequence
  derived and/or modified sequence
atggacgtgctggccagctacagcatcttccaggagctgcagctggttcacgacaccggttattttagcgccctgccgagtctggaggagacctggcagcagacgtgtttagaactcgagagatacttgcaaactgagccgcggcgcatcagtgagacttttggcgaagatctagactgtttcttgcacgcctcccccccgccttgcattgaggaatccttcagaaggctagatccgctgttgctgccagtggaggccgctatctgcgaaaagtccagtgcggtcgacattttactgtccagagacaaacttctatcggagacttgcctgagtttgtag

SEQ ID NO: 95704 - DNA, 183 bp, Artificial Sequence
  derived and/or modified sequence
atggacgtgctggccagctacagcatcttccaggagctgcagctggtgcatgatacaggttatttctctgctctcccatctttggaagaaacttggcaacagacctgtctcgaactggagaggtatctgcagacagagccacgccgaatcagcgaaaccttcggggaagacttggactgctag

SEQ ID NO: 95705 - DNA, 339 bp, Artificial Sequence
  derived and/or modified sequence
atggacgtcttagccagctatagcatattccaggaactgcaactggtgcatgacaccggatatttctctgctctcccgagtctggaagagacatggcagcagacatgtctggagctggagaggtatctgcagaccgagccccgaagaatcagcgaaacgtttggggaggacctggactgctttctccacgcctccccacccccatgcatcgaggaaagtttcagacggctagacccgttattgctcccggtcgaagccgctatttgcgaaaagagctctgctgtggacatacttctctcgcgggacaaactcttgtctgaaacatgtctgagcttatag

SEQ ID NO: 95706 - DNA, 183 bp, Artificial Sequence
  derived and/or modified sequence
atggacgtactggcttcttattccatattccaggaacttcaattagttcatgatactggatattttagcgccctcccctctcttgaggaaacctggcagcagacttgtctcgagctcgagcgctacttacagactgaaccacggagaattagcgagacttttggcgaggacctcgattgttag

SEQ ID NO: 95707 - DNA, 339 bp, Artificial Sequence
  derived and/or modified sequence
atggacgtgctggccagctacagcatcttccaggagctgcagctggtgcacgacaccggctacttcagcgccctgcccagcctggaggagacctggcagcagacctgcctggagctggagagatacctgcagaccgagcccagaagaatcagcgagaccttcggcgaggacctggactgcttcctgcacgccagcccccccccctgcatcgaggagagcttcagaagactggaccccctgctgctgcccgtggaggccgccatctgcgagaagagcagcgccgtggacatcctgctgagcagagacaagctgctgagcgagacctgcctgagcctgtag

SEQ ID NO: 95708 - DNA, 183 bp, Artificial Sequence
  derived and/or modified sequence
atggacgtgctggccagctacagcatcttccaggagctgcagctggtgcacgacaccggctacttcagcgccctgcccagcctggaggagacctggcagcagacctgcctggagctggagagatacctgcagaccgagcccagaagaatcagcgagaccttcggcgaggacctggactgctag

SEQ ID NO: 95709 - protein, 269 aa, Artificial Sequence
  derived and/or modified sequence
MTCLELERYLQTEPRRISETFGEDLDCFLHASPPPCIEESFRRLDPLLLPVEAAICEKSSAVDILLSRDKLLSETCLSLQPASSSLDSYTAVNQAQLNAVTSLTPPSSPELSRHLVKTSQTLSAVDGTVTLKLVAKKAALSSVKVGGVATAAAAVTAAGAVKSGQSDSDQGGLGAEACPENKKRVHRCQFNGCRKVYTKSSHLKAHQRTHTGEKPYKCSWEGCEWRFARSDELTRHYRKHTGAKPFKCNHCDRCFSRSDHLALHMKRHI

SEQ ID NO: 95710 - DNA, 810 bp, Artificial Sequence
  derived and/or modified sequence
atgacctgtctggaactcgagcggtacctgcaaactgaaccccgcaggatatccgagacgttcggcgaggatttggactgttttcttcacgcttcacctcctccctgcatcgaggaatcctttaggagactagatcctctcctgctgcctgtggaggccgcgatctgcgagaagtcaagcgctgtggatatcttgctctctcgcgacaagttattgagtgaaacttgcctgtcccttcagccggcctcctcatctcttgacagttacactgccgtgaatcaggcgcagctcaatgccgttacctccctgacaccaccgtcttctccagaacttagtagacatctcgtcaagacgtcccagactctcagcgctgtcgatggcaccgttaccctgaaactcgttgcaaaaaaagctgccctaagcagcgtgaaggttggcggcgtcgcgactgctgctgcagccgtgacagctgccggagctgttaaatcaggccagagcgacagcgaccagggaggcctcggcgcagaggcatgtccagagaacaaaaaacgggtccacaggtgccagttcaacggatgccgcaaggtgtataccaagagtagccacctgaaagcgcaccagcggacgcatacgggagaaaaaccatataagtgctcctgggagggatgcgagtggagattcgcgaggtcagacgagctgacacgtcactatcgaaagcacacaggtgccaagccgtttaagtgtaaccactgcgacaggtgtttctctcgaagcgaccatctggcactgcatatgaagaggcatatctag

SEQ ID NO: 95711 - DNA, 339 bp, Artificial Sequence
  derived and/or modified sequence
atggatgtgttggcctcatacagcatttttcaagagctacaattggtgcacgatacaggctatttctctgcccttccatcacttgaggaaacctggcagcagacgtgcctcgaactggaacggtatctgcagaccgagccgcgccgcatttccgagaccttcggcgagaaaccatacaagtgctcatgggagggatgcgagtggcgcttcgccagatccgatgagttaacaagacattacaggaaacatactggggctaaaccattcaaatgcaatcactgtgaccgatgtttctccaggtctgaccatctggcccttcatatgaagcgccacatttag

SEQ ID NO: 95712 - DNA, 3037 bp, Artificial Sequence
  derived and/or modified sequence
agatgtaacagatctctctatgtctacatcccaactccagaaaacgagaaatcgagttcctcctctcaccatcgaagctctgcagacacctcgctggagaccccatgacatgccttgaattggaacgctacctacagacggagccccggaggatctcagagacctttggtgaggacttggactgtttcctccacgcttcccctcccccgtgcattgaggaaagcttccgtcgcttagaccccctgctgctccccgtggaagcggccatctgtgagaagagctcggcagtggacatcttgctctctcgggacaagttgctatctgagacctgcctcagcctccagccggccagctcttctctagacagctacacagccgtcaaccaggcccagctcaacgcagtgacctcattaacgcccccatcgtcccctgagctcagccgccatctggtcaaaacctcacaaactctctctgccgtggatggcacggtgacgttgaaactggtggccaagaaggctgctctcagctccgtaaaggtgggaggggtcgcaacagctgcagcagccgtgacggctgcgggggccgttaagagtggacagagcgacagtgaccaaggagggctgggggctgaagcatgtcccgaaaacaagaagagggttcaccgctgtcagtttaacgggtgccggaaagtttatacaaaaagctcccacttaaaggcccaccagaggactcacacaggtgagaagccttataagtgctcatgggagggatgtgagtggcgttttgcacgaagcgatgagctcacgaggcactacaggaaacacacaggtgcaaagcccttcaaatgcaaccactgcgacaggtgtttttccaggtctgaccatcttgccctccacatgaagagacatatctaaaaaaccgaaaggccagagttgccatggcatcggctagtgtctaaaggaaacgccatgaggcagggggctggacttcaggcggggacccattgcctcgcagaagaaagttctcacttataaacctctgtacacacacacacacacacacacatatacacacactcacagacccacacacatacacactgtcatgcactcaactatatttaaaatatatacgtctattctttatgccttgccctagccagatggaagaagatgaagaaggaaaccaggtgaactcagcaaggcagactggctgcttacttcagcactattggaattatttcccgctgttgccaatggaaatcaaagaaaatggatgtgacgtctgtgcaggtggacggcagtccgaggggcttatttcacttgcttctcagtgcaacttgataggagaatccagcatcttaaagttgcatatgtgtagcactaatgtttctttttaaatagttgggggaaaatgacctagaaaaccaaattgcagtttggtagccaaaattaactcttggtttatttgtcctttgtgtgtgaaaagtcctactattccgtgcgtcagacttcctcacagaactgttgactggttttggttcttagtactattgagatctttcgcgtcgatcccaacggccttagcggcggcagactggaataacaccttacacctttctggcctgcatttctgtagacttcactctcaagggaggagttttcttttcttacgttttgacttttgcacaccatatgcactagggattctggaaacttctagcatgactgcaaagtggccaagagaataaagtccttgatgataaatcacagtatatcccttgagcctcaccttattgccagtgctagattttttctttttaatctctccgtttttgctaacgaaaacttgaaaagcttatttggaagcttaaatgttttatcttttctccatggactaaacctctccaggactctctcggcacctggatgtccagctctcgaagcagccagtcagatgggacatcacagttctctcatcctccttgaggcatgatgacctcagctcatagtgatcaaccgttgtgctgtgtgtcattgctaccccataaccagttacagcatagatgtcgctagtctcagagggcagctgcgtatttaatttaactctggtttatgacctgacaaaaagccaaaaatatcactctttccaggagtggggaaaactgaggatgcctcccaagtctagtggcttcacaaaagatcatcctgtcttctctgtcatgcccactgagctcctattcccctacgtgttacaatacacaatttaaaacgccattgtgggagtgaagggttgacatttaaggaaaaggttgaggtgtttctctcatgggctgtctaaaaggagagacacgtttctttctttccttttttttttggctaggcccaccatgacttgtgacctagaacccccaggattaacagaggcctcacatttactctgcaagctgactccaaaggagtctacagtccttacttgtcatgccacactcacacatccagtagtggtctctatctacccgcattcctagctagctggcactggcctcaactccaaagactgcctttaggaccatcaaatggcctatgcaagcaagcggggtggttattaggacagattgtatattttgtatattctgggaccatcccttcaagacacgtctataaaacaaaaatggcgcttggtccacacacggttgctgctccctcctaccagctggctcccctcctgtcctcctttgactgtttgactcattgactgttaaaatgccaccccatacatatttgggatgcaaaactgaagtcaaaaggaaataatataagaaacacaaacacatatatgacagcaaccttcaagatctgggttttcagctttctgcaacctttgttttcactgaaatgttgaaactactcgtctgagggcaaaggaacctcctcacaaatgctatagctgccaattggacacttggggcatttcgaggtctggccctaagaatttactttctccttttccttttttctatttagaccaaaaaaaa

SEQ ID NO: 95713 - DNA, 539 bp, Artificial Sequence
  derived and/or modified sequence
agcatggacgtgttggctagttatagtatattccaggagctacaacttgtccacgacaccggctacttctcagctttaccatccctggaggagacctggcagcagacatgccttgaattggaacgctacctacagacggagccccggaggatctcagagacctttggtgagaagccttataagtgctcatgggagggatgtgagtggcgttttgcacgaagcgatgagctcacgaggcactacaggaaacacacaggtgcaaagcccttcaaatgcaaccactgcgacaggtgtttttccaggtctgaccatcttgccctccacatgaagagacatatctaaaaaaccgaaaggccagagttgccatggcatcggctagtgtctaaaggaaacgccatgaggcagggggctggacttcaggcggggacccattgcctcgcagaagaaagttctcacttataaacctctgtacacacacacacacacacacacatatacacacactcacagacccacacacatacacactgtcatgcact

SEQ ID NO: 95714 - DNA, 810 bp, Artificial Sequence
  derived and/or modified sequence
atgacctgcctggagctggagcgctacctgcagacagagccccggcgcatcagcgagacctttggagaggacctggactgcttcctgcacgccagccccccaccctgcatcgaggagagcttccggcggctggaccccctgctgctgcctgtggaggccgccatctgtgagaagagcagcgctgtggacatcctgctgagccgggacaagctgctgtctgagacctgcctgagcctgcagcctgccagcagcagcctggacagctacacagctgtgaaccaggcccagctgaatgctgtgaccagcctgaccccacccagcagccctgagctgagccgccacctggtgaagaccagccagaccctgtctgctgtggatggcaccgtgaccctgaagctggtggccaagaaggccgccctgagctctgtgaaggtgggcggcgtggccacagctgctgctgctgtgacagctgctggagctgtgaagagcggccagagcgacagcgaccagggcggcctgggcgctgaggcctgcccagagaacaagaagagggtgcaccgctgccagttcaacggctgcaggaaggtgtacaccaagagcagccacctgaaggcccaccagaggacccacactggagagaagccctacaagtgctcctgggagggctgtgagtggaggtttgcccggagtgatgagctgaccaggcactacaggaagcacactggagccaagcccttcaagtgcaaccactgtgaccgctgcttcagcagaagtgaccacctggccctgcacatgaagaggcacatctag

SEQ ID NO: 95715 - DNA, 339 bp, Artificial Sequence
  derived and/or modified sequence
atggatgtgctggccagctacagcatcttccaggagctgcagctggtgcatgacaccggctacttcagcgccctgcccagcctggaggagacctggcagcagacctgcctggagctggagcgctacctgcagacagagccccggcgcatcagcgagaccttcggggagaagccctacaagtgctcctgggagggctgtgagtggaggtttgcccggagtgatgagctgaccaggcactacaggaagcacactggagccaagcccttcaagtgcaaccactgtgaccgctgcttcagcagaagtgaccacctggccctgcacatgaagaggcacatctag

SEQ ID NO: 95716 - DNA, 810 bp, Artificial Sequence
  derived and/or modified sequence
atgacctgcctggagctggagcggtacctgcagaccgagccccggcgaattagcgagacgtttggagaagatttggactgcttcttacatgcatcaccaccaccttgcattgaggagtcatttcggcggctggacccgctgctcctgccggtggaagctgctatatgtgaaaaatcaagtgccgtggacattcttctctcccgcgataagttgctgtccgagacatgtctatccctccagccagcatcttctagcctggactcctacactgcagtcaaccaggctcagctcaacgccgtgacctccttgactcccccctcctcccctgagctttcccggcatttggtcaagacaagtcagacattaagcgcagtcgacggcacagtcaccctgaaacttgtggccaagaaagcagccctgtcgtccgtcaaggttgggggcgtcgccaccgccgcagcggctgtcacagccgcgggagccgtaaaatctgggcagagcgactcagatcagggcggcctcggcgcggaagcttgcccagaaaataagaaacgcgtgcatcgctgccagtttaacggatgccgcaaagtgtacactaagtctagtcatctgaaggctcatcagaggactcacaccggggagaaaccctacaagtgctcctgggaaggatgtgaatggagattcgctcgctccgacgagcttacaagacattaccgtaaacacacaggtgcaaagccctttaaatgtaatcactgcgaccggtgtttttctcgatctgatcacctggcattacacatgaagagacacatatag

SEQ ID NO: 95717 - DNA, 339 bp, Artificial Sequence
  derived and/or modified sequence
atggacgtgctggccagctacagcatcttccaggagctgcagctggttcatgacacagggtatttcagcgcactgccgagcctggaagaaacctggcagcagacatgtctcgagctggagagatacttgcagaccgaaccacggcggataagcgagaccttcggtgagaaaccttacaagtgcagttgggaagggtgtgaatggcggtttgctagatccgatgagctcactagacactaccggaagcacaccggcgcaaagcccttcaaatgcaatcattgtgataggtgcttttctaggtccgaccatctggccctgcatatgaagcgccatatttag

SEQ ID NO: 95718 - DNA, 810 bp, Artificial Sequence
  derived and/or modified sequence
atgacatgcctggaactcgaacggtacctgcaaactgagcccaggcgtattagcgagacatttggggaggacttagattgtttcctgcacgcctcgccaccaccgtgcattgaagaatccttcaggagactcgatccgctcctcctgcctgtggaagcagccatctgtgagaagtcctctgcagttgacatactgctttctcgagacaagctgttgagtgaaacttgcttgtctctgcagccagcctcctcctccctggactcgtataccgcagttaatcaagcgcagctcaacgcggtcactagtcttacgccgccatccagtcccgaactgtctagacatttagtcaaaacctcacagacgctttctgccgtcgacgggaccgtaaccctgaagctcgtcgcgaagaaagcagccctctcctctgtgaaagtgggcggagtggccacagccgcagctgctgtcaccgccgctggagctgtcaaaagtggtcaatcggactctgatcaggggggacttggggctgaggcatgccccgaaaacaagaagcgggtgcaccggtgccagtttaatgggtgccggaaggtgtacacaaaatcttcacatttaaaggcccaccaaagaacccacactggagagaagccatacaaatgcagctgggaggggtgcgaatggcggttcgcacgtagtgatgagctcacccgccactaccgcaagcatacaggagccaagccctttaagtgcaaccattgtgacaggtgcttctccagaagcgaccaccttgctctgcacatgaagagacatatatag

SEQ ID NO: 95719 - DNA, 339 bp, Artificial Sequence
  derived and/or modified sequence
atggacgtgttggcgtcttattccatattccaggaacttcaactggtccacgacactggctatttttccgccctcccatcactcgaggagacctggcagcagacgtgcctagagttggaaagatacctgcagacagagcctcgaagaatctctgagacgtttggtgaaaaaccgtataagtgctcctgggaaggatgcgaatggcgttttgcgaggtccgacgaacttacacgacattaccggaaacacacaggcgctaaacccttcaagtgtaaccactgtgataggtgtttcagtaggagtgaccatctggcgctgcacatgaagaggcacatttag

SEQ ID NO: 95720 - DNA, 810 bp, Artificial Sequence
  derived and/or modified sequence
atgacctgcctggagctggagagatacctgcagaccgagcccagaagaatcagcgagaccttcggcgaggacctggactgcttcctgcacgccagcccccccccctgcatcgaggagagcttcagaagactggaccccctgctgctgcccgtggaggccgccatctgcgagaagagcagcgccgtggacatcctgctgagcagagacaagctgctgagcgagacctgcctgagcctgcagcccgccagcagcagcctggacagctacaccgccgtgaaccaggcccagctgaacgccgtgaccagcctgaccccccccagcagccccgagctgagcagacacctggtgaagaccagccagaccctgagcgccgtggacggcaccgtgaccctgaagctggtggccaagaaggccgccctgagcagcgtgaaggtgggcggcgtggccaccgccgccgccgccgtgaccgccgccggcgccgtgaagagcggccagagcgacagcgaccagggcggcctgggcgccgaggcctgccccgagaacaagaagagagtgcacagatgccagttcaacggctgcagaaaggtgtacaccaagagcagccacctgaaggcccaccagagaacccacaccggcgagaagccctacaagtgcagctgggagggctgcgagtggagattcgccagaagcgacgagctgaccagacactacagaaagcacaccggcgccaagcccttcaagtgcaaccactgcgacagatgcttcagcagaagcgaccacctggccctgcacatgaagagacacatctag

SEQ ID NO: 95721 - DNA, 339 bp, Artificial Sequence
  derived and/or modified sequence
atggacgtgctggccagctacagcatcttccaggagctgcagctggtgcacgacaccggctacttcagcgccctgcccagcctggaggagacctggcagcagacctgcctggagctggagagatacctgcagaccgagcccagaagaatcagcgagaccttcggcgagaagccctacaagtgcagctgggagggctgcgagtggagattcgccagaagcgacgagctgaccagacactacagaaagcacaccggcgccaagcccttcaagtgcaaccactgcgacagatgcttcagcagaagcgaccacctggccctgcacatgaagagacacatctag

SEQ ID NO: 95722 - protein, 274 aa, Artificial Sequence
  derived and/or modified sequence
MFPSWPTCLELERYLQTEPRRISETFGEDLDCFLHASPPPCIEESFRRLDPLLLPVEAAICEKSSAVDILLSRDKLLSETCLSLQPASSSLDSYTAVNQAQLNAVTSLTPPSSPELSRHLVKTSQTLSAVDGTVTLKLVAKKAALSSVKVGGVATAAAAVTAAGAVKSGQSDSDQGGLGAEACPENKKRVHRCQFNGCRKVYTKSSHLKAHQRTHTGEKPYKCSWEGCEWRFARSDELTRHYRKHTGAKPFKCNHCDRCFSRSDHLALHMKRHI

SEQ ID NO: 95723 - DNA, 825 bp, Artificial Sequence
  derived and/or modified sequence
atgttcccaagttggccaacatgcctggaactggaaagataccttcagacggagcctcgacgaatctccgagactttcggggaggaccttgattgtttcttacatgcttctcccccgccctgcatcgaggaaagtttccgcaggttggaccctttactgttacctgtcgaggccgcaatatgtgagaaaagctctgcagtggacatcctgctgagcagggataagctgctgtccgagacatgtctgtctctgcagccggcctcctctagcctagattcttacaccgcagttaatcaagcgcagttgaacgccgtgacttccttgacccctccaagctcacccgaactaagcaggcacttggtgaagacatcacagactcttagtgcagtcgatgggaccgtcactctgaagctggttgccaaaaaagctgctcttagctctgtcaaagtcggcggcgtcgccaccgccgcagccgccgtcactgcagccggagcggtcaagagcggacagtctgattctgatcagggagggctcggagctgaagcttgtcccgagaacaaaaaaagagttcatcgatgccagtttaatggctgtcggaaagtgtatacaaaatcttcccatttaaaggcgcaccagcgaactcatactggagagaagccctacaagtgttcttgggaaggctgtgaatggcgttttgctcgaagtgacgaactgactaggcattaccgtaagcacaccggtgcgaagccattcaagtgtaatcattgtgaccggtgcttctctcgctccgaccacctggctcttcatatgaaacggcacatctag

SEQ ID NO: 95724 - DNA, 1259 bp, Artificial Sequence
  derived and/or modified sequence
gatttgggagaggaaggggagatgatgtaactggttcggcatgttcccgtcttggccaacatgccttgaattggaacgctacctacagacggagccccggaggatctcagagacctttggtgaggacttggactgtttcctccacgcttcccctcccccgtgcattgaggaaagcttccgtcgcttagaccccctgctgctccccgtggaagcggccatctgtgagaagagctcggcagtggacatcttgctctctcgggacaagttgctatctgagacctgcctcagcctccagccggccagctcttctctagacagctacacagccgtcaaccaggcccagctcaacgcagtgacctcattaacgcccccatcgtcccctgagctcagccgccatctggtcaaaacctcacaaactctctctgccgtggatggcacggtgacgttgaaactggtggccaagaaggctgctctcagctccgtaaaggtgggaggggtcgcaacagctgcagcagccgtgacggctgcgggggccgttaagagtggacagagcgacagtgaccaaggagggctgggggctgaagcatgtcccgaaaacaagaagagggttcaccgctgtcagtttaacgggtgccggaaagtttatacaaaaagctcccacttaaaggcccaccagaggactcacacaggtgagaagccttataagtgctcatgggagggatgtgagtggcgttttgcacgaagcgatgagctcacgaggcactacaggaaacacacaggtgcaaagcccttcaaatgcaaccactgcgacaggtgtttttccaggtctgaccatcttgccctccacatgaagagacatatctaaaaaaccgaaaggccagagttgccatggcatcggctagtgtctaaaggaaacgccatgaggcagggggctggacttcaggcggggacccattgcctcgcagaagaaagttctcacttataaacctctgtacacacacacacacacacacacatatacacacactcacagacccacacacatacacactgtcatgcactcaactatatttaaaatatatacgtctattctttatgccttgccctagccagatggaagaagatgaagaaggaaaccaggtgaactcagcaaggcagactggctgcttacttcagcactattggaattatttcccgctgttgccaatggaaatcaaagaaaatggatgtgacgtctgtgcaggtggacggcagtccga

SEQ ID NO: 95725 - DNA, 825 bp, Artificial Sequence
  derived and/or modified sequence
atgttccccagctggcccacctgcctggagctggagcgctacctgcagacagagccccggcgcatcagcgagaccttcggggaggacctggactgcttcctgcacgccagccccccaccctgcatcgaggagagcttccggcggctggaccccctgctgctgcctgtggaggccgccatctgtgagaagagcagcgctgtggacatcctgctgagccgggacaagctgctgtctgagacctgcctgagcctgcagcctgccagcagcagcctggacagctacacagctgtgaaccaggcccagctgaatgctgtgaccagcctgaccccacccagcagccctgagctgagccgccacctggtgaagaccagccagaccctgtctgctgtggatggcaccgtgaccctgaagctggtggccaagaaggccgccctgagctctgtgaaggtgggcggcgtggccacagctgctgctgctgtgacagctgctggagctgtgaagagcggccagagcgacagcgaccagggcggcctgggcgctgaggcctgcccagagaacaagaagagggtgcaccgctgccagttcaacggctgcaggaaggtgtacaccaagagcagccacctgaaggcccaccagaggacccacactggagagaagccctacaagtgctcctgggagggctgtgagtggaggtttgcccggagtgatgagctgaccaggcactacaggaagcacactggagccaagcccttcaagtgcaaccactgtgaccgctgcttcagcagaagtgaccacctggccctgcacatgaagaggcacatctag

SEQ ID NO: 95726 - DNA, 825 bp, Artificial Sequence
  derived and/or modified sequence
atgttccccagctggcccacctgcctggagctggagcggtacctgcagacagaacccaggagaatctcagaaacatttggtgaggatttggattgttttctccacgccagtccccccccctgtattgaagaatcctttcgcagacttgaccccttgctgctacctgtggaagccgccatatgtgagaagtcatccgctgtcgacattcttctgtcaagggacaagctgttgtcagagacgtgtctgagcctgcagccggcctctagctcactggacagctacactgcggtgaaccaggcccagctgaatgccgtgacaagcttgacccctccgtcgtctcctgagctctcccgccacctagtaaagacgtcccagactctgtctgctgtcgacggtacggtgacattgaaacttgtggcaaagaaagctgcattgtccagtgttaaagtaggtggcgtggctactgccgccgccgcagttaccgctgcaggcgcggtcaaatccggtcagtcagatagtgaccagggcggtcttggcgcagaggcctgccccgaaaacaagaagcgggttcatagatgtcagtttaacggctgccgaaaggtgtacaccaagagtagtcatttgaaggcccatcagcgtacccataccggcgaaaaaccttacaagtgttcgtgggaggggtgtgaatggcggttcgctaggtctgacgaacttacccggcactacaggaagcacacgggtgctaaaccttttaaatgtaatcattgcgacaggtgcttttccagaagcgatcacctggcactacatatgaagaggcacatctag

SEQ ID NO: 95727 - DNA, 825 bp, Artificial Sequence
  derived and/or modified sequence
atgttcccttcttggcccacatgtctggagctagaaagatacctacagaccgaaccgaggcggatcagcgagacattcggagaagacctagactgctttctacacgcctccccccctccgtgcatcgaggaatccttccgcaggctggatccgctattgcttccagtggaggctgcaatatgtgagaagtcaagcgccgtagatattcttctgagcagagacaagctactttcggagacctgcctgagtttgcaacctgcttcttccagcttggactcctacactgctgtgaatcaggctcaactgaatgcagtgactagtttaaccccgcctagtagccccgaactctcacgtcacttggtcaaaactagccaaactctaagtgcagtggacgggaccgtgacactcaaactcgtcgcaaagaaggccgctctcagtagcgtgaaagtcggcggagtcgccacggcagccgctgctgtgaccgccgctggggctgtgaaaagcggtcagagcgactccgatcagggcggtctaggcgcagaggcttgtccagaaaataagaagcgggtgcaccgctgccagtttaatggctgccgaaaagtgtataccaaatccagccatctcaaagcccaccaacgcacacacaccggtgagaaaccttacaaatgctcctgggaaggatgcgaatggagattcgccaggagcgatgagttgaccaggcactaccgcaagcataccggggctaaacctttcaagtgcaaccactgcgacaggtgtttttccagatccgatcacctggcgttgcatatgaaacgtcatatctag

SEQ ID NO: 95728 - DNA, 825 bp, Artificial Sequence
  derived and/or modified sequence
atgttccccagctggcccacctgcctggagctggagagatacctgcagaccgagcccagaagaatcagcgagaccttcggcgaggacctggactgcttcctgcacgccagcccccccccctgcatcgaggagagcttcagaagactggaccccctgctgctgcccgtggaggccgccatctgcgagaagagcagcgccgtggacatcctgctgagcagagacaagctgctgagcgagacctgcctgagcctgcagcccgccagcagcagcctggacagctacaccgccgtgaaccaggcccagctgaacgccgtgaccagcctgaccccccccagcagccccgagctgagcagacacctggtgaagaccagccagaccctgagcgccgtggacggcaccgtgaccctgaagctggtggccaagaaggccgccctgagcagcgtgaaggtgggcggcgtggccaccgccgccgccgccgtgaccgccgccggcgccgtgaagagcggccagagcgacagcgaccagggcggcctgggcgccgaggcctgccccgagaacaagaagagagtgcacagatgccagttcaacggctgcagaaaggtgtacaccaagagcagccacctgaaggcccaccagagaacccacaccggcgagaagccctacaagtgcagctgggagggctgcgagtggagattcgccagaagcgacgagctgaccagacactacagaaagcacaccggcgccaagcccttcaagtgcaaccactgcgacagatgcttcagcagaagcgaccacctggccctgcacatgaagagacacatctag

SEQ ID NO: 95729 - protein, 321 aa, Artificial Sequence
  derived and/or modified sequence
GSRARWATEAAEAAAPASLSRAMAPRARRRRPLFALLLLCALLARLQVALQIAPPCTSEKHYEHLGRCCNKCEPGKYMSSKCTTTSDSVCLPCGPDEYLDSWNEEDKCLLHKVCDTGKALVAVVAGNSTTPRRCACTAGYHWSQDCECCRRNTECAPGLGAQHPLQLNKDTVCKPCLAGYFSDAFSSTDKCRPWTNCTFLGKRVEHHGTEKSDAVCSSSLPARKPPNGNVTGNSNSTFISSGQVMNFKGDIIVVYVSQTSQEGAAAAAEPMGRPVQEETLARRDSFAGNGPRFPDPCGGPEGLREPEKASRPVQEQGGAKA

SEQ ID NO: 95730 - DNA, 966 bp, Artificial Sequence
  derived and/or modified sequence
ggcagcagagccagatgggccaccgaggccgccgaggccgccgcccccgccagcctgagcagagccatggcccccagagccagaagaagaagacccctgttcgccctgctgctgctgtgcgccctgctggccagactgcaggtggccctgcagatcgcccccccctgcaccagcgagaagcactacgagcacctgggcagatgctgcaacaagtgcgagcccggcaagtacatgagcagcaagtgcaccaccaccagcgacagcgtgtgcctgccctgcggccccgacgagtacctggacagctggaacgaggaggacaagtgcctgctgcacaaggtgtgcgacaccggcaaggccctggtggccgtggtggccggcaacagcaccacccccagaagatgcgcctgcaccgccggctaccactggagccaggactgcgagtgctgcagaagaaacaccgagtgcgcccccggcctgggcgcccagcaccccctgcagctgaacaaggacaccgtgtgcaagccctgcctggccggctacttcagcgacgccttcagcagcaccgacaagtgcagaccctggaccaactgcaccttcctgggcaagagagtggagcaccacggcaccgagaagagcgacgccgtgtgcagcagcagcctgcccgccagaaagccccccaacggcaacgtgaccggcaacagcaacagcaccttcatcagcagcggccaggtgatgaacttcaagggcgacatcatcgtggtgtacgtgagccagaccagccaggagggcgccgccgccgccgccgagcccatgggcagacccgtgcaggaggagaccctggccagaagagacagcttcgccggcaacggccccagattccccgacccctgcggcggccccgagggcctgagagagcccgagaaggccagcagacccgtgcaggagcagggcggcgccaaggcctag

SEQ ID NO: 95731 - DNA, 966 bp, Artificial Sequence
  derived and/or modified sequence
gggtcgagggcaaggtgggcaaccgaggccgcagaggcagctgcccctgctagccttagtagagccatggcaccccgggcccggaggcgaagacccctgtttgcacttttattgctttgcgcactactggcaaggctgcaggtggccctgcagattgcgccgccgtgtaccagtgaaaaacactacgaacaccttgggaggtgttgcaacaagtgcgagcccggcaaatacatgagctctaaatgcacgacaacaagtgatagcgtgtgtctgccttgtggccccgatgaatacctcgacagttggaatgaggaagacaaatgtttattacacaaagtgtgcgacacaggtaaagcgctggtcgccgtcgttgctggcaacagcacaaccccccgcagatgcgcctgcaccgccggctatcactggagtcaggattgtgagtgctgcaggagaaataccgaatgcgcacccggtctgggcgctcaacatccccttcagctgaacaaagacaccgtgtgtaagccttgcctggccgggtacttttccgacgcatttagtagtactgacaagtgcaggccatggaccaactgcacattcttggggaaacgggtggaacaccacggcacagagaaaagtgacgccgtctgcagttccagcctgcctgcgagaaagccaccaaacggtaacgtgacaggaaatagtaatagcaccttcatttcctcagggcaagtcatgaattttaaaggggatataatcgtcgtgtacgtgtctcagacttcccaggaaggagcagcagccgctgccgaacctatgggacgtcctgtacaggaagagacactagctcgccgggacagcttcgcaggtaatggaccccgcttccctgatccctgcggaggcccagagggtctgcgggaaccggagaaggcatcaaggccagtacaggaacaaggcggagcgaaagcctag

SEQ ID NO: 95732 - DNA, 966 bp, Artificial Sequence
  derived and/or modified sequence
ggcagccgggcccgctgggccacagaggccgctgaggccgccgccccagccagcctgagccgggccatggccccccgggccaggagaagaagacccctgtttgccctgctgctgctgtgtgccctgctggcccggctgcaggtggccctgcagatcgccccaccctgcaccagcgagaagcactatgagcacctgggccgctgctgcaacaagtgtgagcccgggaagtacatgagcagcaagtgcaccaccaccagtgacagcgtgtgcctgccctgtggcccagatgagtacctggacagctggaatgaggaggacaagtgcctgctgcacaaggtgtgtgacaccgggaaggccctggtggccgtggtggccggcaacagcaccaccccccggcgctgtgcctgcacagctggctaccactggagccaggactgtgagtgctgcagaagaaacacagaatgtgcccctggcctgggcgcccagcaccccctgcagctgaacaaggacacagtgtgcaagccctgcctggccggctacttcagtgatgccttcagcagcacagacaagtgccggccctggaccaactgcaccttcctgggcaagagggtggagcaccacggcacagagaagagtgatgctgtgtgcagcagcagcctgcctgccaggaagcccccaaatggaaatgtgactggaaacagcaacagcaccttcatcagcagcggccaggtgatgaacttcaagggggacatcatcgtggtgtatgtgtcccagaccagccaggagggcgctgctgctgctgctgagcccatgggccggcctgtgcaggaggagaccctggcccggcgggacagctttgctggaaatggcccccgcttcccagacccctgtggcggccctgagggcctgcgggagcctgagaaggccagcaggcctgtgcaggagcagggcggggccaaggcctag

SEQ ID NO: 95733 - DNA, 966 bp, Artificial Sequence
  derived and/or modified sequence
ggcagccgggcccggtgggccaccgaggccgccgaggccgccgccccggcctctctctcacgggctatggcaccaagggcacgcaggagaaggccgctctttgccctgctcctcctctgcgcactcttagcccgcttacaggtcgccctgcagatcgccccaccttgcaccagtgagaagcactacgagcacctgggcagatgttgcaataagtgcgagccaggcaagtacatgtcatccaagtgtactacaacctcagatagtgtttgtctgccttgtggcccagacgaatacctggactcatggaatgaggaggataaatgtctgttgcataaagtttgcgacaccgggaaggcactcgttgcagtggtggccgggaattcgacaacaccacgccgctgtgcatgcactgcaggctaccactggtcacaggattgtgagtgttgtcgtaggaacacagaatgcgctcctgggttgggtgcgcaacaccccctccaacttaacaaggatactgtctgcaaaccttgcctggccgggtacttctccgacgcctttagctccaccgataagtgcaggccttggacgaattgtacttttctcggcaaacgcgtggaacatcatgggaccgaaaaatcagatgctgtttgctcatcgtctctgccagccaggaagccccccaacggcaatgttaccggcaatagtaactccacatttatatcctccgggcaggtaatgaatttcaagggagacataattgtggtgtacgtgagtcaaacctcccaggaaggagctgctgctgccgccgagcctatggggcgccccgtccaggaggagactctggctaggcgggactctttcgctgggaacggacctagatttccggacccctgcggcgggcccgaaggcctgagagagcccgaaaaggcatcaaggcctgtccaggaacaaggcggcgctaaagcctag

SEQ ID NO: 95734 - DNA, 966 bp, Artificial Sequence
  derived and/or modified sequence
gggagcagggctcgctgggcaaccgaggccgcagaggctgctgcacccgcatctctgagtagggcgatggcgccacgggcaagaagacggaggccactgtttgccctgctgttgttgtgtgcactcttagccaggttacaggttgcccttcagatcgcgcctccttgcacatctgaaaagcattacgagcatctagggaggtgttgtaacaagtgcgagccgggaaaatatatgtcatcaaagtgtactactacttctgattcagtttgcttaccttgcggcccagacgagtatctggattcctggaatgaggaagataagtgtctgctgcacaaggtgtgcgacaccgggaaggcacttgtggctgtggttgccggaaatagcaccacccccaggcgctgtgcctgcaccgccggttatcactggagtcaggactgtgaatgctgcaggcgaaacaccgagtgtgcccctggattgggagctcagcatccactccagttgaataaagacactgtatgcaagccctgcctcgctggatatttttcggatgccttctcctccacggacaagtgccgaccttggactaattgtacattccttgggaaacgagttgaacatcatggaacagagaaatcggacgcagtatgctcttcatcgttgcctgcgaggaaacctcccaacggcaacgtgaccggtaactcaaactcgaccttcatttccagcggccaggtcatgaacttcaaaggtgatatcatagtggtctacgtctcccagacatcccaagaaggcgctgcagccgctgcagaaccaatgggacgccctgtgcaggaggagacgctcgccagacgcgactccttcgcgggaaacggaccacggttcccggatccatgtggcggtcctgaaggactgagagaacccgagaaggcctctagacctgtccaagaacagggcggtgccaaagcttag

SEQ ID NO: 95735 - DNA, 3591 bp, Artificial Sequence
  derived and/or modified sequence
ggcagccgcgcccgctgggccacagaggccgctgaggccgcggcgcccgccagcctgtcccgcgccatggccccgcgcgcccggcggcgccgcccgctgttcgcgctgctgctgctctgcgcgctgctcgcccggctgcaggtggctttgcagatcgctcctccatgtaccagtgagaagcattatgagcatctgggacggtgctgtaacaaatgtgaaccaggaaagtacatgtcttctaaatgcactactacctctgacagtgtatgtctgccctgtggcccggatgaatacttggatagctggaatgaagaagataaatgcttgctgcataaagtttgtgatacaggcaaggccctggtggccgtggtcgccggcaacagcacgaccccccggcgctgcgcgtgcacggctgggtaccactggagccaggactgcgagtgctgccgccgcaacaccgagtgcgcgccgggcctgggcgcccagcacccgttgcagctcaacaaggacacagtgtgcaaaccttgccttgcaggctacttctctgatgccttttcctccacggacaaatgcagaccctggaccaactgtaccttccttggaaagagagtagaacatcatgggacagagaaatccgatgcggtttgcagttcttctctgccagctagaaaaccaccaaatggaaatgtgactggaaacagtaactccacgttcatctccagcgggcaggtgatgaacttcaagggcgacatcatcgtggtctacgtcagccagacctcgcaggagggcgcggcggcggctgcggagcccatgggccgcccggtgcaggaggagaccctggcgcgccgagactccttcgcggggaacggcccgcgcttcccggacccgtgcggcggccccgaggggctgcgggagccggagaaggcctcgaggccggtgcaggagcaaggcggggccaaggcttgagcgccccccatggctgggagcccgaagctcggagccagggctcgcgagggcagcaccgcagcctctgccccagccccggccacccagggatcgatcggtacagtcgaggaagaccacccggcattctctgcccactttgccttccaggaaatgggcttttcaggaagtgaattgatgaggactgtccccatgcccacggatgctcagcagcccgccgcactggggcagatgtctcccctgccactcctcaaactcgcagcagtaatttgtggcactatgacagctatttttatgactatcctgttctgtgggggggggggtctgttttccccccatatttgtattccttttcataacttttcttgatatctttcctccctcttttttaatgtaaaggttttctcaaaaattctcctaaaggtgagggtctctttcttttctcttttccttttttttttctttttttggcaacctggctctggcccaggctagagtgcagtggtgcgattatagcccggtgcagcctctaactcctgggctcaagcaatccaagtgatcctcccacctcaaccttcggagtagctgggatcacagctgcaggccacgcccagcttcctccccccgactccccccccagagacacggtcccaccatgttacccagcctggtctcaaactccccagctaaagcagtcctccagcctcggcctcccaaagtactgggattacaggcgtgagcccccacgctggcctgctttacgtattttcttttgtgcccctgctcacagtgttttagagatggctttcccagtgtgtgttcattgtaaacacttttgggaaagggctaaacatgtgaggcctggagatagttgctaagttgctaggaacatgtggtgggactttcatattctgaaaaatgttctatattctcatttttctaaaagaaagaaaaaaggaaacccgatttatttctcctgaatctttttaagtttgtgtcgttccttaagcagaactaagctcagtatgtgaccttacccgctaggtggttaatttatccatgctggcagaggcactcaggtacttggtaagcaaatttctaaaactccaagttgctgcagcttggcattcttcttattctagaggtctctctggaaaagatggagaaaatgaacaggacatggggctcctggaaagaaagggcccgggaagttcaaggaagaataaagttgaaattttaatttgcattttttttgtctagataagaatagcgtgaatagatcctcttttattcgtaaataatcgtgcatctgtgggttagccttgtagaagtggaaaacattccattttccaatgcatttaaatgtaaagccaaatctgcatgttgtgaatttaagaaaacttattatcctaaaggtgcctttctcttggcatcatcccgcttgtgagaagcctagaggacgctccaggtggaaggaaatcccctgggtggttttatcttttgttacccagtgagcactggttccccgcaaatactggggaaaagcaaaaatacacaagcaagttaaaattaattttgcacatctgggaggttataaaagaaagcactaatagtagtcactgcccagactttactggccacaaatgcccagctgaagagcatgactgtggatcactggtttttccctcctgctggaaatgctggggtggtagcggtcgattaggattttcagtggagaagcacaggacagttctgtaatttatgggactccttagccaacataaagaactgcaggaaataactgcacagccaggaggatccgttggtgggaatttaccgtcattcctgcccttttatttaacatcatccacagagagatgttatacaaatggaggaaaccattataccttttgatatggaatatattacagagttacagttcacaaagtagaatgctgagctgaaaacccgagtttctgctgtgactgtcatctcactgagcacttcgcttttctttgcttttattttttccttctataaaaaggcaataatgataatttataatagtttccctacccagagatattagaagtatgctacagtgaatgttaaagtaccttgagatccttaaatcaaaggtgctatatacataagtaagactctactttcagaaaaaggtaatattatttcctgcactgatccctactaattctatattgatccaaaggcaactcaatgctaaaaaatgtatagaaaatataagtctgtgtctgtgtactgtagagatgtatgtgacaagtgtaaacaaaatgaactgaagcagtaatgaacagttattagggggaacatgataaagagattatattaagcttatgtttcaccataaaatcctttttatggcttactaaaaccgagctcactgtaaaatcatgatccaacttattgctaatctttatgatatgcttattcctaatctttatggtatggtgtcaaccgttcatttgtatcttattgctcattccctggaccacagactagggacagaaaatacttgctttaataatatatatgctgttgatttcacaaaaatttattaaaatacagcctgggtacccagtgaaagagctg

SEQ ID NO: 95736 - DNA, 1919 bp, Artificial Sequence
  derived and/or modified sequence
ccggctcgaatgcccggcagccgtggcggctagagcgttcctccccagctcgaatgcccggcggccgaggcggctagagcgtcgcctcctcccggggaaccgcgtgtgaccttccagcccgcggaccgatgctgccggcggccgctcgccccctgtgggggccttgccttgggcttcgggccgctgcgttccgccttgccaggcgacaggtgccatgtgtctgtgccgtgcgacatatgaggagcagcggccatcagaggtgtgaggccctcgctggtgcacccctggataacgcccccaaggagtacccccccaagatacagcagctggtccaggacatcgccagcctcactctcttggaaatctcagacctcaacgagctcctgaagaaaacgttgaagatccaggatgtcgggcttgtgccgatgggtggtgtgatgtctggggctgtccctgctgcagcagcccaggaggcggtggaagaagatatccccatagcgaaagaacggacacatttcaccgtccgcctgaccgaggcgaagcccgtggacaaagtgaagctgatcaaggaaatcaagaactacatccaaggcatcaacctcgtccaggcaaagaagctggtggagtccctgccccaggaaatcaaagccaatgtcgccaaagctgaggcggagaagatcaaggcggccctggaggcgacgcagcaggaggtgaagctgcgcatgacgggcatggcgctgcgggtggtgcgtaccgacggcatcctggcactctacagcggcctgagcgcctcgctgtgcagacagatgacctactccctgactcggttcgccatctacgagactgtgcgggaccgtgtggccaagggcagccaggggcctctccccttccacgagaaggtgttgctgggctccgtcagcggtttagctggaggcttcgtggggacgcccgcagacttggtcaacgtcaggatgcagaacgacgtgaagctgccccagggtcagcggcgcaactacgcccatgcgctggatggcctgtaccgcgtagctcgtgaagagggtctcaggagactgttctcgggtgcaaccatggcatccagccgaggggccttagtcactgtgggccagctgtcctgctacgaccaggccaagcagctggtccttagcaccgggtacctctctgacaacatcttcactcactttgtcgccagctttattgcaggtggatgtgccacgttcctgtgccagcccctggatgtgctgaagactcgcctgatgaactccaagggggagtatcagggcgttttccactgcgccgtggagacagcgaagctcgggcctctggccttttacaagggcctcgtcccagctggcatccgcctcatcccccacaccgtgctcacttttgtgtttctggaacagctacgcaaaaactttggcatcaaagtgccatcctgaccagccgtgggaatggctgggctgccaggccagacacgctaggttcttccaaagagtcccaagcccagcacctgctcctggggccacgacctccctggccgtggccacccgtcctccgcagcaggcccctgctgtccccccacctgctggctgagctcctcctggcctcgtcccctctcagctgtagctgcaccacccccgctctggctaccaggctctcccggctgggcactgcgtggccttgcccctctcccgctggcagctcctcaggggaacaggggctaccagaggctgatttctcccctctcctgggccaggggaggggtattatccctgcctcctgcccccgatgcccaaagcagcatcttccagcactttccatcgaggacttgggtggcagagtgtgggtgcagcctggctgttgctcacccaagtgctagctctgcacttcgtgtctgctga

SEQ ID NO: 95737 - protein, 750 aa, Artificial Sequence
  derived and/or modified sequence
DYAHTLTCVTEREKFIVPIKARGARAILDFPDKLNFSTCPVKYSTQKILLVRNIGNKNAVFHIKTCRPFSIEPAIGTLNVGESMQLEVEFEPQSVGDHSGRLIVCYDTGEKVFVSLYGAAIDMNIRLDKNSLTIEKTYISLANQRTITIHNRSNIIAHFLWKVFATQQEEDREKYRACDDLIKEEKDETDEFFEECITDPLLREHLSVLSRTFANQRRLVQGDSKLFFNNVFTVEPLEGDVWPNSSAEITVYFNPLEAKLYQQTIYCDILGREIRLPLRIKGEGMGPKIHFNFELLDIGKVFTGSAHCYEAILYNKDSIDALFNMTPPTSALGACFVFSPKEGIIEPSGVQAIQISFSSTILGNFEEEFLVNVNGSPEPVKLTIRGCVIGPTFHFNVPALHFGDVSFGFPHTLICSLNNTSLIPMTYKLRIPGDGLGHKSISYCEQHVDYKRPSWTKEEISSMKPKEFTISPDCGTIRPQGFAAIRVTLCSNTVQKYELALVVDVEGIGEEVLALLIAARCVVPALHLVNTEVDFGHCFLKYPYEKTLQLADQDDLPGFYEVQPQVCEEVPTVLFSSPTPSGVISPSSTIHIPLVLETQVTGEHRSTVYISIFGSQDPPLVCHLKSAGEGPVIYVHPNQVDFGNIYVLKDSSRILNLCNQSFIPAFFQAHMAHKKSLWTIEPNEGMVPPETDVQLALTANLNDTLTFKDCVILDIENSSTYRIPVQASGTGSTIVSDKPFAPELNLGAHF

SEQ ID NO: 95738 - protein, 5121 aa, Artificial Sequence
  derived and/or modified sequence
MTSRRLEESMGAVQMGLVNMFKGFQSKVLPPLSPKVVTEEEVNRMLTPSEFLKEMSLTTEQRLAKTRLMCRPQIIELLDMGETTHQKFSGIDLDQALFQPFPSEIIFQNYTPCEVYEVPLILRNNDKIPRLVKVVEESSPYFKVISPKDIGHKVAPGVPSIFRILFTPEENKDYAHTLTCVTEREKFIVPIKARGARAILDFPDKLNFSTCPVKYSTQKILLVRNIGNKNAVFHIKTCRPFSIEPAIGTLNVGESMQLEVEFEPQSVGDHSGRLIVCYDTGEKVFVSLYGAAIDMNIRLDKNSLTIEKTYISLANQRTITIHNRSNIIAHFLWKVFATQQEEDREKYRACDDLIKEEKDETDEFFEECITDPLLREHLSVLSRTFANQRRLVQGDSKLFFNNVFTVEPLEGDVWPNSSAEITVYFNPLEAKLYQQTIYCDILGREIRLPLRIKGEGMGPKIHFNFELLDIGKVFTGSAHCYEAILYNKGSIDALFNMTPPTSALGACFVFSPKEGIIEPSGVQAIQISFSSTILGNFEEEFLVNVNGSPEPVKLTIRGCVIGPTFHFNVPALHFGDVSFGFPHTLICSLNNTSLIPMTYKLRIPGDGLGHKSISYCEQHVDYKRPSWTKEEISSMKPKEFTISPDCGTIRPQGFAAIRVTLCSNTVQKYELALVVDVEGIGEEVLALLITARCVVPALHLVNTEVDFGHCFLKYPYEKTLQLANQDDLPGFYEVQPQVCEEVPTVLFSSPTPSGVISPSSTIHIPLVLETQVTGEHRSTVYISIFGSQDPPLVCHLKSAGEGPVIYVHPNQVDFGNIYVLKDSSRILNLCNQSFIPAFFQAHMAHKKSLWTIEPNEGMVPPETDVQLALTANLNDTLTFKDCVILDIENSSTYRIPVQASGTGSTIVSDKPFAPELNLGAHFSLDTHYYHFKLINKGRRIQQLFWMNDSFRPQAKLSKKGRVKKGHAHVQPQPSGSQEPRDPQSPVFHLHPASMELYPGQAIDVILEGYSATPRIVKEKLVCHAIIGAQKGKSLVMAVNITCEFVAPLIQLSTKQLIYRLEKKPNSILKPDYQPLAIKNISTLPVNLLLSTSGPFFICETDKSLLPATPEPIKLEIDEEKNLLIKFDPSYRNDLNNWVAEEILAIKYVEHPQIDSLDLRGEVHYPNLSFETKELDFGCILNDTELIRYVTITNCSPLVVKFRWFFLVNDEENQIRFVTLPKKPYSAPVSQMESIPATSEAASPPAILVTVESPEMDLNDFVKTVLVDEDARPEEKELRKTKASSVISDEIKISSTEIERIYSSQSQVEDQESLQTCEQNEMLSIGIEEVFDILPLFGVLQPHSSHQISFTFYGHANIIAQAKALCEVEEGPTYEITLKGEASLVNYSFDTKDIHYGLQLFDHVTEREITLTNMGKVGFEFKVLTDHQSSPDNLLPGVPLILPVSGFISSHQEQVLKVYYLPGVPEVFKRSFQIQIAHLDPENITLSGEGIFPQICLDLPRNLTANEKYEMFLNQARKNTDKEYNKCEMLDHFDIITEEVPEDEPAEVSAHLQMEVERLIVQSYVLEHQKTTTPDPMDDPCFSHRSRRKLAKIQLPEYILDFGYIILGEVRTHIIKIINTSHFPVSFHADKRVLHETGFSTELDRVKNLPHCETEIFEVRFDPQGANLPVGSKEVILPIKVVGGPTVHICLQAKVTIPTMTLSRGKVDFATIQCGQCLVETIQLSNHLQVPCEWFVQSQKPVDKLEKHMPKYLRQKLRAELKPKTRIFEIQPISGVLDPGEKSNVQVKFMPKEEKFYSQTLVFQIAQSAQKLTLLARGQGLEPRLEFSPSVLDLGPLLLCAPGDEAEVIVKNPCNFPIEFYSLEFDQQYLIEEKILRKLKGYDSYNTLLLPPRNPGEKLPPELYEYFKEIKKSKEEQMRAKYLENLAQENEEEDITSSDQGTSNSTKRTSLSRGISVTSNLEEWHALLVESKTYLEEEEDEESLEKIIFQTDKLQSIDSHSMEEVGEVENNPVSKAIARHLGIDISAEGRLAKNRKGIAIIIHGTPLSGKSANAVSVAKYYNAACLSIDSIVLEAVANSNNIPGIRARELCIRAAIEQSVKEGEEAAQEAAVGQNVIGQGRLSTDTLGKLASEMTLVAPEIKPGKSVRGSVVITKSKADSHGSGSQKQHHSHQSETPQISSSPLPPGPIHRWLSVSPSVGGETGLMSCVLPDELLVQILAERIQLSDCYRGVVFDGLDTLFAQNAAAALLCLLKAIGSREHIYILNMAQDYAAMKAQEKAKKEQEERKHKGALEKEKERLQNMDEEEYDALTEEEKLTFDRGIQQALRERKKREQERLAKEMQEKKLQQELERQKEEDELKRRVKKGKQGPIKEEPPMKKSQAANKQVPPLTKVDVKMETIERKISVREQTMSEKEELNKKKRNMGDVSMHGLPLVQDQEDSEGDNSKDPDKQLAPKFKTYELTLKDVQNILMYWDRKQGVQLPPAGMEEAPHEPDDQRQVPLGGRRGRKDRERERLEKERTEKERLEREKAERERLEKLRALEERSDWEGEGEEDHEGKKEKDLGVPFLDIQTPDFEGLSWKQALESDKLPKGEQILDILGLGASGPPIPPPALFSIVSYPVKRPPLTMTDDLEHFVFVIPPSEDISLDEKKEMEIESDFLATTNTTKAQEEQTSSSKGGKQKMKEKIDQVFEIQKDKRHMALNRKVLSGEPAGTISQLSDTDLDNFNGQHSQEKFTRLNHFRWIVPANGEVTLQVHFSSDEFGNFDQTFNFEILGTCCQYQLYCRGICTYPYICQDPKVVFPQRKMDMKTNEVIFKKYVMSTETYYFGPLLCGKSRDKYKSSLFPGNMETLTILNTSLMVVEASFYFQNDVKANTYFLEPNTMVLKPNEKQILNVWAYPTSVGVFEDSIVCCINDNPEPAIFQLSCQGIRPELELEPRQLHFDRLLLHRQESRVVLLRNVTLLPVAWRITSLEHLGDDFTVSLMQGTIPPEAEYGLHLYFQPTKPVNIKKAIRLEVLDAENLLGVVQIENIMVFAEAYDIALDITFPKGAEGGLDFGIVRVTEEAKQPLQLKNRGKYEIAFSFSVDSVGISTPNINSMISVQPKKGSLTPTEKPTNVQVFFHAKKEVKIEHQPVLRCQIIEPNISEGGEIIASIPIKFSANAVYSKYNITPSSVINFGALICGTRKSTTFTIENQGVTDFKFALYKLTGESPIHQKKAASHVRHARSRESESFYKTGSSRAAKFSDTIQKEVTTTGQARFAHGMFTVYPGFGSIPSGGQQVINVDCVADAMGKCEEFIAIDISGRDPAVHPAGILYTLLAEACLPAFVTENNALIFEEHQICTSANLHHILQTIESGGLFVEDENKFIFCNVLVGRQAKARFKISNVGKITCDVNIVVRPISNKPFARIVDIFEVEPSKMCIASHSHAFATVSFTPQIMQNYQCIFEATLDGLPSTLAKSRGLVFDIAGEGNLPRVTVVRPVLHNQYGNPLLLFKRLLLGHSEKLPLILKNNGVLPAQLHVDLQDELGVFSLKGRPTTAYIYITEENKPHVKAKKAHTASLVVSPGDTAEFDVVFHSQKVGRMRGIIHLSVINNQYEETSIHMVGEGYEDDITLDNIHGLVAPTSQEDISISEFTEIIEDNDMEDLVAAALVDHIQFGDCHIGHSYNASFTVTNHSQVNLIRFEWPVSATIAFSPQMGHLHPGCAKDIVVTMKSDVPINLKNMRIRCKLSRIMFQLPADQVPDWDDRMHTVKWVDVPRNMPGTFTTKRKVIETDPEPAHSVLEENYQELQLQISANVDFASYHCQARDVRFKETLVYQTRVFEFDVINSGRVQLEFSWVSEDTSKAVSFAKPDHQGSAQKDQLSQGTMHTGSTLDSTMDHWAEGSPQPFSVEPSSGIVPVGKIQKFKVKFSPLDIGDFESNLFCQIPNLPPGEQGPVLVAKGRSTLPICHFDLKDSDYISGHQRNPELRGSSGGALDPNTRVIEFTTVGIGGKNLRTFTILNPTNSTYSFCWISEEIESLQNPAAFTCLTEKGFIHPEKKAEIVFQFTPFHLGITESSWTFLIPEHNITVPFLLVGKTTEPLISLNKSHLNFSSLLIGREARETVQIINKEEQGFDFSFQDNSRYSEGFSNSLLVCPMEGWIPPLSRFPIDIFFTPKQEGDVNFNLICNVEKKVHPVTLNVKAEGYTMNVEIKCKDRTGSITLLTPNQTNIINFYEVELNECVQCEFNFINTGKFTFSFQAQLCGSKTLLQYLEFSPIDSTVDVGQSVHATLSFQPLKKCVLTDLELIIKISHGPTFMCNISGCAVSPAIHFSFTSYNFGTCFIYQAGMPPYKQTLVITNKEETPMSIDCLYTNTTHLEVNSRVDVVKPGNTLEIPITFYPRESINYQELIPFEINGLSQQTVEIKGKGTKMKILVLDPANRIVKLGAVLPGQVVKRTVSIMNNSLAQLTFNQSILFTIPELQEPKVLTLAPFHNITLKPKEVCKLEVIFAPKKRVPPFSEEVFMECMGLLRPLFLLSGCCQALEISLDQEHIPFGPVVYQTQATRRILMMNTGDVGARFKWDIKKFEPHFSISPEEGYITSGMEVSFEVTYHPTEVGKESLCKNILCYIQGGSPLSLTLSGVCVGPPAVKEVVNFTCQVRSKHTQTILLSNRTNQTWNLHPIFEGEHWEGPEFITLEAHQQNKPYEITYRPRTMNLENRKHQGTLFFPLPDGTGWLYALHGTSELPKAVANIYREVPCKTPYTELLPITNWLNKPQRFRVIVEILKPEKPDLSITMKGLDYIDVLSGSKKDYKLNFFSHKEGTYAAKVIFRNEVTNEFLYYNVSFRVIPSGIIKTIEMVTPVRQVASASIKLENPLPYSVTFSTECRMPDIALPSQFVVPANSEGTFSFEFQPLKAGETFGRLTLHNTDLGYYQYELYLKATPALPEKPVHFQTVLGSSQIILVKFINYTRQRTEYYCRTDCTDFHAEKLINAAPGGQGGTEASVEVLFEPSHLGETKGILILSSLAGGEYIIPLFGMALPPKPQGPFSIRAGYSIIIPFKNVFYHMVTFSIIVDNPAFTIRAGESVRPKKINNITVSFEGNPSGSKTPITTKLTVSCPPGEGSETGVKWVYYLKGITL

SEQ ID NO: 95739 - protein, 5120 aa, Artificial Sequence
  derived and/or modified sequence
MTSRRLEESMGAVQMGLVNMFKGFQSKVLPPLSPKVVTEEEVNRMLTPSEFLKEMSLTTEQRLAKTRLMCRPQIIELLDMGETTHQKFSGIDLDQALFQPFPSEIIFQNYTPCEVYEVPLILRNNDKIPRLVKVVEESSPYFKVISPKDIGHKVAPGVPSIFRILFTPEENKDYAHTLTCVTEREKFIVPIKARGARAILDFPDKLNFSTCPVKYSTQKILLVRNIGNKNAVFHIKTCRPFSIEPAIGTLNVGESMQLEVEFEPQSVGDHSGRLIVCYDTGEKVFVSLYGAAIDMNIRLDKNSLTIEKTYISLANQRTITIHNRSNIIAHFLWKVFATQQEEDREKYRACDDLIKEEKDETDEFFEECITDPLLREHLSVLSRTFANQRRLVQGDSKLFFNNVFTVEPLEGDVWPNSSAEITVYFNPLEAKLYQQTIYCDILGREIRLPLRIKGEGMGPKIHFNFELLDIGKVFTGSAHCYEAILYNKGSIDALFNMTPPTSALGACFVFSPKEGIIEPSGVQAIQISFSSTILGNFEEEFLVNVNGSPEPVKLTIRGCVIGPTFHFNVPALHFGDVSFGFPHTLICSLNNTSLIPMTYKLRIPGDGLGHKSISYCEQHVDYKRPSWTKEEISSMKPKEFTISPDCGTIRPQGFAAIRVTLCSNTVQKYELALVVDVEGIGEEVLALLITARCVVPALHLVNTEVDFGHCFLKYPYEKTLQLANQDDLPGFYEVQPQVCEEVPTVLFSSPTPSGVISPSSTIHIPLVLETQVTGEHRSTVYISIFGSQDPPLVCHLKSAGEGPVIYVHPNQVDFGNIYVLKDSSRILNLCNQSFIPAFFQAHMAHKKSLWTIEPNEGMVPPETDVQLALTANLNDTLTFKDCVILDIENSSTYRIPVQASGTGSTIVSDKPFAPELNLGAHFSLDTHYYHFKLINKGRRIQQLFWMNDSFRPQAKLSKKGRVKKGHAHVQPQPSGSQEPRDPQSPVFHLHPASMELYPGQAIDVILEGYSATPRIVKEKLVCHAIIGAQKGKSLVMAVNITCEFVAPLIQLSTKQLIYRLEKKPNSILKPDYQPLAIKNISTLPVNLLLSTSGPFFICETDKSLLPATPEPIKLEIDEEKNLLIKFDPSYRNDLNNWVAEEILAIKYVEHPQIDSLDLRGEVHYPNLSFETKELDFGCILNDTELIRYVTITNCSPLVVKFRWFFLVNDEENQIRFVTLPKKPYSAPVSQMESIPATSEAASPPAILVTVESPEMDLNDFVKTVLVDEDARPEEKELRKTKASSVISDVRCPFHGEERIYSSQSQVEDQESLQTCEQNEMLSIGIEEVFDILPLFGVLQPHSSHQISFTFYGHANIIAQAKALCEVEEGPTYEITLKGEASLVNYSFDTKDIHYGLQLFDHVTEREITLTNMGKVGFEFKVLTDHQSSPDNLLPGVPLILPVSGFISSHQEQVLKVYYLPGVPEVFKRSFQIQIAHLDPENITLSGEGIFPQICLDLPRNLTANEKYEMFLNQARKNTDKEYNKCEMLDHFDIITEEVPEDEPAEVSAHLQMEVERLIVQSYVLEHQKTTTPDPMDDPCFSHRSRRKLAKIQLPEYILDFGYIILGEVRTHIIKIINTSHFPVSFHADKRVLHETGFSTELDRVKNLPHCETEIFEVRFDPQGANLPVGSKEVILPIKVVGGPTVHICLQAKVTIPTMTLSRGKVDFATIQCGQCLVETIQLSNHLQVPCEWFVQSQKPVDKLEKHMPKYLRQKLRAELKPKTRIFEIQPISGVLDPGEKSNVQVKFMPKEEKFYSQTLVFQIAQSAQKLTLLARGQGLEPRLEFSPSVLDLGPLLLCAPGDEAEVIVKNPCNFPIEFYSLEFDQQYLIEEKILRKLKGYDSYNTLLLPPRNPGEKLPPELYEYFKEIKKSKEEQMRAKYLENLAQENEEEDITSSDQGTSNSTKRTSLSRGISVTSNLEEWHALLVESKTYLEEEEDEESLEKIIFQTDKLQSIDSHSMEEVGEVENNPVSKAIARHLGIDISAEGRLAKNRKGIAIIIHGTPLSGKSANAVSVAKYYNAACLSIDSIVLEAVANSNNIPGIRARELCIRAAIEQSVKEGEEAAQEAAVGQNVIGQGRLSTDTLGKLASEMTLVAPEIKPGKSVRGSVVITKSKADSHGSGSQKQHHSHQSETPQISSSPLPPGPIHRWLSVSPSVGGETGLMSCVLPDELLVQILAERIQLSDCYRGVVFDGLDTLFAQNAAAALLCLLKAIGSREHIYILNMAQDYAAMKAQEKAKKEQEERKHKGALEKEKERLQNMDEEEYDALTEEEKLTFDRGIQQALRERKKREQERLAKEMQEKKLQQELERQKEEDELKRRVKKGKQGPIKEEPPMKKSQAANKQVPPLTKVDVKMETIERKISVREQTMSEKEELNKKKRNMGDVSMHGLPLVQDQEDSEGDNSKDPDKQLAPKFKTYELTLKDVQNILMYWDRKQGVQLPPAGMEEAPHEPDDQRQVPLGGRRGRKDRERERLEKERTEKERLEREKAERERLEKLRALEERSDWEGEGEEDHEGKKEKDLGVPFLDIQTPDFEGLSWKQALESDKLPKGEQILDILGLGASGPPIPPPALFSIVSYPVKRPPLTMTDDLEHFVFVIPPSEDISLDEKKEMEIESDFLATTNTTKAQEEQTSSSKGGKQKMKEKIDQVFEIQKDKRHMALNRKVLSGEPAGTISQLSDTDLDNFNGQHSQEKFTRLNHFRWIVPANGEVTLQVHFSSDEFGNFDQTFNFEILGTCCQYQLYCRGICTYPYICQDPKVVFPQRKMDMKTNEVIFKKYVMSTETYYFGPLLCGKSRDKYKSSLFPGNMETLTILNTSLMVVEASFYFQNDVKANTYFLEPNTMVLKPNEKQILNVWAYPTSVGVFEDSIVCCINDNPEPAIFQLSCQGIRPELELEPRQLHFDRLLLHRQESRVVLLRNVTLLPVAWRITSLEHLGDDFTVSLMQGTIPPEAEYGLHLYFQPTKPVNIKKAIRLEVLDAENLLGVVQIENIMVFAEAYDIALDITFPKGAEGGLDFGIVRVTEEAKQPLQLKNRGKYEIAFSFSVDSVGISTPNINSMISVQPKKGSLTPTEKPTNVQVFFHAKKEVKIEHQPVLRCQIIEPNISEGGEIIASIPIKFSANAVYSKYNITPSSVINFGALICGTRKSTTFTIENQGVTDFKFALYKLTGESPIHQKKAASHVRHARSRESESFYKTGSSRAAKFSDTIQKEVTTTGQARFAHGMFTVYPGFGSIPSGGQQVINVDCVADAMGKCEEFIAIDISGRDPAVHPAGILYTLLAEACLPAFVTENNALIFEEHQICTSANLHHILQTIESGGLFVEDENKFIFCNVLVGRQAKARFKISNVGKITCDVNIVVRPISNKPFARIVDIFEVEPSKMCIASHSHAFATVSFTPQIMQNYQCIFEATLDGLPSTLAKSRGLVFDIAGEGNLPRVTVVRPVLHNQYGNPLLLFKRLLLGHSEKLPLILKNNGVLPAQLHVDLQDELGVFSLKGRPTTAYIYITEENKPHVKAKKAHTASLVVSPGDTAEFDVVFHSQKVGRMRGIIHLSVINNQYEETSIHMVGEGYEDDITLDNIHGLVAPTSQEDISISEFTEIIEDNDMEDLVAAALVDHIQFGDCHIGHSYNASFTVTNHSQVNLIRFEWPVSATIAFSPQMGHLHPGCAKDIVVTMKSDVPINLKNMRIRCKLSRIMFQLPADQVPDWDDRMHTVKWVDVPRNMPGTFTTKRKVIETDPEPAHSVLEENYQELQLQISANVDFASYHCQARDVRFKETLVYQTRVFEFDVINSGRVQLEFSWVSEDTSKAVSFAKPDHQGSAQKDQLSQGTMHTGSTLDSTMDHWAEGSPQPFSVEPSSGIVPVGKIQKFKVKFSPLDIGDFESNLFCQIPNLPPGEQGPVLVAKGRSTLPICHFDLKDSDYISGHQRNPELRGSSGGALDPNTRVIEFTTVGIGGKNLRTFTILNPTNSTYSFCWISEEIESLQNPAAFTCLTEKGFIHPEKKAEIVFQFTPFHLGITESSWTFLIPEHNITVPFLLVGKTTEPLISLNKSHLNFSSLLIGREARETVQIINKEEQGFDFSFQDNSRYSEGFSNSLLVCPMEGWIPPLSRFPIDIFFTPKQEGDVNFNLICNVEKKVHPVTLNVKAEGYTMNVEIKCKDRTGSITLLTPNQTNIINFYEVELNECVQCEFNFINTGKFTFSFQAQLCGSKTLLQYLEFSPIDSTVDVGQSVHATLSFQPLKKCVLTDLELIIKISHGPTFMCNISGCAVSPAIHFSFTSYNFGTCFIYQAGMPPYKQTLVITNKEETPMSIDCLYTNTTHLEVNSRVDVVKPGNTLEIPITFYPRESINYQELIPFEINGLSQQTVEIKGKGTKMKILVLDPANRIVKLGAVLPGQVVKRTVSIMNNSLAQLTFNQSILFTIPELQEPKVLTLAPFHNITLKPKEVCKLEVIFAPKKRVPPFSEEVFMECMGLLRPLFLLSGCCQALEISLDQEHIPFGPVVYQTQATRRILMMNTGDVGARFKWDIKKFEPHFSISPEEGYITSGMEVSFEVTYHPTEVGKESLCKNILCYIQGGSPLSLTLSGVCVGPPAVKEVVNFTCQVRSKHTQTILLSNRTNQTWNLHPIFEGEHWEGPEFITLEAHQQNKPYEITYRPRTMNLENRKHQGTLFFPLPDGTGWLYALHGTSELPKAVANIYREVPCKTPYTELLPITNWLNKPQRFRVIVEILKPEKPDLSITMKGLDYIDVLSGSKKDYKLNFFSHKEGTYAAKVIFRNEVTNEFLYYNVSFRVIPSGIIKTIEMVTPVRQVASASIKLENPLPYSVTFSTECRMPDIALPSQFVVPANSEGTFSFEFQPLKAGETFGRLTLHNTDLGYYQYELYLKATPALPEKPVHFQTVLGSSQIILVKFINYTRQRTEYYCRTDCTDFHAEKLINAAPGGQGGTEASVEVLFEPSHLGETKGILILSSLAGGEYIIPLFGMALPPKPQGPFSIRAGYSIIIPFKNVFYHMVTFSIIVDNPAFTIRAGESVRPKKINNITVSFEGNPSGSKTPITTKLTVSCPPGEGSETGVKWVYYLKGITL

SEQ ID NO: 95740 - protein, 740 aa, Artificial Sequence
  derived and/or modified sequence
MTSRRLEESMGAVQMGLVNMFKGFQSKVLPPLSPKVVTEEEVNRMLTPSEFLKEMSLTTEQRLAKTRLMCRPQIIELLDMGETTHQKFSGIDLDQALFQPFPSEIIFQNYTPCEVYEVPLILRNNDKIPRLVKVVEESSPYFKVISPKDIGHKVAPGVPSIFRILFTPEENKDYAHTLTCVTEREKFIVPIKARGARAILDFPDKLNFSTCPVKYSTQKILLVRNIGNKNAVFHIKTCRPFSIEPAIGTLNVGESMQLEVEFEPQSVGDHSGRLIVCYDTGEKVFVSLYGAAIDMNIRLDKNSLTIEKTYISLANQRTITIHNRSNIIAHFLWKVFATQQEEDREKYRACDDLIKEEKDETDEFFEECITDPLLREHLSVLSRTFANQRRLVQGDSKLFFNNVFTVEPLEGDVWPNSSAEITVYFNPLEAKLYQQTIYCDILGREIRLPLRIKGEGMGPKIHFNFELLDIGKVFTGSAHCYEAILYNKGSIDALFNMTPPTSALGACFVFSPKEGIIEPSGVQAIQISFSSTILGNFEEEFLVNVNGSPEPVKLTIRGCVIGPTFHFNVPALHFGDVSFATQELRDPQVLIPFQRFPHTLICSLNNTSLIPMTYKLRIPGDGLGHKSISYCEQHVDYKRPSWTKEEISSMKPKEFTISPDCGTIRPQGFAAIRVTLCSNTVQKYELALVVDVEGIGEEVLALLITASAPELCNRKVMLSVLQWKIHRAKRSLPRDTVAVT

SEQ ID NO: 95741 - protein, 1214 aa, Artificial Sequence
  derived and/or modified sequence
MTSRRLEESMGAVQMGLVNMFKGFQSKVLPPLSPKVVTEEEVNRMLTPSEFLKEMSLTTEQRLAKTRLMCRPQIIELLDMGETTHQKFSGIDLDQALFQPFPSEIIFQNYTPCEVYEVPLILRNNDKIPRLVKVVEESSPYFKVISPKDIGHKVAPGVPSIFRILFTPEENKDYAHTLTCVTEREKFIVPIKARGARAILDFPDKLNFSTCPVKYSTQKILLVRNIGNKNAVFHIKTCRPFSIEPAIGTLNVGESMQLEVEFEPQSVGDHSGRLIVCYDTGEKVFVSLYGAAIDMNIRLDKNSLTIEKTYISLANQRTITIHNRSNIIAHFLWKVFATQQEEDREKYRACDDLIKEEKDETDEFFEECITDPLLREHLSVLSRTFANQRRLVQGDSKLFFNNVFTVEPLEGDVWPNSSAEITVYFNPLEAKLYQQTIYCDILGREIRLPLRIKGEGMGPKIHFNFELLDIGKVFTGSAHCYEAILYNKGSIDALFNMTPPTSALGACFVFSPKEGIIEPSGVQAIQISFSSTILGNFEEEFLVNVNGSPEPVKLTIRGCVIGPTFHFNVPALHFGDVSFGFPHTLICSLNNTSLIPMTYKLRIPGDGLGHKSISYCEQHVDYKRPSWTKEEISSMKPKEFTISPDCGTIRPQGFAAIRVTLCSNTVQKYELALVVDVEGIGEEVLALLITARCVVPALHLVNTEVDFGHCFLKYPYEKTLQLANQDDLPGFYEVQPQVCEEVPTVLFSSPTPSGVISPSSTIHIPLVLETQVTGEHRSTVYISIFGSQDPPLVCHLKSAGEGPVIYVHPNQVDFGNIYVLKDSSRILNLCNQSFIPAFFQAHMAHKKSLWTIEPNEGMVPPETDVQLALTANLNDTLTFKDCVILDIENSSTYRIPVQASGTGSTIVSDKPFAPELNLGAHFSLDTHYYHFKLINKGRRIQQLFWMNDSFRPQAKLSKKGRVKKGHAHVQPQPSGSQEPRDPQSPVFHLHPASMELYPGQAIDVILEGYSATPRKPNSILKPDYQPLAIKNISTLPVNLLLSTSGPFFICETDKSLLPATPEPIKLEIDEEKNLLIKFDPSYRNDLNNWVAEEILAIKYVEHPQIDSLDLRGEVHYPNLSFETKELDFGCILNDTELIRYVTITNCSPLVVKFRWFFLVNDEENQIRFVTLPKKPYSAPVSQMESIPATSEAASPPAILVTVESPEMDLNDFVK

SEQ ID NO: 95742 - DNA, 2253 bp, Artificial Sequence
  derived and/or modified sequence
gactacgcccacaccctgacctgcgtgaccgagagagagaagttcatcgtgcccatcaaggccagaggcgccagagccatcctggacttccccgacaagctgaacttcagcacctgccccgtgaagtacagcacccagaagatcctgctggtgagaaacatcggcaacaagaacgccgtgttccacatcaagacctgcagacccttcagcatcgagcccgccatcggcaccctgaacgtgggcgagagcatgcagctggaggtggagttcgagccccagagcgtgggcgaccacagcggcagactgatcgtgtgctacgacaccggcgagaaggtgttcgtgagcctgtacggcgccgccatcgacatgaacatcagactggacaagaacagcctgaccatcgagaagacctacatcagcctggccaaccagagaaccatcaccatccacaacagaagcaacatcatcgcccacttcctgtggaaggtgttcgccacccagcaggaggaggacagagagaagtacagagcctgcgacgacctgatcaaggaggagaaggacgagaccgacgagttcttcgaggagtgcatcaccgaccccctgctgagagagcacctgagcgtgctgagcagaaccttcgccaaccagagaagactggtgcagggcgacagcaagctgttcttcaacaacgtgttcaccgtggagcccctggagggcgacgtgtggcccaacagcagcgccgagatcaccgtgtacttcaaccccctggaggccaagctgtaccagcagaccatctactgcgacatcctgggcagagagatcagactgcccctgagaatcaagggcgagggcatgggccccaagatccacttcaacttcgagctgctggacatcggcaaggtgttcaccggcagcgcccactgctacgaggccatcctgtacaacaaggacagcatcgacgccctgttcaacatgaccccccccaccagcgccctgggcgcctgcttcgtgttcagccccaaggagggcatcatcgagcccagcggcgtgcaggccatccagatcagcttcagcagcaccatcctgggcaacttcgaggaggagttcctggtgaacgtgaacggcagccccgagcccgtgaagctgaccatcagaggctgcgtgatcggccccaccttccacttcaacgtgcccgccctgcacttcggcgacgtgagcttcggcttcccccacaccctgatctgcagcctgaacaacaccagcctgatccccatgacctacaagctgagaatccccggcgacggcctgggccacaagagcatcagctactgcgagcagcacgtggactacaagagacccagctggaccaaggaggagatcagcagcatgaagcccaaggagttcaccatcagccccgactgcggcaccatcagaccccagggcttcgccgccatcagagtgaccctgtgcagcaacaccgtgcagaagtacgagctggccctggtggtggacgtggagggcatcggcgaggaggtgctggccctgctgatcgccgccagatgcgtggtgcccgccctgcacctggtgaacaccgaggtggacttcggccactgcttcctgaagtacccctacgagaagaccctgcagctggccgaccaggacgacctgcccggcttctacgaggtgcagccccaggtgtgcgaggaggtgcccaccgtgctgttcagcagccccacccccagcggcgtgatcagccccagcagcaccatccacatccccctggtgctggagacccaggtgaccggcgagcacagaagcaccgtgtacatcagcatcttcggcagccaggacccccccctggtgtgccacctgaagagcgccggcgagggccccgtgatctacgtgcaccccaaccaggtggacttcggcaacatctacgtgctgaaggacagcagcagaatcctgaacctgtgcaaccagagcttcatccccgccttcttccaggcccacatggcccacaagaagagcctgtggaccatcgagcccaacgagggcatggtgccccccgagaccgacgtgcagctggccctgaccgccaacctgaacgacaccctgaccttcaaggactgcgtgatcctggacatcgagaacagcagcacctacagaatccccgtgcaggccagcggcaccggcagcaccatcgtgagcgacaagcccttcgcccccgagctgaacctgggcgcccacttctag

SEQ ID NO: 95743 - DNA, 2253 bp, Artificial Sequence
  derived and/or modified sequence
gactatgcacataccctcacttgcgtaaccgaaagggagaagtttatcgttcccatcaaggcacgtggtgcccgggctatattggacttcccggacaagctgaacttttccacctgcccggtgaaatattccacccaaaagatcctgctggtgcgcaacatcggcaacaagaacgctgtcttccacatcaaaacctgtaggccattcagtatagaacccgctatcggaactctgaacgtaggggagagtatgcaacttgaggtcgaatttgaaccacagagtgtcggagatcactccgggcgcctgattgtatgctatgataccggtgagaaagtcttcgtttccttatacggggccgccatcgatatgaacattagactcgataagaatagcctgacaatagagaaaacctacattagcctagccaaccaacgcactatcacaatccacaataggagcaacattattgcacatttcctgtggaaggtgttcgcgacccagcaggaggaggatcgcgagaagtatcgggcttgtgacgatctgatcaaggaagaaaaagatgagaccgacgaattctttgaggaatgtatcactgacccattactgcgcgagcacctgtcagtgctttctcgcacttttgcaaatcaaaggcgactcgtccagggtgattcgaaactatttttcaacaacgtgtttaccgtggagcccctggagggcgatgtttggcccaatagcagcgccgagattacagtctacttcaacccgctggaggcaaagctctatcagcagacgatatactgcgatatccttggacgggagatcagactccctctcaggatcaaaggagagggaatgggaccgaagatccacttcaattttgagttactggatattggtaaggtctttacgggctctgcacattgctacgaagcaatcctgtacaacaaggattctattgacgccctattcaacatgacccccccaaccagcgccttaggggcttgtttcgttttttccccaaaagaaggaattatagagcctagcggcgttcaggcaattcagatttccttttcatcaacaatccttgggaatttcgaggaggaattcctggtgaatgtcaatggaagccccgagccagtgaagcttacaattcgcggatgcgttataggcccgactttccacttcaacgtgcctgcattgcactttggggacgtgtcattcggctttcctcacacactgatatgttcactgaacaacacatcactaattccaatgacttacaagctccgcattcccggagatggactgggacacaagagcatatcctattgtgaacagcacgtcgactataaaaggccgtcttggactaaagaagagatctcttccatgaagccaaaagagtttacgatcagcccagactgcggcaccattcgcccacaggggttcgccgctatcagggtgaccctgtgttctaacaccgtgcagaagtacgagctagctctggtggttgacgttgagggaattggcgaagaggtgttagcgctcctcattgcggctcggtgcgttgtgcccgctctccacctggtgaataccgaggttgactttggacattgttttctaaaatacccatacgaaaagaccttgcagttggccgaccaggacgacttgcccggattctatgaggttcagccccaagtctgcgaggaggtgcccacagtgttgtttagtagccctactccatctggcgtgataagtccatcttcgactatccacattccgcttgtgctggagacccaagtgaccggcgagcaccgatccaccgtatacatctctattttcggcagccaggatccaccattggtgtgccacctcaaatcagccggtgaagggcccgttatatacgttcatcccaatcaggtagatttcggcaatatttatgtgttgaaggacagctcaaggatacttaatctgtgtaaccagtcatttatccctgctttctttcaggcacacatggcccataaaaaatccctatggacaatagagccaaatgaagggatggtgccccctgaaaccgacgttcaattggccctaactgcgaacctgaatgacacgctaactttcaaagattgcgttattctggacatcgagaatagcagtacctaccggattcctgtgcaggcctccgggacaggttctacaatcgtgtctgacaagccgttcgcccctgagctgaatctaggcgcgcatttttag

SEQ ID NO: 95744 - DNA, 2253 bp, Artificial Sequence
  derived and/or modified sequence
gactatgcccacaccctgacctgtgtgacagagcgggagaagttcatcgtgcccatcaaggcccggggggcccgggccatcctggacttcccagacaagctgaacttcagcacctgccctgtgaagtacagcacccagaagatcctgctggtgaggaacatcggcaacaagaatgctgtgttccacatcaagacctgccggcccttcagcattgaaccagccatcggcaccctgaatgtgggggagagcatgcagctggaggtggagtttgagccccagagcgtgggggaccacagcggccgcctgattgtgtgctatgacaccggggagaaggtgtttgtgtccctgtatggagctgccatcgacatgaacatccggctggacaagaacagcctgaccatcgagaagacctacatcagcctggccaaccagaggaccatcaccatccacaacagaagcaacatcatcgcccacttcctgtggaaggtgtttgccacccagcaggaggaggaccgggagaagtaccgggcctgtgatgacctgatcaaggaggagaaggatgaaacagatgagttctttgaggagtgcatcacagaccccctgctgcgggagcacctgtctgtgctgagcaggacctttgccaaccagaggcggctggtgcagggcgacagcaagctgttcttcaacaacgtgttcaccgtggagcccctggagggagatgtgtggcccaacagcagcgctgagatcaccgtgtacttcaaccccctggaggccaagctgtaccagcagaccatctactgtgacatcctgggccgggagatccggctgcccctgcgcatcaagggggagggcatgggccccaagatccacttcaactttgagctgctggacatcggcaaggtgttcaccggcagcgcccactgctatgaggccatcctgtacaacaaggacagcattgatgccctcttcaacatgaccccacccaccagcgccctgggcgcctgctttgtgttcagccccaaggagggcatcatcgagcccagcggcgtgcaggccatccagatctccttcagcagcaccatcctgggcaactttgaggaggagttcctggtgaatgtgaatggcagccctgagcctgtgaagctgaccatccggggctgtgtgattggccccaccttccacttcaacgtgcctgccctgcactttggagatgtgtcctttggcttcccccacaccctcatctgcagcctgaacaacaccagcctcatccccatgacctacaagctgcgcatccctggagatggcctgggccacaagagcatctcctactgtgagcagcacgtggactacaagaggcccagctggaccaaggaggagatcagctccatgaagcccaaggagttcaccatcagcccagactgtggcaccatccggccccagggctttgctgccatccgggtgaccctgtgcagcaacacagtgcagaagtatgagctggccctggtggtggatgtggagggcatcggggaggaggtgctggccctgctgattgctgcccgctgtgtggtgcctgccctgcacctggtgaacacagaggtggactttggccactgcttcctgaagtacccctatgagaagaccctgcagctggccgaccaggatgacctgcccggcttctatgaggtgcagccccaggtgtgtgaggaggtgcccaccgtgctcttcagcagccccaccccatctggagtcatcagccccagcagcaccatccacatccccctggtgctggagacccaggtgactggagagcacaggagcacagtgtacatcagcatcttcggcagccaggacccccccctggtgtgccacctgaagtctgctggggagggccctgtgatctacgtgcaccccaaccaggtggactttggaaacatctacgtgctgaaggacagcagccgcatcctgaacctgtgcaaccagagcttcatcccagccttcttccaggcccacatggcccacaagaagagcctgtggaccatcgagcccaatgaaggcatggtgcccccagagacagatgtgcagctggccctgacagccaacctgaatgacaccctgaccttcaaggactgtgtgatcctggacatcgagaacagcagcacctaccgcatccctgtgcaggccagcggcaccggcagcaccatcgtgtctgacaagccctttgcccctgagctgaacctgggcgcccacttctag

SEQ ID NO: 95745 - DNA, 2253 bp, Artificial Sequence
  derived and/or modified sequence
gactacgcccacaccctgacctgcgtgaccgagcgggagaagttcattgtgccaatcaaggctcgcggtgcgcgggctatactggattttcccgacaagttgaatttttcaacctgccctgtcaaatatagtacgcaaaagatcctcctggtcaggaacattggcaataagaacgcagtgttccatattaaaacctgcaggcccttctcgattgagcctgccatcggaacgcttaacgtcggagagtcgatgcagctggaggtcgaattcgaacctcagtctgtcggagaccactctggccgcctgatagtgtgctacgacaccggagaaaaggtattcgtgagtctgtacggcgccgctatcgacatgaacatcaggctcgacaagaacagccttactatcgaaaagacctacatctctctagccaatcaaaggactattaccattcataaccgctcaaacatcattgcccatttcctatggaaagtcttcgcaacccagcaggaagaggatcgggaaaaatatcgggcctgcgatgatctgatcaaagaggaaaaggacgagacagatgaattttttgaagaatgtatcaccgaccctttgctgcgtgagcacctgtcagtgctgtcaagaacttttgcaaaccagaggagactggttcagggtgactccaaactgtttttcaataatgtctttacagttgaacctcttgagggtgacgtatggcctaacagttcagcagagatcacagtttactttaatccacttgaggcaaagctctatcagcagaccatttactgcgatatcctgggacgtgagatccggctacccctccgcataaagggggaagggatgggccccaaaatccacttcaacttcgagctgctggacattggcaaggtgttcaccgggtctgctcattgttacgaagccatcttgtacaacaaggattctattgatgccctgttcaacatgaccccccccacatccgctctgggcgcatgcttcgtgttctcaccgaaggagggtattattgaaccaagtggcgtacaggccatccagatcagttttagttctactattcttggcaattttgaagaggaattcctagtgaacgttaatgggagccccgaacccgtgaagctgacgatcagagggtgtgtgataggaccaacattccactttaacgtgccggctctgcacttcggcgacgtgtcgtttgggtttccacatacccttatttgttcactgaataacacttcactgatccctatgacatataaactccggattccaggcgacggactgggccataagtcgatcagctactgtgaacagcacgtagactataaacggccatcgtggactaaggaggagatctccagcatgaaacccaaggaatttactatttctccggattgcgggacaatccggccccaaggattcgctgcgattagagtcaccctgtgttcgaacacagtgcaaaaatatgaactggccctcgtcgttgacgtagagggtataggcgaagaagtactcgcccttctgatcgccgcccgctgcgtggtccctgccctgcatctggtaaacactgaagtcgacttcggccattgctttctgaagtatccttatgaaaagacactgcagctcgctgaccaagacgatttacctggattctatgaggtacagccacaggtctgcgaggaggtgcccaccgtcttatttagctctccgacacccagcggggttatctcgcctagcagcaccatccatatccctctggtcttggagactcaggtcaccggggagcacaggtccactgtgtacatatcgatcttcggaagccaggatccccctctggtttgccacttaaagtcagctggagaaggccctgttatttacgtgcaccctaaccaggtggatttcggcaacatctatgttctgaaagattccagccggattttgaacttatgcaatcagagttttatccccgcttttttccaagcccacatggcgcacaaaaagtctttatggacgatagagcccaacgagggaatggtgcctcctgagacagacgtccaacttgcgctgactgctaacctgaatgacactctcactttcaaggattgcgtgattttggatatcgagaattccagtacttatcggattccagtgcaggcctctggaacagggtctacaatcgtgagtgacaagcctttcgccccggaattaaacctgggcgcccacttctag

SEQ ID NO: 95746 - DNA, 2253 bp, Artificial Sequence
  derived and/or modified sequence
gattacgctcacacacttacctgtgttacagaacgcgagaagttcattgtgcccataaaggcccgaggagctcgagcaatcctggatttccccgataagctcaatttctctacatgcccggtgaagtacagcactcagaaaatccttctggttagaaatatcggaaataaaaacgctgtattccatattaaaacctgtcgtcccttttccatagagccagcaatcggaaccctcaatgtgggagagtctatgcaattagaggtagagttcgaacctcaatctgtgggtgatcactccgggagactgattgtttgttatgacactggggagaaggtgtttgtgagtctgtacggcgcagccatcgatatgaatatcaggctggataagaactctttgacaatagaaaagacatatataagtctggcgaatcagcgcactatcacaatccataacagaagtaacataatcgcacattttttatggaaagtgttcgccacacagcaggaggaagaccgggagaaataccgggcatgtgacgatttaatcaaggaagagaaagacgaaacagacgaattttttgaagagtgtatcaccgacccactgcttagggaacatctaagcgttctgtcgcgtactttcgctaatcagcgcaggttagtgcagggagactccaaactctttttcaacaatgtctttactgtcgagccactggaaggagatgtctggcctaatagcagcgccgaaatcaccgtgtattttaaccccctggaagccaagttgtaccagcagactatctactgcgacatcttagggcgtgaaatcaggcttcctttgcgaatcaagggcgagggaatgggacctaaaattcattttaactttgaattgctggacataggaaaagtgtttacagggagtgcccactgttacgaagcgattctgtataacaaagattctattgacgcattatttaatatgacaccacctacaagtgctctgggcgcatgctttgtgttctcccccaaggagggaatcattgagcccagcggcgttcaggccattcagatatcattttcgtccacgatcctgggcaacttcgaggaggaattccttgtgaatgtcaatggtagccccgagcccgtgaagctgacgataagggggtgcgtcatcgggccaacttttcatttcaacgtcccagccctacactttggcgacgtgtccttcggcttccctcacacattgatttgttctctaaacaacacatctcttattccaatgacctataaattgcgcatccctggtgatggccttggacataaaagcatctcttactgtgaacagcatgtcgactataaacgcccttcctggacaaaagaggagatcagctctatgaagcctaaggagttcaccatatctccggattgcgggaccatccggccacaaggattcgccgcaatacgagtgaccctgtgttctaatacagtgcagaaatacgagctggctttggtggtcgacgtcgaaggcatcggcgaagaagtactggctttactgatcgcggcaaggtgcgtggtccccgctctgcacctggtgaacactgaggtagattttgggcactgttttttgaagtacccttacgagaaaacattgcagctggcagatcaggacgacctgcctggtttttatgaagttcagcctcaggtttgtgaagaggtccccacggtcttattctcttcaccaaccccatcaggcgtcatttcccccagctcaactattcacatcccccttgtgcttgagacccaggttacgggggaacaccggagcacagtgtatatcagcattttcggctcacaggacccccctctcgtgtgtcatctcaaaagtgccggtgaagggccagtcatctacgtgcatcctaaccaggtcgatttcggaaacatctacgtgcttaaagactctagcaggatcctgaatttatgcaaccagtctttcattccagcattcttccaggctcacatggctcacaagaaaagcttgtggacgatagaacctaatgaaggtatggtgccgccagagactgacgtccaactggcccttaccgcaaacctgaacgacacattaacatttaaagattgcgtgatcttggacattgaaaattccagcacctacagaatacctgtccaagcctctgggacaggttctactatagtgagcgataaacccttcgccccagagctgaatctgggagcacatttctag

SEQ ID NO: 95747 - DNA, 3720 bp, Artificial Sequence
  derived and/or modified sequence
gattacgcccatacgttgacctgtgttactgaaagagaaaagtttattgtacccatcaaagctagaggggcacgagccattctcgattttcctgacaagctgaatttttccacttgtcctgtcaaatacagcacccagaagattctgctggtacgaaacattggcaacaaaaatgctgtatttcacatcaaaacttgtaggcctttctctatagaaccagctattggaactcttaatgtgggagagtccatgcaactggaagtggagtttgagccacagagtgtgggcgatcacagtggaagacttatcgtgtgttatgacacaggtgaaaaggtgtttgtatctctctatggagctgccatagacatgaatataaggctggataagaattccttgaccatcgagaaaacctacatatctctggccaatcagcgaactataaccattcacaatcgcagtaatatcattgcccatttcctgtggaaggtatttgctacccagcaagaagaggacagagaaaaatatagggcctgtgatgatctgatcaaagaggagaaggatgagactgatgagttttttgaagagtgcattactgatcctttactccgagaacatctttctgttctgtcccgaacctttgcgaatcaaaggaggctggtgcagggagacagcaaactgttcttcaataacgttttcactgtggagcccctggaaggtgatgtctggcccaactcatcagctgaaatcaccgtgtactttaacccactagaagccaagctctatcaacagaccatttactgcgacattttaggccgagaaatccgtctgcccctccgaatcaaaggggaaggcatgggacctaagattcacttcaactttgaattgctggatattgggaaagttttcactggatctgcacattgttatgaggcgatactgtacaacaaagacagcatcgatgctctcttcaacatgacccctccaacttcagctttgggggcctgctttgttttcagtcccaaggaaggcatcattgaaccaagtggagtccaagctatccagatctccttcagctctaccatcctgggaaactttgaagaagagttcctggtcaatgtcaatgggtcacctgagcctgtgaaactgaccattagaggctgtgtcattggacctaccttccattttaatgttccagctctgcactttggtgatgtttcctttgggtttcctcataccttgatatgttccctcaataatacctctttgatccccatgacttacaaactgcgtatccctggggatggccttggccataaaagcatttcatattgtgagcagcatgtggactacaaaagaccgtcttggaccaaggaagaaatatcctcaatgaaaccaaaagaattcaccatctctcctgactgtggcaccattcgcccccagggatttgctgctatcagggtgacattatgctccaacactgtacagaaatacgagctggcactcgtggtggacgtggagggcatcggagaagaggtgctggcgctcttaattgcagcaaggtgtgttgtacctgccctccacctggtcaatacagaggtggactttgggcactgcttcctgaagtacccgtatgagaaaacactccagcttgccgatcaagatgacctcccaggattctatgaggtccagcctcaggtgtgtgaggaggtgcctactgtgctgttttccagccccacccccagcggggtcatctccccaagcagcaccatccacataccactggtcctggagacccaggtcactggagaacacagatccacggtttacatctcaatctttgggagccaggacccccctttggtatgtcacttaaagagcgctggagaaggcccagttatctacgtccatcccaatcaagtggacttcgggaatatctacgtcctaaaagactcttccaggattctcaacctatgcaaccagtccttcattcccgcatttttccaggcacacatggcacacaaaaaatccctttggacgattgaacccaatgaaggcatggttcctccagaaactgatgttcaactggcactgaccgccaacctgaatgacacactgacattcaaggactgtgttattttggacattgaaaatagcagtacctatcggattcctgttcaggcttccggaactggttccactattgtttcagataagccctttgctccagaactcaatttgggggcacattttagcctggatacccactattaccactttaagttgatcaacaagggacgtcggatccaacagttgttctggatgaatgatagcttccgaccccaggccaagctgagtaagaagggccgggttaagaagggacatgctcatgtccaaccccagcccagtggctctcaggagcccagggatccacagagccccgtgtttcatctccaccccgccagcatggagctgtacccaggccaggcaattgatgtgatactcgaaggctattctgctactcccaggaaacctaacagtatcctgaaacctgattaccagcccttggccgtaaagaacatttccaccctgcccgtgaacttgttgctgtcaacatctggacccttctttatatgtgagactgataaatccctgctgccggcaactcctgagcctattaaactggaaattgatgaagaaaaaaacctgctgatcaagtttgacccttcctacagaaacgatctgaacaactgggtggcagaagaaattctagcaattaagtatgtggaacaccctcagatagacagcctggacctgcgcggagaagtgcattaccccaacctcagctttgagacaaaggagctggattttggctgcatcctgaacgatactgagctcattcgctacgttaccatcaccaactgcagtccgttggttgtgaagtttcgctggttcttcttggtgaatgatgaggaaaatcagataaggtttgtgacattgccgaagaagccctacagtgccccactgtcccagatggagtccatcccagcaacctcagaggctgccagcccaccagcaatcctagttacagtagagtcccccgagatggatttaaatgattttgttaagaaataaaaattagctctactgaaatagaaagaatatactcaagccagagccaggtggaggatcaggaatccctacagacctgtgaacagaatgagatgctttccattgggatagaagaagtgtttgatattttgcccctgtttggagtgttgcagccacacagtagccaccaaatatcgttcaccttctatggacacgctaacatcattgcacaagctaaagctctgtgtgaagtggaagaaggacccacctacgaaataacactgaagggagaggcgtccctggtcaactattcctttgacaccaaggatattcactacggattacagctgtttgaccatgtcacagagagggaaatcacgctgacgaacatggggaaagttggctttgagttcaaggttctgactgaccaccagtcttctccagacaaccttctccctggagtgccactaatcctgcctgtgtctgtaagtaaatggtgggaggggcctgaattcaaacctacgagccccactccgaagcaggtgagtattcacgaccaggattacaagtgtgattttttctttttgttaaaactaaagaactctcagaagc

SEQ ID NO: 95748 - DNA, 1876 bp, Artificial Sequence
  derived and/or modified sequence
cattccatgcagacaagcgtgtccttcatgagacaggattcagtactgagctagatcgtgtaaagaatctgcctcattgtgaaacggaaatatttgaagtgagatttgacccacagggggccaatcttcctgttggaagcaaagaagtcattctgcccatcaaggtggttggagggccaacagttcacatctgtctccaagccaaggtgaccattccaaccatgactctctctcgtggaaaagtggactttgccacaattcagtgtggacagtgcctgatggaaactattcagctttccaatcatctccaagtcccttgtgaatggttcgtccagagccaaaagcctgttgacaagctggagaaacacatgccgaagtacttaagacagaaactacgcgctgaattaaagccaaagacacggatcttcgaaatccagcccatttctggagtcttggatcctggtgagaagtccaacgtgcaagtgaaattcatgccaaaagaagagaaattctacagccaaaccctggtgtttcagattgcccagagtgctcaaaagcttaccctcctggcacgtgggcaaggtctagagccacgcctggaatttagtccttcagtcctggatctggggccactgctactttgtgcacctggagacgaggccgaggtgatagtgaagaatccctgcaacttccccattgagttttattccttagaatttgatcagcagtatctcatagaagaaaagatcttgcggaagctgaagggctatgattcctacaacaccctgctgctgcctccccgcaaccctggggagaagctgcccccagaactgtacgagtacttcaaagagataaagaagtcaaaagaggagcagatgagggcgaaatatctggagaatctggcacaggagaatgaagaggaagatataacctcatcagatcagggaacctccaatagcacaaagaggacatcgctgagccgagggatctctgtcacatccaacctggaagaatggcacgccctgttggtcgagtccaaaacctacctagaggaagaggaggatgaggaaagcctggaaaaaatcattttccaaactgacaagcttcagagcattgacagccactccatggaggaagttggagaggtggaaaacaacccagtgagcaaagcaatcgctcgccacctgggcattgacatttctgcagaaggccgcctggccaagaaccggaaaggcatcgccattatcattcacgggacacccttgtcaggaaagtcagccaatgccgttagcgtggccaagtactacaacgcagcctgcctgagcatcgactccattgtgctggaagctgtggccaacagcaacaacatcccagggatccgggcctgtgagctctgcatcagggctgccatagagcagtccatgaaggaaggagaggaggctgctgagtgactgctaccgaggagtggtgtttgatggcctcgacactctctttgctcggaatgctgcagccgccctcctctgcctgctgaaggccattggcagccgggagcatatatacattctcaacatggcccaggattacgcagccatgaaggcccgggagaaagccaaaaaggagcaagaaggcaaggcctcctacctttccattgggcttaagtgaaactttgacatttgctattccgttggcgcctcacctctgccctgtaaggtggccaggagttgtatttctgctttgctaggagggaactgggacgcgagtggctggctgggaagttctatgatgaacgctttgctgacagcaggtgcattcctgcttccctcccatcacactgtacccctccatcctttctgcaattacagccattttgggtccc

SEQ ID NO: 95749 - DNA, 15366 bp, Artificial Sequence
  derived and/or modified sequence
atgaccagtaggagactggaagaatccatgggcgcggtacagatgggcctggttaacatgttcaaggggttccagtctaaggttctacctcctctttcgcccaaggtggtgaccgaggaggaggtgaatcgtatgctgactccatccgaattcctaaaggagatgtccctcaccaccgagcagaggttggccaagaccagactgatgtgccgaccacaaatcatcgaattactcgatatgggggaaaccactcaccagaaattctcaggaatcgatctggaccaggccctgttccaacctttccccagcgagatcattttccaaaactacacaccatgtgaggtgtatgaggtcccccttatcctgcggaacaacgataaaattccccgccttgtgaaggttgtcgaagagtcaagcccgtatttcaaagtgatcagccccaaagacataggacataaagtcgctccgggcgttcccagcatctttaggattctgtttaccccagaagagaacaaggactacgcacatacactgacatgcgtcaccgagagggaaaagttcattgtgccaatcaaagctcgtggagctagggcaatcctcgatttcccagacaagctgaactttagtacatgtcctgtcaagtatagtactcaaaagattctcctggtccgcaatattggaaataagaacgcagtgttccacattaaaacttgtagaccgttctccattgagcccgccatcggcactctaaacgttggagagtccatgcagctggaagtcgagttcgagccccaaagcgtgggcgatcatagcggtcgcctgattgtgtgttatgacaccggggaaaaggtgttcgtgagcctgtatggcgcagccattgacatgaacatccgactcgataagaattccctcacaattgagaagacctatatcagcctggcaaaccagagaacaatcacaatccacaatagatcgaacatcattgcacattttctgtggaaagtgtttgcaactcaacaagaagaagaccgggagaagtacagggcctgcgatgacctcatcaaagaagaaaaggatgagacagatgagttttttgaggaatgcatcaccgacccgctgcttagagaacacctgtcagtgctgtcacgcacattcgctaaccagaggaggttagttcagggtgattcgaagctgttttttaataacgtctttactgtggagcccttggaaggcgacgtctggccaaattcatcagcagagatcaccgtgtatttcaatccactggaagccaagctctaccagcagacaatctattgtgacatactgggcagagaaatacgcctgcccctcagaattaaaggcgaaggaatggggcctaaaatccacttcaacttcgaactgctggacatcggaaaggtctttaccggctcggctcactgttacgaggcaatactgtataacaaaggatcaatcgacgccctgtttaacatgacgcctccaacctccgcacttggggcatgttttgtgttctctcctaaggagggaattatagagcctagcggagtacaagctatacagatctccttctcctctactatcctcggaaacttcgaagaggaattcctcgtgaatgtgaacggctcccctgagcctgtgaaactcacaatccgcggatgtgtgatagggcctacttttcattttaatgttccagctctgcatttcggtgatgtttcattcggatttccccacaccctaatctgctccctcaataatacctcactgatcccaatgacttataaactgaggatccctggcgacgggctggggcacaagtctatcagctattgcgaacaacatgtagactacaagcggccaagttggacgaaagaggaaatttcttccatgaaacccaaagaattcacaatttctcctgactgcgggaccattaggccacagggctttgcggcaatacgagtgacactgtgctcaaacaccgtccagaaatacgagctcgccctggtcgtggacgtcgaaggcataggggaagaggtattagctcttctgatcactgctcggtgtgttgtccctgcgctccatctggtgaatacagaggtggattttgggcattgctttttaaagtacccgtatgaaaaaactttgcagttggccaatcaagacgacctccccggattctatgaagtgcagccacaggtgtgtgaggaggtcccaacggtgctctttagctctccaactccaagtggtgtaatctccccatccagtaccattcatatccctctggttctggagacccaggtaaccggcgaacatcgcagcaccgtgtacatctcaatctttggctctcaggacccgccgcttgtgtgtcacttgaagtctgccggcgagggccccgttatctacgtgcaccctaatcaagtagacttcggcaatatatatgtgctgaaggactcaagccgcatactcaacctgtgtaaccagtctttcatcccagcgtttttccaggcacatatggcgcacaagaaaagtctgtggacaatagagcccaatgaggggatggtccctccagagacagatgtgcaactcgctctgaccgctaacttgaatgatacccttactttcaaagattgtgtgattctggatattgagaacagcagtacctatcgaatccctgtgcaggcttctggaaccggctccacaatcgtgtccgataaaccttttgccccggagttgaatctaggcgcacactttagcctagatacgcattactaccattttaagctaattaacaaagggcgtcgcatccagcagctgttctggatgaatgacagtttccggccccaggcaaaactgagtaaaaagggaagagtaaaaaaggggcacgcgcatgtgcaaccgcagccaagcggcagccaagagcctcgcgacccacagagccctgtttttcacctacatcctgctagtatggaactttaccctggccaggcgatcgacgtgattcttgagggatatagcgccactccacgtatcgtgaaagaaaagttagtttgccatgccatcatcggagcacaaaagggtaaatccctcgtcatggctgtgaacatcacgtgcgagttcgtggctcccctgatccagctgagcacaaagcagctgatctaccgactagagaagaagcccaattccatcctgaaacctgactaccaaccactcgccataaagaatatcagtaccctgcctgtcaacctgttgctgagtactagcggaccattttttatttgcgaaacggacaaatcccttcttcctgctactcctgagccaattaagctggagatcgacgaagagaagaatctgcttatcaaatttgaccctagttatcgaaacgacttaaacaactgggttgctgaggagatcttggctattaagtacgtggagcatccccagatagactccctggacctccgtggggaggtccactaccccaatttgtctttcgaaactaaagagttagatttcgggtgtatcctgaacgacactgagttgatcagatacgttacaataacaaactgttcacccctggtggttaagttccgctggttctttctagtgaatgacgaggagaaccaaatacgatttgttactctgcctaagaagccttatagtgcccccgtgtcccagatggaatctattccagccaccagtgaggccgcaagcccccctgctatcctcgtgaccgttgagtcccccgagatggacttaaacgattttgtcaagactgtgctggtggatgaggacgcaaggcctgaggagaaggagctgagaaaaaccaaggccagttcagtcatatccgatgagataaagatatcatctactgaaatcgagagaatctatagttcccaatcccaggtggaggaccaggagtctcttcagacctgcgaacagaatgagatgctgtctattggaatcgaagaggtgtttgatatcttgcccctattcggcgtcctgcaacctcatagctcccatcagatctcctttaccttctacgggcatgcaaacatcatcgctcaggccaaagctctgtgcgaagtggaggaaggtccgacatatgaaatcacactgaaaggtgaggcttcattggtgaactactctttcgatacgaaggacattcactacggtcttcaactgttcgaccacgtcactgagagggaaataaccctgactaatatgggaaaggtggggttcgaatttaaagtgctaaccgaccaccagagtagtcctgacaaccttcttcctggtgtgcctctgatcttgccggtgtcggggttcatttcttcacatcaggagcaagtactgaaggtctattatctacccggcgtccctgaggtatttaaaaggagctttcagattcagatagcccacctggatcccgagaacattaccttgagtggcgaggggatcttcccacagatttgtttggaccttcctcggaatctgactgcaaatgagaaatacgagatgttcttgaatcaggcacgtaagaatacagacaaggaatacaataagtgtgaaatgttggatcactttgatatcataacagaggaagtaccggaagacgagcccgccgaagtatccgcccatctgcagatggaagtagaacggctaatagtgcaatcctacgttctcgagcaccagaagactacaacacccgacccaatggacgatccgtgttttagccatcgctctcgacgaaagttggcaaaaattcagttacctgaatacattctggacttcgggtatattatcttgggagaagtgcgtacacatatcatcaagataatcaacacaagccacttccctgtgagcttccacgcagataaacgtgtcctccacgagaccgggtttagcacagaactcgaccgtgtaaaaaacctgccccattgcgaaaccgagatcttcgaggttaggtttgaccctcagggcgcgaacttgcctgttggctccaaggaagtgatcctcccgataaaagtggtgggaggtccaacagtgcacatctgcttgcaggctaaggttaccatacctactatgacactgtctagaggcaaggtcgactttgccaccatacagtgcggccaatgtttggtggaaacgattcagttgtctaatcacctgcaagtaccctgcgagtggttcgtacagagccagaaacctgtagacaagctggaaaaacacatgcctaaatatctcaggcagaagctgcgcgcggaacttaaacctaaaacacgcatctttgaaattcagccgatttctggggtcctggatcccggggaaaagtcgaatgtgcaagtaaaatttatgcccaaggaggaaaagttttactctcagacgctagtgtttcagatagctcagtctgcccagaagctgactctccttgccagaggccagggactcgaaccccgacttgaattctcaccttccgtgctggacctgggacccctgttactatgcgcccctggagacgaagctgaggtgatcgtaaaaaatccgtgcaacttccccattgagttctacagtcttgagttcgaccagcagtaccttatcgaggagaagatactaagaaaactcaagggttacgattcatataatacactattgcttccgcctaggaaccctggcgagaagctgccgcctgagctttacgaatatttcaaggaaattaaaaaaagtaaggaggagcaaatgagggccaagtatctcgagaatcttgcccaggaaaacgaagaggaggatattacgagtagcgatcaggggacctccaactcaaccaagaggacctctttgagcaggggcatcagtgtcacaagcaatcttgaggagtggcatgccctgctggtcgagagcaaaacttacctggaggaagaagaagacgaagagtcactggaaaagattatcttccagactgataagctacagtcgattgacagtcattcaatggaggaggtgggggaagttgagaacaatccggtatctaaagcaatcgcgcgacacctgggaatcgacatcagcgcggaaggtcgtctggccaaaaataggaaggggatcgcaatcattatacacgggacgcctttaagtggcaagtccgccaatgcagtaagcgttgccaagtactacaacgccgcttgtctcagcattgactccattgtgctagaggcggtggcgaatagcaacaacattccaggtattagggcccgtgaactatgtataagggctgctattgagcagtcggtgaaggaaggggaggaggccgcccaagaagctgcggttggccagaatgtgatcggccagggccggctgagtacagataccctgggcaaattagcaagcgaaatgacactggtggccccggaaatcaagccgggaaagagcgttcgaggctccgtggtgataactaagtcaaaggccgattcccacgggagtggaagccagaagcagcatcacagtcaccagtccgagacccctcagatcagctcttcacctcttccccccggacctatccatagatggctgtccgtctcgccgagtgtagggggcgagactgggttgatgagctgcgttctgcctgacgagctgttggttcaaatcttggctgagcgcatccagttgtccgattgctataggggagttgttttcgacggccttgacacccttttcgcccagaacgccgctgccgcattgctgtgcctcctgaaggccattggtagccgtgagcacatatacatcctcaatatggcacaggattacgctgcaatgaaagcccaggaaaaggctaagaaagagcaggaagagcgaaagcataagggggccttggagaaggaaaaggagcgtctacagaatatggatgaggaagagtatgacgcgctgactgaggaagagaaactgacttttgatagaggcattcagcaggctctccgggaacgcaagaagcgggaacaggaacgcctggccaaagaaatgcaggaaaaaaagctgcagcaggaacttgagcggcagaaggaagaagacgagttgaaacgcagggtgaaaaagggaaaacaggggccaatcaaggaggagccgccaatgaagaaatcccaggccgctaataaacaagtacccccactcactaaggtggatgtgaagatggaaaccatcgagcgcaaaatttccgtgagagaacagacaatgagcgaaaaagaggagcttaacaagaaaaagaggaatatgggcgatgtatctatgcatggactccctcttgtccaggaccaggaggacagcgaaggagacaacagcaaagaccccgataaacaactcgcccccaaattcaagacatatgagttgacactgaaggacgtgcagaacatcctgatgtactgggatcgcaaacagggggtgcaacttccacctgccggcatggaggaagccccacacgagcccgacgatcaacggcaagtccccctcggcggccggcgggggcgaaaagacagggagagagagcgactggaaaaggagagaactgaaaaagaacgtttagaaagagaaaaagccgagagagagcgcttagagaagctgagggctctggaagaaagaagcgattgggaaggagagggcgaggaggatcatgagggtaagaaagagaaagaccttggcgtcccgttcctggatattcagaccccggattttgaaggactttcttggaagcaggccttagagtctgataaactgcccaagggcgagcaaatcctggacattctgggcctgggcgcctcaggcccccctatccctccacctgccctgtttagcatcgtctcctatcctgttaaacggccaccccttactatgaccgatgacttggagcattttgtgtttgtaatccctccgagtgaagacatctcactcgatgaaaagaaggagatggaaatagaatctgattttttggcaacaaccaacacgactaaagcccaagaggagcagacctcctcctcaaaaggcggcaaacaaaagatgaaggaaaagatagatcaagtattcgagatccaaaaagacaagcggcacatggctctgaaccgcaaggttctttctggcgaacccgccggaactatctcacagctgtcagacactgacctggacaacttcaatggtcagcattcgcaggagaaattcactcggctaaaccacttccggtggatcgtgccagccaatggagaagtgaccctgcaggttcattttagctccgatgagttcggcaacttcgaccaaacattcaacttcgagatcttagggacatgttgccaataccagctttattgcagaggaatttgtacatatccatatatatgtcaggaccctaaggtagtgtttcctcagcggaagatggatatgaaaacaaacgaggttatatttaaaaagtatgtgatgtcgacagagacatactacttcgggcctctcctttgtggtaagtcccgtgacaagtacaaaagctccctcttccccggcaacatggagactctgacaatcctgaacaccagcttaatggtggtggaagccagtttttacttccagaatgacgtgaaggccaatacctatttcctggaaccgaataccatggtcctcaaaccaaatgagaagcagattcttaatgtttgggcctacccaacatctgttggcgtgtttgaagacagtattgtttgttgcatcaacgataaccccgaacctgcaatattccagctttcctgtcaagggatccgaccggagttagagttggaacctagacaacttcactttgataggctcctcttgcacagacaagagtcaagggtagttctgctccggaacgtcactctacttcccgtggcctggagaataacgtccctggagcatctgggcgatgattttacagtgagcctgatgcaaggcacaatcccccctgaggccgaatacggtctccatctatacttccagccaacgaagccagttaatattaagaaggccatcaggctcgaagtcctggacgctgaaaaccttctgggcgtggtgcagatagaaaacatcatggtctttgccgaagcctatgacatcgccttggatataacattccctaaaggcgcggaaggtgggcttgattttggcattgttcgcgttactgaggaggccaagcaacccctgcaattaaagaatcgtggcaaatacgagattgccttctcctttagtgtcgacagtgtgggcattagcactccaaacatcaattccatgatttctgtccagcccaagaaaggcagcctgacgccgacagaaaagccaactaatgtgcaagtcttctttcacgccaagaaggaggtcaaaatcgaacatcagcccgtgctgagatgccaaatcatcgagcccaatatttctgaaggcggggaaataatagcgtccatcccaattaagttttctgcgaacgccgtctactcgaagtacaacattacacctagctccgtaatcaatttcggcgctctaatttgtggtaccaggaagtcaaccacatttaccattgaaaaccaaggagtgactgattttaagtttgcactttataaactgaccggcgagagtccaatccaccaaaagaaggctgccagtcatgtgcggcacgccaggtcgagagagtctgagagtttttacaagaccggctcatctcgggccgcaaaattttcagacaccatccagaaagaggtgaccacaaccggccaggcgcgtttcgcccatggaatgtttacagtttaccccggtttcggaagtatccctagtgggggacagcaggtgataaacgtggactgcgttgcagacgccatgggtaagtgtgaagaatttattgccattgatatctctggccgcgatcctgctgtacatccagcaggcattctttataccctgttggcagaggcctgcctccctgcctttgtcaccgaaaataatgcattgatcttcgaagaacaccaaatttgtacatctgctaatctgcaccatattctccagacaatcgaatctgggggtctgttcgtggaagacgagaataagtttattttctgtaatgtcctcgtcggcagacaggctaaagcgcgcttcaaaatatctaatgttgggaagatcacttgtgatgtgaacatcgtagttcggccaatctcaaataaaccatttgctcgaattgtggacatatttgaggtcgagccctcaaagatgtgcatcgctagccactcccacgcctttgctactgtatccttcactcctcaaatcatgcaaaattatcagtgtatattcgaggcaaccttagacggcttgccttcaaccctcgccaaatcccgcgggctggtcttcgatattgccggcgagggaaatctcccgagggtgactgtggtcagaccagtcctccacaaccagtatgggaaccctctgctgctctttaagagactgctgctgggtcattcggaaaaactgccattgattcttaagaacaatggggtgctccctgcccaactgcacgttgatctccaagatgagctgggtgtgttcagcctaaaggggagaccgacaactgcttatatatacatcaccgaagagaataaaccgcatgtgaaagcaaaaaaagctcatacagcctcccttgtggtgagtcctggggatactgccgagtttgatgttgtgtttcacagccagaaggttggccgcatgcgcggtataatccatctgtctgtgataaataaccagtacgaggaaacgagcattcatatggtcggcgaaggttacgaggatgacataactttggacaacatacacggcctcgtggcaccaacctctcaggaggatattagcattagtgaatttaccgaaattatcgaagataacgacatggaggatctggtggccgctgctctcgtggatcacattcaattcggcgactgtcacattggtcacagttataatgctagcttcaccgtgaccaatcattctcaggttaaccttattcgctttgagtggcctgtttctgcaacaatcgcattctctcctcaaatgggacacctgcatccaggctgtgcaaaggatattgtcgttacgatgaagtccgatgtacctatcaatttgaagaacatgcgtatccgctgcaaactgagcagaataatgtttcagctgccagcggaccaagttcccgattgggacgatcgtatgcatacagtcaaatgggtggacgtacccaggaacatgcccgggacctttacaaccaaacgcaaggtcatcgaaacggatcccgaacctgcacactcagttttggaggaaaattaccaagagctgcaacttcagatatctgctaacgtcgatttcgcttcatatcactgtcaggctcgggatgtgcggttcaaggaaacgctcgtataccagaccagagtcttcgaatttgatgtgatcaacagcgggcgggtacaactcgagttttcatgggtctccgaagacactagcaaggcagtgtcttttgccaagcctgaccaccagggctcggctcagaaggaccagttatcacaggggacaatgcacacagggagcacactcgacagcacgatggaccactgggctgaaggttctccacagcctttctccgtcgaacccagttccggaattgtcccggtgggtaaaatccagaagttcaaagtcaagttcagcccactcgatatcggggacttcgagagcaacctcttttgtcagatccctaaccttccacccggggaacaaggtcccgtgttggtagcaaagggcaggagtacccttccgatctgccacttcgacctgaaggactcggattacattagcggacaccagcggaaccccgagctgcgggggtccagcgggggtgcactggaccccaacacccgggtgattgagttcactacagtggggatcggagggaaaaacctaagaacattcacaatcctcaatccaactaactcaacatattctttctgctggatctccgaggagattgaatccctgcagaaccctgcagcatttacctgtctcacagaaaaaggcttcatccatccggagaagaaggcggaaatagtgttccagttcacgccctttcacctgggcattactgaatcctcctggacctttctgataccagagcacaatataactgttccgtttctcctggtcggtaaaacgactgagcctttgatctctctcaacaaaagtcatctgaatttttccagtttgctgatcggaagggaggctcgggaaacggtgcagatcatcaacaaggaagagcaggggttcgatttcagtttccaggataatagcagatacagcgaaggcttctccaactctcttctggtgtgcccgatggaagggtggatccctccccttagtcgttttcctatagacatctttttcaccccaaaacaggagggtgatgtgaacttcaatctgatttgtaatgtggaaaagaaggtacatccagtaactttaaacgtaaaggctgagggctacaccatgaacgtggagataaagtgcaaagatcgtacaggatccatcactttattgacccccaatcagaccaatattatcaatttctatgaggtggaactcaacgagtgcgtgcagtgtgaatttaactttattaacacgggcaagtttacctttagttttcaggcccagctgtgcgggtcgaagactctccttcagtaccttgaattctctcccatcgattccactgtggacgtcggacagagcgtacatgcaacattgtccttccagccactcaagaaatgtgttctgactgacttggaattaattatcaagatttcgcacggccctacctttatgtgcaacatctctggttgcgctgtatctcctgctatacattttagtttcacttcttataattttggcacctgttttatttaccaggccggaatgcccccgtacaaacagaccctcgtaatcacaaacaaggaggaaacccccatgagcattgattgtctgtacacaaacaccacccacctcgaggttaatagcagagtagatgtcgtgaagccggggaatacactggaaatccctattaccttttatccacgggaaagcattaattatcaggagctgatcccttttgagataaatggtctgtcacagcaaacagtggaaattaagggaaagggaaccaaaatgaagatacttgtcctcgacccggcaaataggatagtgaagctgggcgccgttctaccagggcaagtggtgaagaggactgtctcaatcatgaacaactccttggcccagctcacctttaaccagtcgatcctatttaccattccggagttacaggaacccaaagtgctgacccttgcaccattccacaatataaccctaaaacctaaggaagtttgtaagctcgaagttatttttgccccaaaaaagcgggtcccccccttcagcgaggaagtgttcatggaatgcatgggtctgctgagaccactgtttttgctatcaggatgctgtcaagccttggagatttcccttgaccaggagcacattccattcggcccagtcgtgtaccagactcaggccactagacgtatcttgatgatgaacaccggggacgttggtgctcgatttaaatgggatatcaaaaagtttgagcctcacttctccatttcgccggaggaggggtacatcacctcgggcatggaagtgtcctttgaagtgacttatcaccccacagaagtcggcaaagagtccttatgtaaaaacattctctgttatatccagggagggtctcctctttcactaacgttgtctggggtctgcgtcgggcctccagcagtcaaagaagtggtgaacttcacatgccaggtccgcagcaagcacacccagactatccttttatccaacagaaccaaccagacatggaacctgcacccaattttcgagggtgaacattgggagggtcccgagttcattactctggaggctcaccaacagaataagccttatgaaataacctaccggcctcggacgatgaatctggagaataggaagcaccagggaaccctgttttttcctctgccggatgggaccgggtggttgtacgcattgcatgggactagcgagctgccgaaagcggtggctaatatctatcgagaagtgccgtgtaaaacaccctacaccgagctcctgccgatcacaaattggctcaacaaaccccagcgctttcgcgtcatcgtggagatccttaagccagagaagcctgacttgtccataactatgaaggggctggattacatcgacgttctgagcggtagtaagaaggattacaaactcaatttcttcagtcacaaagaaggcacatacgccgccaaagtaatcttcaggaatgaggtgaccaacgagttcttgtactacaatgtcagctttcgcgtgattccctccggaatcataaagaccattgagatggtgacccccgtgagacaggtggcttccgcctcaattaagctggaaaacccgctcccctattcagttacgttctcgactgagtgcagaatgccggatatcgctctcccgagtcagtttgttgttcccgcgaactccgaaggcacattttctttcgagtttcagccgctgaaggctggcgaaaccttcggccggcttacattgcacaacaccgatttaggttactatcagtacgaactgtacctgaaggcgacaccagctctgccagaaaagccagttcattttcaaacggtcctagggtcctcccaaataatcctggttaagtttataaactatactcgccagagaacagaatactattgtcgtacagactgcacagattttcacgctgagaaactcatcaatgctgctcccgggggccagggtgggacggaagcctctgtggaggttttgtttgaacccagccacctcggagagaccaaggggatacttattctgtccagtttggccggtggtgagtacattattccactctttggaatggcgttaccgccgaaacctcaggggcccttttccatacgggccggatactctatcatcattccctttaagaacgtcttttaccacatggtgaccttcagcatcattgtcgacaatcccgccttcacaatcagagccggcgagtccgtgcggcctaagaagatcaataatattactgtcagctttgagggcaatcctagcgggtccaaaacgccgatcaccaccaagctgacggtgagttgccccccaggagagggaagtgaaactggtgtcaaatgggtatattacctgaaagggatcaccctgtag

SEQ ID NO: 95750 - DNA, 15363 bp, Artificial Sequence
  derived and/or modified sequence
atgacatctcgaagactggaggaatccatgggggctgtacagatgggattggtgaacatgtttaaggggttccagtctaaagttctccctccacttagtcctaaggtcgttacagaggaagaggtgaacaggatgctcacgccctcagaattcttaaaagaaatgtctcttactaccgagcaaaggctcgctaagaccaggcttatgtgcaggccacagatcatcgaactgctggatatgggcgagaccacacaccagaagttttcgggaattgacctggatcaggcattattccaacctttcccgagcgaaatcatcttccagaactatactccctgcgaggtttatgaggtgccactcattcttcggaataacgacaaaattccacggctggttaaggttgtggaagagagttccccctactttaaagtgatcagtcctaaggacataggtcataaggtcgcccccggggtgcctagcatttttaggatcctgtttaccccggaggagaacaaagactatgcacatactctcacgtgcgtaaccgagcgagaaaagtttatcgttcctatcaaggcaaggggggcccgggccatcctggatttccccgacaagctgaacttctcaacttgccctgtcaaatacagtacccaaaagatcctgttggttagaaatataggaaataaaaatgcagtatttcacatcaaaacttgccggcctttctccatcgagccagcaattggcaccctcaacgtgggggaatccatgcagttagaagtggagttcgagcctcaaagcgtgggagaccactcaggacggctgatcgtatgctatgacacaggggagaaagtcttcgtgtcattatatggagccgccatagacatgaacattcgtctggacaaaaattccttgaccatcgagaagacttacataagtcttgccaaccagaggacaattacaatccataatagatcaaatataatcgctcatttcctatggaaagtgttcgctacccagcaggaagaggaccgtgagaaatatagggcctgtgacgaccttatcaaggaggagaaggacgagacggacgagttctttgaagagtgtattactgatcctctcctgcgcgagcacctcagcgttctcagtcgcacatttgctaaccagcgtcgcttggttcagggtgatagtaagctgttctttaataatgtttttacagttgagcctctcgagggcgacgtgtggccaaattcgtctgccgagatcaccgtatacttcaaccccctggaggcaaagctgtaccaacagacaatttactgcgacatactgggacgagagataaggctgccactcagaatcaaaggggaaggaatgggtccaaagattcattttaacttcgagctgctggacatcgggaaagtcttcaccggatctgcgcattgttacgaggccattctctacaataaggggtcaattgacgccctcttcaatatgactccgcccacttcagcgctcggcgcctgttttgtgtttagccctaaggagggcatcatcgaacccagtggcgtgcaggctattcagatttctttttctagtactatcctgggtaactttgaggaggaattccttgtcaacgttaacggtagccctgagccggttaaactcactatccgcggatgcgtaatagggccaacctttcatttcaacgtgcctgcactccacttcggcgatgtgtcatttggatttccacatacattgatttgtagcttgaacaacacgtcattgatcccaatgacgtataagctcagaatcccaggagacgggctggggcacaagtcaatatcttattgtgagcagcatgtggattacaagcgcccttcttggaccaaagaggagattagttctatgaagcccaaggagtttactatcagccccgattgcgggactatacgcccacagggctttgctgccattcgcgtgacactctgttccaacactgtgcaaaagtacgagctggccctcgtggttgatgttgagggaatcggcgaagaggtcctcgctctcttaattactgcacggtgtgtggttcctgcgctccacttagtgaacaccgaggtcgatttcggtcattgcttcttgaaatacccgtacgaaaaaacactgcaactggccaatcaggatgacctccctggcttctacgaggtccagccccaggtctgtgaagaagtgcctactgtgcttttttcttcccctactccttctggggtgatctcgccttcatctacaatccatatacccttggtcctggagacacaggtgacgggggaacaccgctcaactgtatatatttcaatttttggttctcaggaccccccattagtgtgccacctgaaaagtgctggagaaggcccggtgatctatgtacatccaaaccaggttgactttgggaacatctacgtccttaaagattcgagcagaatattaaatctgtgcaatcagtcttttatacctgcgttcttccaggcccacatggcacataagaaaagcctctggacaatcgaacccaatgaggggatggtaccaccagagaccgacgtgcagctggccctcacagctaatcttaacgataccttgactttcaaagactgcgtgatcctggacatagagaattcctcaacctaccgtatacctgtacaggcctcggggaccggcagtacaatcgtgtcagacaaaccattcgcccctgaactcaacctcggcgctcacttttccctcgacacccattactaccatttcaaactaatcaataaggggcggaggatacaacaattattctggatgaatgactccttcagacctcaagctaagctgagcaaaaagggacgcgttaagaaaggccatgcacacgtgcagccccagcccagcgggtcccaggaacctcgggacccgcaaagtcccgtatttcatctgcatccagcctctatggaattgtatccagggcaagcgatagatgtgattctagaaggctattctgccacgccccgaatagtgaaggagaagctcgtgtgccacgccattatcggggctcagaaaggcaaatccctggtcatggctgtcaatattacatgtgagttcgttgctccgctcattcagctgagcaccaaacagctcatttaccgcctcgaaaaaaagccaaactctatcctgaagccagattatcagcctctcgcaattaagaatattagtacattaccagttaacctgctgctatctacatccggaccattcttcatctgcgagactgacaagtctttgctacctgcaacccctgagccaatcaagctggaaatcgacgaggagaagaacctattaatcaagtttgaccctagctatcgcaatgatctgaacaattgggtcgccgaggagattctggccatcaaatatgtcgaacaccctcagatcgactcactcgatctgaggggcgaggtccactatcccaatttgagcttcgagactaaagagctcgactttggatgtattcttaacgatacagagttaatacggtacgttactattaccaactgttcacctttagtcgtaaaatttcgatggtttttcctcgtaaacgatgaagagaatcagatcagattcgttactctgccaaaaaaaccatactccgccccagtatctcagatggaatccattcctgccacaagcgaagccgcctcgccgcccgccatactggtcaccgttgaatcacctgaaatggaccttaacgactttgtaaaaactgttctcgtggatgaggacgccagaccggaggagaaagaactaagaaagacaaaagcatcctccgtgatatccgatgtacggtgcccgtttcacggagaggaaagaatctatagctcgcaatcccaggtagaggaccaagaatcgctgcagacctgcgagcagaatgaaatgctcagcatcggcattgaagaggtttttgacatattgccactcttcggcgtgcttcaaccccactcctcacaccagatttcttttactttctatggccatgcaaacattattgcccaggcaaaggccctgtgcgaggtggaggaaggcccgacctacgagattaccctcaaaggtgaagcgtcccttgtcaactattccttcgataccaaagacatccattacggtctgcagttgttcgatcacgttaccgaaagagaaattaccttgaccaacatggggaaggtcggttttgagtttaaggtattgacagatcatcaatcctctccggacaatttattgcccggtgtccctcttatccttcctgtgagcggctttataagttcacatcaggagcaggtacttaaagtgtactatctgccaggcgtacccgaagtatttaagaggagtttccaaatccagatcgcccatcttgacccggagaatatcactctatccggcgagggaatctttccccagatctgcctggacctgccacgaaacttgaccgccaatgagaaatacgagatgtttttaaatcaggcccgcaagaacaccgacaaagagtacaacaagtgcgaaatgttagatcacttcgatattatcaccgaggaggtgcctgaagatgaacccgctgaagtgtctgctcacctgcaaatggaagttgaaaggttgatcgtgcagtcttatgttctcgagcaccaaaaaactacaactccagaccccatggacgatccgtgtttcagtcatcgctcacggcggaaacttgcaaagattcaactccctgagtatattttggattttgggtatatcatactgggggaggttcggacccacataattaagatcattaatacaagccatttccccgtttctttccacgctgacaagcgggtgctgcacgaaaccggattctctacggaacttgacagggtgaaaaacttaccacactgcgaaactgaaatatttgaggtgagatttgacccccagggtgcaaatctgcctgtagggtccaaagaggtcatcctgcctatcaaggtagttggcggaccaacagtgcatatttgcttgcaggccaaggtgactatccctactatgacattaagtagaggtaaagtagactttgctacaattcagtgcggccagtgcctcgtggaaactattcaactttccaatcacctccaggtcccctgcgagtggttcgtccagagccagaagcccgtggataaactagagaaacacatgcccaagtaccttcgtcaaaaactgagagcggagctaaagcccaagacccgcatttttgagattcagccgatttccggagtgttagatcccggagaaaaaagcaatgtacaagtgaaattcatgccgaaagaagagaagttttattcccagacccttgttttccagatcgctcagtcagcacagaaattgacactcctcgcccggggacaaggcctcgaaccacggctcgagttttcaccgagcgtactggatcttgggcccctcctgctgtgcgcgccgggagacgaggccgaggtcatcgttaagaacccctgcaatttccccatcgagttctactcccttgagttcgatcaacagtatctgattgaagagaaaatcctaagaaaacttaaaggatacgactcatataacaccctcctgctaccaccgcgcaacccaggcgaaaagctccctccagaattgtacgaatactttaaggaaattaagaagagtaaagaagagcagatgcgagcaaaatatctggaaaatctggcacaggagaacgaagaggaggatattactagcagcgaccagggcacaagcaatagcaccaaaaggacctcactcagcagaggaatctccgtgacaagcaatctcgaagagtggcacgccctcctggttgagtcaaaaacctacttggaggaagaggaggacgaggagtctctcgaaaaaatcatttttcagactgataagctgcagagtatagattcccactctatggaagaagttggcgaggtggagaataatcctgtatctaaagcaattgccaggcacctgggaattgatattagcgctgaaggccgcttagcgaaaaaccgcaagggcatcgccatcattatccacggtaccccactgtccgggaaaagtgcgaatgccgtgtcggttgcaaagtattacaatgcggcatgcttgtccattgacagcatcgtgctggaagcagtcgctaatagtaataatatccccggaataagagcgcgcgaactctgcattcgggcagccattgagcaatcagtcaaggagggcgaagaggctgcccaagaagcagccgtgggccaaaatgtcatcgggcagggacgcctctccaccgacacactgggcaaacttgccagcgagatgacattggttgctcccgagattaagcctggcaagtcagtacgcggatctgtggtcatcactaagagtaaggccgacagccatggaagcggtagtcagaaacagcaccactcgcatcagtccgaaacccctcagataagctcttcgcccctgccgccagggccaatccatagatggctcagtgtttctcctagcgtgggaggtgagacaggcctgatgagctgcgtgctccctgacgaactcctcgtccagattcttgcggagcggatccagctcagtgattgctacagaggcgtcgtatttgacgggctggacactctgttcgctcagaatgccgccgccgccctgctttgtcttctcaaggctattggatccagggagcacatctatattttaaacatggcacaggattacgcagcaatgaaggcccaagaaaaagcaaaaaaggaacaggaggaaagaaaacataaaggagcattagagaaagagaaggaacggcttcaaaacatggatgaggaggagtacgatgccctgactgaggaagagaaacttacgttcgatagaggaattcaacaggccctccgtgagcgcaagaaacgcgagcaggaaagattggcgaaggagatgcaggaaaaaaaactacaacaggagctggaacggcagaaagaagaggatgagttaaaaaggcgtgttaaaaaaggcaagcaaggacccattaaagaagagccccccatgaaaaagtcccaggcggctaataagcaagtacctcccctcactaaggtagacgtgaagatggaaacaatcgagcgcaagatctcagtgcgggagcaaaccatgtccgagaaggaggaacttaacaagaaaaagagaaacatgggagacgtttccatgcatggattaccgttggttcaggatcaagaggatagcgaaggcgacaatagcaaagacccagacaaacagctcgctcctaagttcaagacttatgaactgactttgaaggacgtacaaaacattctcatgtattgggataggaaacaaggggtgcagttacctcccgctggcatggaggaggcacctcacgagcctgacgaccagcgtcaggtgcctttaggcgggcgccgcggccgaaaagaccgagaacgcgaacggctggagaaagagagaaccgagaaagaaagactcgaaagggaaaaggccgaaagagaacggctggagaagctccgcgctctggaagaacggtccgactgggagggtgagggtgaggaggaccatgagggaaagaaagagaaagaccttggagtgccgtttcttgatatacaaactccagactttgaaggtctgtcctggaaacaggctctggagtcagacaagctgcccaagggcgagcagatcctagacattctaggcctgggagctagcggtccgccaatccctcccccagcgctgttctcaattgtgtcctacccggtgaaacggccacccttaactatgaccgatgatctcgaacactttgtcttcgtgatcccaccctctgaggacatctctctcgacgagaaaaaagagatggagatagagagtgacttcttggccactactaacacaaccaaggctcaggaagagcaaacctcttctagtaaaggaggtaaacaaaagatgaaggagaagatagaccaggtgtttgagatacagaaagataagcggcatatggccctcaaccgtaaggtgttgtcaggggaacccgcaggaaccatttcacagctctccgataccgacctggacaacttcaacggtcagcatagccaggagaagttcacccgcctgaaccacttcagatggatcgtccctgcgaatggagaagtgacccttcaggtccatttcagctcggatgaattcggaaactttgaccagacattcaatttcgaaattttgggcacgtgttgtcaataccagctgtactgccgcggaatctgcacatacccctacatctgccaggaccctaaggttgtgtttcctcaacgtaagatggacatgaagactaacgaagtgatattcaagaaatacgtgatgagcactgaaacttactattttggcccattgctgtgtggcaagtccagggacaaatacaaaagttctttgttcccgggtaacatggagacgttaaccattctgaacacctcgcttatggtggtcgaggccagcttctacttccaaaatgacgtcaaggcaaatacctatttcttggagccgaacaccatggtcttgaaaccaaacgagaagcaaatcctcaacgtttgggcctatcccacatctgtaggcgtgttcgaagactctattgtttgttgtattaatgataatcccgaacctgcgattttccaactgtcctgccagggaatcaggccagagctggagttagagcctcgtcagttgcacttcgatcgactgctgctccatcggcaggagagcagagttgttctgctgcggaatgtgacactgctccctgttgcctggcgtatcacttctctggaacacctgggggatgacttcacagtcagcctaatgcagggtactattcctcctgaagccgagtacggcttgcacctttacttccaaccgacgaagcctgtgaatatcaaaaaggccatcagattggaggtactagatgcagagaacctgttgggtgtggtgcagatcgagaatatcatggttttcgccgaggcctacgacatcgcacttgacatcaccttcccaaaaggagccgaaggggggctcgatttcgggatcgtccgcgtcactgaggaagccaaacagcccctgcaattaaaaaacagaggtaagtacgagatcgccttcagttttagtgtagactcagtgggaatctctacgccaaacataaattcaatgatatccgtccagcccaaaaagggctccctaacgccaactgagaagcctacaaacgtgcaggttttctttcacgcgaagaaggaagtgaagatcgagcaccagcccgtcctgaggtgtcagattattgaacctaacataagcgagggcggtgaaattatcgcctccatcccaattaaatttagcgcgaacgcagtatacagcaaatacaacatcaccccctcatctgtgattaacttcggcgctcttatctgcggtacccggaaaagtactacttttaccattgagaatcaaggagtgacagactttaagttcgctctgtataagctgacgggggaaagtccaattcaccagaagaaagcagccagtcatgtgagacatgccagaagccgcgagtcagagagtttctacaaaaccggcagttccagagccgcaaaattctccgacaccatccagaaggaggtaacaaccaccggtcaggcccggttcgcacatggcatgttcacagtgtaccccggtttcggcagtatcccatcaggcggtcaacaggtgataaacgttgattgtgtggcagacgcaatgggtaagtgcgaggagtttatcgcaattgatatctccggaagggaccctgccgtacatcccgctggcattctctacacacttctggccgaagcttgcctgcctgcatttgtcacagagaacaacgctcttatctttgaagagcatcaaatttgtaccagcgccaatctgcaccacatcttgcagacaatcgaatcaggaggtctattcgtggaggacgaaaacaaatttattttttgtaatgtgctggtgggccggcaggctaaagctcgatttaagatcagcaacgtagggaaaatcacttgcgacgtgaatattgttgtacgcccaatctcaaataagccctttgcacgtatcgtggatatctttgaggtggaaccttcaaaaatgtgtattgccagccactcacacgcgtttgccaccgtgtccttcacacctcaaattatgcagaactatcagtgcatatttgaagcaactctggacgggcttcctagtactctggcgaagtccagagggttggtgttcgatattgcgggagaaggcaatctgcctcgggtcaccgtcgtgagacccgtgctgcataaccaatatgggaaccccctgctcctttttaagcgactgttactcggccactcggagaagctaccactgatcctgaaaaacaacggcgtcctgccagctcagttgcacgtagatcttcaggacgagctaggtgtcttttccctgaagggccggcccacaacggcgtacatctacattacagaggagaacaagccacacgtcaaagccaaaaaagctcacacagcttctctggtggtgtctcctggagacactgctgagtttgacgtggtcttccattcacaaaaggtaggccggatgaggggcatcattcatctgtccgtgatcaacaaccagtacgaggagacatccatccatatggttggcgagggctacgaagacgacatcacacttgataacatacacggtctggtcgctcccacaagccaggaggatatatcaatatcggagttcacagaaatcattgaagacaatgatatggaagatctcgtagccgccgcactggtcgatcacatacagttcggagactgccatatcggacactcttacaacgctagtttcacagtgactaaccactctcaagtcaacctgattcgctttgaatggcccgtgtctgctacgatcgccttctcgccccagatggggcatctccatcccggttgcgccaaagatattgttgtaacgatgaaaagcgacgtccctattaatctgaagaatatgaggattagatgcaaattgtctcggatcatgttccaactgccagccgaccaggtcccagattgggatgatagaatgcacaccgtaaaatgggtcgacgtccctcggaacatgcccgggacatttacaaccaaaaggaaagttatcgaaactgaccctgagcctgcccatagtgtgctcgaagagaactatcaggagctgcaactgcagatttcagccaacgtagatttcgcgagttatcactgtcaagctcgggatgtgcgctttaaggagaccctggtatatcagacacgggtgttcgagttcgatgtgattaatagtggtagagtgcagctagagttctcttgggttagcgaggacaccagtaaagctgtctcatttgctaagccagatcaccagggatcagcccagaaggatcaactgtcccagggcaccatgcacacaggctccaccctggactccactatggaccactgggcagagggcagcccacagcccttcagtgtggaaccatcaagcggcattgtgcctgtcgggaaaattcaaaaatttaaagtcaagttcagcccccttgacatcggggacttcgagagcaacctgttctgtcagatacctaacctgccacctggggagcagggccccgtgctggtagctaagggtaggtccactctcccaatctgtcattttgacctgaaggactcagactacatctccgggcatcagcggaatcccgaactacgtggctcatcaggcggagcgctggaccccaacacccgcgtgatagagttcactacagtgggtataggcggtaagaacttgagaacatttaccattttgaaccccactaattcaacttacagcttttgctggatcagcgaggaaattgaaagcctgcagaaccctgctgcttttacatgtctgaccgagaagggattcattcatcccgagaagaaagccgagattgtgtttcaattcactcccttccaccttggaattactgagtcttcgtggaccttcttgattcccgaacataatattactgttccgtttcttcttgtggggaagactacggagcctctcatttctttaaacaaatcacacctaaacttctcatcactgttaatcggaagagaggctcgggagacggtacagataatcaacaaagaggagcagggtttcgacttttccttccaagataacagtcgctattccgagggattctcaaatagtctactggtctgtccaatggaagggtggatcccccccctctccaggttcccaattgatatatttttcacgccaaaacaggaaggggatgttaatttcaacctcatttgtaatgtcgagaaaaaggtccaccccgtgaccctcaatgtcaaggccgagggatacacgatgaacgtagagataaaatgcaaagatcgaacgggttctatcacacttctcacgccaaaccagacaaatattatcaatttttacgaggtggaacttaatgagtgtgttcaatgcgagttcaacttcatcaatactgggaaatttacatttagcttccaagcccagctttgcggctccaaaacactactacagtatctggagttttcccctattgattcaaccgtggacgtcgggcagtcggtgcacgctactctgagttttcagccactgaaaaaatgtgtcctgacagatctcgagctaattattaaaatcagccacggaccaacctttatgtgtaatatatccgggtgtgcagtgtctccagctattcacttttccttcaccagttacaattttggaacctgtttcatttaccaggcaggcatgcctccttataagcaaactctggtaataacaaataaagaggagactcctatgtcaatcgactgcctgtataccaacacaacgcatctcgaagtgaattctcgggttgacgtagtcaaaccggggaacaccctcgaaattcccatcaccttctacccgagagagagcattaattatcaagaattgatacccttcgaaatcaacggcctctcacagcaaacagtagagataaaggggaagggtacgaagatgaagatcctggtgctcgatcctgctaaccgcatcgtgaagctcggagctgtgcttcccgggcaggtcgtgaagaggactgtatccattatgaacaactccctggcccagcttacctttaatcagtcaattcttttcaccattcctgaacttcaggaaccaaaagtgttaacacttgcgccattccacaatataacgctaaagccaaaggaggtctgcaagctcgaagtgatcttcgctccgaagaaaagggtgccccctttcagcgaggaagttttcatggaatgcatgggcctattacggcctctgtttttgctgagtggctgttgccaggccttggaaataagcctggatcaggagcatatcccgtttggaccggtcgtctaccagacacaggccactagacggatccttatgatgaataccggtgacgtgggcgccaggttcaagtgggacattaaaaaatttgagccgcatttctcaatttctcccgaggagggatatattacatcgggaatggaggtgtcgtttgaggtcacctatcatcctaccgaggttggcaaagagtccctgtgcaagaatattctttgctacattcaaggaggttcgccactctctctgacccttagcggtgtttgtgtgggcccaccggctgtcaaagaagttgtcaactttacatgccaggtgcgtagcaagcacacacagacgatactgctaagcaatcgcaccaatcagacttggaatcttcaccccatatttgagggagagcattgggagggcccagagtttattaccctggaggcccatcaacagaacaagccgtacgagattacatacagacctcggactatgaatctggagaaccgaaagcaccagggcaccctattttttccattgccagacggcacgggctggctgtacgcccttcacgggacgtctgaattgcctaaggctgtggcaaatatatatagggaggtcccctgcaaaactccgtatacagaactcctgcccataactaactggttgaacaagccacaacggttccgagtgattgtggagatccttaagccggaaaaaccggacctgtccattaccatgaaggggttagactacatcgatgttctgagtgggtcaaaaaaggattacaaactgaattttttctcccacaaggagggaacatacgccgccaaggttatctttcgtaatgaagttactaatgaatttctttactacaacgtgtcatttcgagtcatcccttctgggattattaagactatcgagatggtgactcctgtcaggcaagtagcaagtgcatctatcaaactcgaaaatcctcttccctattctgtaacgttttcaacggaatgtaggatgcccgacatcgcattgccaagtcagttcgttgtcccagcaaactccgagggcactttctccttcgagttccagcctctcaaagcgggcgaaaccttcggtcggttgacgctgcacaacactgatctcggctattaccagtacgagctctacctcaaagccaccccagccctgccagagaagccagttcatttccagacagttttgggcagcagccaaatcatcctggttaagtttattaattatacccggcagcggaccgaatattactgtcgaacagactgcaccgactttcatgctgagaagctgattaacgccgcccccggcggtcaggggggtactgaggcctctgtcgaagttctgttcgaaccaagccaccttggagagacaaaggggattctgatactgagcagcctcgctggcggcgagtatatcatcccactgtttggcatggctctgccacccaagccccaaggaccgttctccatccgggcagggtacagcatcatcattccatttaagaacgtgttttaccacatggtgacgttcagtattatcgtagataaccctgcttttacaattcgcgccggcgaatcagttcggccaaaaaagatcaacaatatcacagtgtcttttgagggtaatccgagtgggtcgaagacccctatcaccacaaaactgaccgtgtcatgtcccccaggcgagggatctgagactggggttaaatgggtatactacctgaaaggaataactctctag

SEQ ID NO: 95751 - DNA, 2223 bp, Artificial Sequence
  derived and/or modified sequence
atgactagtagaaggctggaagagagcatgggtgccgtccagatgggcctggttaatatgtttaaggggtttcagtctaaagttctgcccccgctctctcccaaagtcgtgaccgaggaagaggtgaacagaatgctgacaccgagcgagttccttaaagaaatgagcctaactacagagcagagactggcaaaaaccagactcatgtgcaggccacagataattgagctcctggatatgggggagaccacgcaccagaagttctccggcattgacctggatcaggccttgttccaaccatttccgtctgagatcatattccagaactacacaccctgcgaggtctatgaggtgccgttgatacttcggaacaacgataaaataccaagactggtcaaagtagtcgaagaatctagtccctattttaaggtgatcagtcctaaagacataggacacaaagtggcaccaggtgtgccgagtatcttccggatcctctttacccctgaagagaacaaagattacgctcacaccctaacatgcgtaacagagcgtgagaaattcattgttcctatcaaagcgagaggtgcgcgggccattctcgattttcctgacaagctgaattttagcacatgcccagttaagtactccacacaaaaaatcttgctcgtgcgcaatattggcaacaaaaatgccgttttccatattaaaacctgccgcccctttagtattgagcctgccatcggcaccttaaacgttggagagagtatgcagctcgaagtggagttcgagccgcaatctgtgggcgaccattccggacggctaatcgtatgttacgacacaggagagaaagtgttcgtgagcctgtacggtgccgccatagacatgaatataaggctggacaagaactctttgactatcgaaaaaacctacatctctctggcaaaccagcgcacaattaccatccataatcggagtaatataatcgcacatttcctatggaaggtcttcgcaacacaacaggaggaggacagagagaagtacagagcctgcgatgacctgattaaagaggagaaggacgaaaccgacgaattttttgaagaatgcattacggaccctttgctgagagaacatttgtctgtcctgtccagaactttcgcaaatcagcggcgcctggtacagggagattcaaaattgtttttcaacaacgttttcactgtagagccccttgagggagatgtgtggcccaatagctctgctgaaatcaccgtttacttcaatcctctggaggcaaaactgtatcagcaaacaatctattgtgacattctgggtcgcgaaatacggctaccactaagaatcaaaggtgaaggcatgggtccgaaaatccattttaacttcgagttactggatatcgggaaagtattcactggtagcgcccactgttacgaggccattctttacaacaagggctctattgacgccctgtttaacatgaccccacctacatcagcactgggggcttgtttcgtgttctcacccaaggaggggatcatcgaacccagcggcgtgcaagctatccagatcagcttctcatcaacaatcctggggaacttcgaagaagaattcctcgtcaacgtcaacggttcgcccgaacctgtgaagctcactatcaggggctgtgtcatcggcccaacattccattttaacgtcccggcactgcattttggagatgtgtccttcgcgactcaggaactcagggaccctcaggtgctgatcccattccagcggttcccacataccttgatatgttctctgaacaataccagtctgatacctatgacatacaaactccgcattccaggcgatggcctggggcacaaatccatttcctattgtgagcagcacgttgactacaaacgaccgtcctggacgaaggaagagatctcatctatgaaacctaaagagttcacgatttcaccagactgtggcaccattagaccacagggatttgccgctatacgcgtaactctgtgtagcaacactgttcagaagtacgagttggctctagtggttgatgtggaggggattggtgaggaagtgttggcacttctgatcactgccagtgcccccgaactgtgtaatcggaaagtaatgctgagcgttctgcagtggaagattcatcgtgctaaacgatccctgccacgcgataccgtcgctgtgacatag

SEQ ID NO: 95752 - DNA, 3645 bp, Artificial Sequence
  derived and/or modified sequence
atgactagtaggaggctcgaggaaagcatgggcgccgttcagatggggctggtgaacatgttcaaagggttccaatctaaagttctcccccccctgagtcccaaggttgttacagaggaggaagtgaacaggatgctaactccttccgaattcctgaaagaaatgtccctcaccaccgaacagcgactggcgaagactagattgatgtgtcggccccaaattatagaactgctggacatgggagaaaccacgcatcagaagttctctggaattgacctggatcaggccctgttccagccattccctagcgaaataatcttccagaattacacaccttgtgaggtctatgaggtcccactgatactgcgtaacaatgataagatcccacgactcgtaaaggttgtggaagaaagctcgccttacttcaaagtgatctctcccaaagacatcgggcataaagtggcacctggcgtccccagcatatttcgaattctgtttaccccggaggagaacaaggactacgcgcacacactcacttgtgtcactgaaagagaaaaatttattgtacctatcaaagcaagaggcgccagggccattctcgattttcccgataagctgaacttttccacttgtcctgtcaaatactctacccagaaaattctgctggtcagaaatattggaaacaagaacgccgtctttcatattaagacgtgccgcccgttctctatcgagcccgccatcgggactttgaacgtgggagaatcaatgcagttggaagtggagttcgaacctcagtcagtaggagatcactccggccggctgatagtgtgttacgacactggagaaaaggtattcgtctctctgtacggagctgcaatcgacatgaacattcggttggataagaactctctgacgatcgaaaagacttatatatctctggcaaatcagcggacaatcaccatccataacagaagtaacataattgcccactttctgtggaaggttttcgctactcagcaggaagaggatcgggagaagtatcgggcctgtgacgacctgatcaaagaggagaaagacgagaccgatgagtttttcgaggaatgcataacagatccattgttgcgggaacacctttcagtgctgtcacggacctttgctaatcagcggaggctggtgcaaggcgattctaagctcttctttaataatgtgtttaccgtagagccgcttgaaggcgacgtgtggcccaattcctctgctgagatcacagtgtacttcaacccactggaagcaaagttgtatcagcagacaatatactgtgacattctaggaagagagatcagactgccgcttaggatcaaaggtgaaggaatgggccctaaaattcacttcaacttcgagctgctcgacataggcaaagtcttcaccggatctgctcactgctacgaggctatcctgtacaataaaggtagcatcgatgcgctgttcaacatgactcctccaacttcggcacttggcgcatgtttcgtgttctcgccaaaggaagggattatcgagcctagcggagttcaagctatacagatctcctttagttccacaattctgggcaatttcgaggaagagtttctggtaaacgtgaatggctcccctgaaccagtgaagctcacaatccggggctgtgtcattggtcccaccttccattttaatgtgccagccttgcacttcggcgatgtcagtttcgggtttcctcacacgctgatatgttccctgaataacacttcccttatcccaatgacatataaactgagaatccccggggatggactcggacacaaatctatctcttattgtgaacagcacgtagactataaacggcctagctggactaaggaagaaatctcgagcatgaagcctaaagagtttactatcagtcctgattgtggcaccattcggccccaagggttcgccgccatacgtgttaccctctgtagcaataccgtgcagaagtatgaacttgctctggtggtggacgtcgagggcataggggaggaggtcctggccctactgataacggctagatgtgtcgtcccggccctccaccttgtaaatacagaggtcgatttcgggcactgtttcctcaaatacccgtacgagaaaactttgcagttggcaaatcaggatgacctcccaggattttatgaagtgcaaccacaggtgtgcgaggaggttccaactgtgctattttcttcgccaacaccttcaggagtgatttctcccagcagcacaattcacatccctctggtgcttgaaacgcaggtcaccggcgagcatagatcaactgtctacatttccattttcggttctcaagatcctcctttggtatgtcatctgaaatcagctggtgaggggcccgttatttatgtccatccaaaccaggtggatttcgggaacatctatgtcctgaaagactcatctcgtatcctcaacctgtgcaaccagtcattcatcccagccttcttccaggcccacatggcccacaagaagagtctgtggacaatagagcctaatgaagggatggttccccctgagaccgatgtgcagctggcgcttacagcgaacctgaatgacaccctaacattcaaagactgcgttatactagacattgaaaattcttctacgtaccgcatccctgtgcaagcttcaggtacaggctccaccatcgtgagtgataagcctttcgctccagagctcaacttgggcgctcatttcagtctggacacgcactactatcattttaaactcataaacaaggggaggcggattcagcagcttttttggatgaacgattcctttcgcccccaggcaaagctgtcgaagaaggggcgggtgaagaagggtcacgctcatgtgcaaccccagccatccggttcacaggagccccgtgacccccagtctccagtgtttcatctacacccagccagtatggagctttacccagggcaagcaattgacgtcatcctcgaggggtatagtgccacacctagaaaacccaatagcattctcaaaccggactatcagcccctggccattaaaaacatttcgaccctgccagtgaacctgctgctgtcgacaagcggcccattcttcatctgtgagacggacaaatcactgttgccagccactcctgagcccataaagctggaaattgatgaagagaaaaacctgcttatcaaatttgatccctcctatcgtaacgaccttaataattgggtagcagaggagatccttgccataaaatatgtggagcacccccaaatcgattctctagatctccgcggggaagtccactaccctaacctgtccttcgagacgaaggagcttgacttcggctgtattttgaatgacaccgaactcattagatacgtcacgattacaaactgttccccccttgttgttaagtttagatggtttttcttggtgaacgatgaagaaaatcagatccgattcgtcacactacccaagaagccctactcagcaccagtttcgcagatggagtccattcctgccacatccgaggccgcctcccccccagcaattttggtaaccgtcgaaagccctgagatggacctgaacgattttgttaagtag

SEQ ID NO: 95753 - DNA, 15366 bp, Artificial Sequence
  derived and/or modified sequence
atgaccagccggcggctggaggagagcatgggcgctgtgcagatgggcctggtgaacatgttcaagggcttccagagcaaggtgctgccccccctgagccccaaggtggtgacagaggaggaggtgaacaggatgctgaccccatctgagttcctgaaggagatgagcctgaccacagagcagaggctggccaagacccggctgatgtgccggccccagatcatcgagctgctggacatgggagagaccacccaccagaagttctctggaattgacctggaccaggccctcttccagcccttccccagcgagatcatcttccagaactacaccccctgtgaggtgtatgaggtgcccctcatcctgagaaataatgacaagatcccccggctggtgaaggtggtggaggagagcagcccctacttcaaggtgatcagccccaaggacatcggccacaaggtggcccctggggtgcccagcatcttccgcatcctcttcaccccagaggagaacaaggactatgcccacaccctgacctgtgtgacagagcgggagaagttcatcgtgcccatcaaggcccggggggcccgggccatcctggacttcccagacaagctgaacttcagcacctgccctgtgaagtacagcacccagaagatcctgctggtgaggaacatcggcaacaagaatgctgtgttccacatcaagacctgccggcccttcagcattgaaccagccatcggcaccctgaatgtgggggagagcatgcagctggaggtggagtttgagccccagagcgtgggggaccacagcggccgcctgattgtgtgctatgacaccggggagaaggtgtttgtgtccctgtatggagctgccatcgacatgaacatccggctggacaagaacagcctgaccatcgagaagacctacatcagcctggccaaccagaggaccatcaccatccacaacagaagcaacatcatcgcccacttcctgtggaaggtgtttgccacccagcaggaggaggaccgggagaagtaccgggcctgtgatgacctgatcaaggaggagaaggatgaaacagatgagttctttgaggagtgcatcacagaccccctgctgcgggagcacctgtctgtgctgagcaggacctttgccaaccagaggcggctggtgcagggcgacagcaagctgttcttcaacaacgtgttcaccgtggagcccctggagggagatgtgtggcccaacagcagcgctgagatcaccgtgtacttcaaccccctggaggccaagctgtaccagcagaccatctactgtgacatcctgggccgggagatccggctgcccctgcgcatcaagggggagggcatgggccccaagatccacttcaactttgagctgctggacatcggcaaggtgttcaccggcagcgcccactgctatgaggccatcctgtacaacaagggcagcattgatgccctcttcaacatgaccccacccaccagcgccctgggcgcctgctttgtgttcagccccaaggagggcatcatcgagcccagcggcgtgcaggccatccagatctccttcagcagcaccatcctgggcaactttgaggaggagttcctggtgaatgtgaatggcagccctgagcctgtgaagctgaccatccggggctgtgtgattggccccaccttccacttcaacgtgcctgccctgcactttggagatgtgtcctttggcttcccccacaccctcatctgcagcctgaacaacaccagcctcatccccatgacctacaagctgcgcatccctggagatggcctgggccacaagagcatctcctactgtgagcagcacgtggactacaagaggcccagctggaccaaggaggagatcagctccatgaagcccaaggagttcaccatcagcccagactgtggcaccatccggccccagggctttgctgccatccgggtgaccctgtgcagcaacacagtgcagaagtatgagctggccctggtggtggatgtggagggcatcggggaggaggtgctggccctgctgatcacagcccgctgtgtggtgcctgccctgcacctggtgaacacagaggtggactttggccactgcttcctgaagtacccctatgagaagaccctgcagctggccaaccaggatgacctgcccggcttctatgaggtgcagccccaggtgtgtgaggaggtgcccaccgtgctcttcagcagccccaccccatctggagtcatcagccccagcagcaccatccacatccccctggtgctggagacccaggtgactggagagcacaggagcacagtgtacatcagcatcttcggcagccaggacccccccctggtgtgccacctgaagtctgctggggagggccctgtgatctacgtgcaccccaaccaggtggactttggaaacatctacgtgctgaaggacagcagccgcatcctgaacctgtgcaaccagagcttcatcccagccttcttccaggcccacatggcccacaagaagagcctgtggaccatcgagcccaatgaaggcatggtgcccccagagacagatgtgcagctggccctgacagccaacctgaatgacaccctgaccttcaaggactgtgtgatcctggacatcgagaacagcagcacctaccgcatccctgtgcaggccagcggcaccggcagcaccatcgtgtctgacaagccctttgcccctgagctgaacctgggcgcccacttcagcctggacacccactactaccacttcaagctgatcaacaagggccgccgcatccagcagctgttctggatgaatgacagcttccggccccaggccaagctgagcaagaagggccgggtgaagaagggccacgcccacgtgcagccccagcccagcggcagccaggagccccgggacccccagagccctgtgttccacctgcacccagcctccatggagctgtacccaggccaggccattgatgtgatcctggagggctacagcgccaccccaagaattgtgaaggagaagctggtgtgccacgccatcatcggggcccagaagggcaagagcctggtgatggctgtgaacatcacctgtgaatttgtggcccccctcatccagctgagcaccaagcagctgatctaccgcctggagaagaagcccaacagcatcctgaagccagactaccagcccctggccatcaagaacatcagcaccctgcctgtgaacctgctgctgagcaccagcggccccttcttcatctgtgaaacagacaagagcctgctgcctgccaccccagagcccatcaagctggagattgatgaggagaagaacctgctgatcaagtttgaccccagctacagaaatgacctgaacaactgggtggccgaggagatcctggccatcaagtatgtggagcacccccagattgacagcctggacctgcggggggaggtgcactaccccaacctgagctttgagaccaaggagctggactttggctgcatcctgaatgacacagagctgatccgctacgtgaccatcaccaactgcagccccctggtggtgaagttccgctggttcttcctggtgaatgatgaggagaaccagatccgctttgtgaccctgcccaagaagccctacagcgcccctgtgtcccagatggagagcatcccagccaccagcgaggccgccagccccccagccatcctggtgacagtggagagccctgagatggacctgaatgactttgtgaagacagtgctggtggatgaagatgcccggcctgaggagaaggagctgaggaagaccaaggccagcagcgtcatcagtgatgagatcaagatcagcagcacagaaattgagcgcatctacagcagccagagccaggtggaggaccaggagagcctgcagacctgtgagcagaatgagatgctgagcatcggcatcgaggaggtgtttgacatcctgcccctgtttggagtgctgcagccccacagcagccaccagatctccttcaccttctacggccacgccaacatcatcgcccaggccaaggccctgtgtgaggtggaggagggccccacctatgagatcaccctgaagggggaggccagcctggtgaactacagctttgacaccaaggacatccactacggcctgcagctgtttgaccacgtgacagagcgggagatcaccctgaccaacatgggcaaggtgggctttgagttcaaggtgctgacagaccaccagagcagcccagacaacctgctgcccggggtgcccctcatcctgcctgtgtctggcttcatcagcagccaccaggagcaggtgctgaaggtgtactacctgcccggggtgcctgaggtgttcaagaggagcttccagatccagatcgcccacctggaccctgagaacatcaccctgagcggggagggcatcttcccccagatctgcctggacctgcccaggaacctgacagccaatgagaagtatgagatgttcctgaaccaggccaggaagaacacagacaaggagtacaacaagtgtgagatgctggaccactttgacatcatcacagaggaggtgcctgaagatgagcctgctgaggtgtctgcccacctgcagatggaggtggagcggctgattgtgcagagctatgtgctggagcaccagaagaccaccaccccagaccccatggatgacccctgcttcagccacaggagcaggaggaagctggccaagatccagctgcctgagtacatcctggactttggctacatcatcctgggggaggtgaggacccacatcatcaagatcatcaacaccagccacttccctgtgtccttccacgccgacaagagggtgctgcacgagaccggcttcagcacagagctggacagagtgaagaacctgccccactgtgaaacagagatctttgaggtgcgctttgacccccagggcgccaacctgcctgtgggcagcaaggaggtgatcctgcccatcaaggtggtgggcggccccaccgtgcacatctgcctgcaggccaaggtgaccatccccaccatgaccctgagccggggcaaggtggactttgccaccatccagtgtggccagtgcctggtggagaccatccagctgagcaaccacctgcaggtgccctgtgagtggtttgtgcagagccagaagcctgtggacaagctggagaagcacatgcccaagtacctgcggcagaagctgcgggcagagctgaagcccaagacccgcatctttgagatccagcccatctctggagtgctggaccccggggagaagagcaatgtgcaggtgaagttcatgcccaaggaggagaagttctacagccagaccctggtgttccagatcgcccagagcgcccagaagctgaccctgctggcccggggccagggcctggagccccggctggagttcagccccagcgtgctggacctgggccccctgctgctgtgtgcccctggagatgaagctgaggtgattgtgaagaacccctgcaacttccccatcgagttctacagcctggagtttgaccagcagtacctgattgaggagaagatcctgaggaagctgaagggctatgacagctacaacaccctgctgctgccccccaggaaccctggagagaagctgcccccagagctgtatgagtacttcaaggagatcaagaagagcaaggaggagcagatgagggccaagtacctggagaacctggcccaggagaatgaggaggaggacatcaccagcagtgaccagggcaccagcaacagcaccaagaggaccagcctgagccggggcatctctgtgaccagcaacctggaggagtggcacgccctgctggtggagagcaagacctacctggaggaggaggaggatgaggagagcctggagaagatcatcttccagacagacaagctgcagagcattgacagccacagcatggaggaggtgggggaggtggagaacaaccctgtgtccaaggccatcgcccggcacctgggcatcgacatctctgctgagggccgcctggccaagaacagaaaaggaattgccatcatcatccacggcacccccctgagcggcaagagcgccaatgctgtgtctgtggccaagtactacaatgctgcctgcctgagcattgacagcatcgtgctggaggccgtggccaacagcaacaacatccctggcatccgggcccgggagctgtgcatccgggccgccatcgagcagagcgtgaaggagggggaggaggccgcccaggaggccgctgtgggccagaatgtcatcggccagggccgcctgagcacagacaccctgggcaagctggccagcgagatgaccctggtggcccctgagatcaagccaggcaagtctgtgcggggctctgtggtgatcaccaagagcaaggctgacagccacggcagcggcagccagaagcagcaccacagccaccagagcgagaccccccagatcagcagcagccccctgcccccaggccccatccaccgctggctgtctgtgagccccagcgtgggcggggagaccggcctgatgagctgtgtgctgcctgatgagctgctggtgcagatcctggccgagcgcatccagctgagtgactgctaccggggcgtggtgtttgatggcctggacaccctgtttgcccagaatgctgctgctgccctgctgtgcctgctgaaggccatcggcagccgggagcacatctacatcctgaacatggcccaggactatgctgccatgaaggcccaggagaaggccaagaaggagcaggaggagaggaagcacaagggggccctggagaaggagaaggagcggctgcagaacatggatgaggaggagtatgatgccctgacagaggaggagaagctgacctttgaccggggcatccagcaggccctgcgggagaggaagaagcgggagcaggagcggctggccaaggagatgcaggagaagaagctgcagcaggagctggagcggcagaaggaggaggatgagctgaagagaagagtgaagaagggcaagcagggccccatcaaggaggagccccccatgaagaagagccaggccgccaacaagcaggtgccccccctgaccaaggtggatgtgaagatggagaccatcgagaggaagatctctgtgcgggagcagaccatgtctgagaaggaggagctgaacaagaagaagaggaacatgggagatgtgtccatgcacggcctgcccctggtgcaggaccaggaggacagcgagggggacaacagcaaggaccctgacaagcagctggcccccaagttcaagacctatgagctgaccctgaaggatgtgcagaacatcctgatgtactgggacaggaagcagggcgtgcagctgcccccagctggcatggaggaggcccctcatgagccagatgaccagaggcaggtgcccctgggcggcagaagaggaaggaaggaccgggagcgggagcggctggagaaggagaggacagagaaggagcggctggagcgggagaaggccgagcgggagcggctggagaagctgcgggccctggaggagaggagtgactgggagggggagggggaggaggaccacgagggcaagaaggagaaggacctgggcgtgcccttcctggacatccagaccccagactttgagggcctgtcctggaagcaggccctggagagtgacaagctgcccaagggggagcagatcctggacatcctgggcctgggcgccagcggcccccccatccccccaccagccctcttcagcatcgtgtcctaccctgtgaagaggcctcccctgaccatgacagatgacctggagcactttgtgtttgtgattcctccttctgaggacatcagcctggatgagaagaaggagatggagattgaaagtgacttcctggccaccaccaacaccaccaaggcccaggaggagcagaccagcagcagcaagggcggcaagcagaagatgaaggagaagattgaccaggtgtttgagatccagaaggacaagaggcacatggccctgaacaggaaggtgctgtctggagagcctgctggcaccatcagccagctgagtgacacagacctggacaacttcaacggccagcacagccaggagaagttcacccggctgaaccacttccgctggatcgtgcctgccaatggagaggtgaccctgcaggtgcacttcagcagtgatgaatttggaaactttgaccagaccttcaactttgagatcctgggcacctgctgccagtaccagctgtactgccggggcatctgcacctacccctacatctgccaggaccccaaggtggtgttcccccagaggaagatggacatgaagaccaatgaggtgatcttcaagaagtatgtgatgagcacagagacctactacttcggccccctgctgtgtgggaagagccgggacaagtacaagagcagcctcttccctggcaacatggagaccctgaccatcctgaacaccagcctgatggtggtggaggccagcttctacttccagaatgatgtgaaggccaacacctacttcctggagcccaacaccatggtgctgaagcccaatgagaagcagatcctgaatgtgtgggcctaccccacctctgtgggcgtgtttgaagattccatcgtgtgctgcatcaatgacaaccctgagcccgccatcttccagctgagctgccagggcatccggcctgagctggagctggagccccggcagctgcactttgaccggctgctgctgcaccggcaggagagccgggtggtgctgctgagaaatgtgaccctgctgcctgtggcctggaggatcaccagcctggagcacctgggagatgacttcaccgtgtccctgatgcagggcaccatccccccagaggccgagtatggcctgcacctgtacttccagcccaccaagcctgtgaacatcaagaaggccatccggctggaggtgctggatgctgagaacctgctgggcgtggtgcagatcgagaacatcatggtgtttgctgaggcctatgacatcgccctggacatcaccttccccaagggagctgagggcggcctggactttggaattgtgcgggtgacagaggaggccaagcagcccctgcagctgaagaacagaggcaagtatgagatcgccttctccttctctgtggacagcgtgggcatcagcacccccaacatcaacagcatgatctctgtgcagcccaagaagggcagcctgacccccacagagaagcccaccaacgtgcaggtgttcttccacgccaagaaggaggtgaagattgagcaccagcctgtgctgcgctgccagatcatcgagcccaacatcagcgagggcggggagatcatcgccagcatccccatcaagttcagcgccaatgctgtgtacagcaagtacaacatcacccccagcagcgtcatcaactttggagccctgatctgtggcaccaggaagagcaccaccttcaccatcgagaaccagggcgtgacagacttcaagtttgccctgtacaagctgactggagagagccccatccaccagaagaaggccgccagccacgtgagacatgcccggagccgggagagcgagagcttctacaagacaggcagcagccgggccgccaagttcagtgacaccatccagaaggaggtgaccaccaccggccaggccaggtttgcccacggcatgttcaccgtgtacccaggcttcggcagcatccccagcggcggccagcaggtgatcaacgtggactgtgtggctgatgccatgggcaaatgtgaggagttcatcgccatcgacatcagcggccgggaccctgctgtgcaccctgctggcatcctgtacaccctgctggccgaggcctgcctgcctgcctttgtgacagaaaataatgccctgatctttgaggagcaccagatctgcaccagcgccaacctgcaccacatcctgcagaccattgaaagtggcggcctgtttgtggaggatgagaacaagttcatcttctgcaatgtgctggtgggccggcaggccaaggcccgcttcaagatcagcaatgtgggcaagatcacctgtgatgtgaacatcgtggtgcggcccatcagcaacaagccctttgcccgcatcgtggacatctttgaggtggagcccagcaagatgtgcatcgccagccacagccacgcctttgccaccgtgtccttcaccccccagatcatgcagaactaccagtgcatctttgaggccaccctggatggcctgcccagcaccctggccaagagccggggcctggtgtttgatattgctggggagggcaacctgccccgggtgacagtggtgcggcctgtgctgcacaaccagtatggcaaccccctgctgctcttcaagaggctgctgctgggccacagcgagaagctgcccctcatcctgaagaacaatggagtgctgcctgcccagctgcacgtggacctgcaggatgagctgggcgtcttcagcctgaagggccggcccaccacagcctacatctacatcacagaggagaacaagccccacgtgaaggccaagaaggcccacacagccagcctggtggtgtcccctggggacacagctgagtttgatgtggtgttccacagccagaaggtgggccgcatgaggggcatcatccacctgagcgtcatcaacaaccagtatgaggagaccagcatccacatggtgggggagggctatgaagatgacatcaccctggacaacatccacggcctggtggcccccaccagccaggaggacatcagcatcagcgagttcacagagatcatcgaggacaatgacatggaggacctggtggccgccgccctggtggaccacatccagtttggagactgccacatcggccacagctacaatgccagcttcaccgtgaccaaccacagccaggtgaacctgatccgctttgagtggcctgtgtctgccaccatcgccttcagcccccagatgggccacctgcaccctggctgtgccaaggacatcgtggtgaccatgaagagtgatgtgcccatcaacctgaagaacatgaggatccgctgcaagctgagccgcatcatgttccagctgcctgctgaccaggtgcctgactgggatgacaggatgcacacagtgaagtgggtggatgtgcccaggaacatgcctggcaccttcaccaccaagaggaaggtgattgaaacagatcctgagcccgcccacagcgtgctggaggagaactaccaggagctgcagctgcagatcagcgccaacgtggactttgccagctaccactgccaggccagagatgtgcgcttcaaggagaccctggtgtaccagaccagggtgtttgaatttgatgtgatcaacagcggccgggtgcagctggagttctcctgggtgtctgaggacaccagcaaggctgtgtcctttgccaagccagaccaccagggcagcgcccagaaggaccagctgagccagggcaccatgcacacaggcagcaccctggacagcaccatggaccactgggccgagggcagcccccagcccttctctgtggagcccagcagcggcatcgtgcctgtgggcaagatccagaagttcaaggtgaagttcagccccctggacatcggggactttgagagcaacctcttctgccagatccccaacctgcccccaggagagcagggccctgtgctggtggccaagggccgcagcaccctgcccatctgccactttgacctgaaggacagcgactacatcagcggccaccagagaaatcctgagctgcggggcagcagtggaggagccctggaccccaacaccagggtcatcgagttcaccaccgtgggcattggaggcaagaacctgcggaccttcaccatcctgaaccccaccaacagcacctacagcttctgctggatcagcgaggagattgagagcctgcagaacccagctgccttcacctgcctgacagagaagggcttcatccaccctgagaagaaggccgagatcgtgttccagttcacccccttccacctgggcatcacagagagctcctggaccttcctgatccctgagcacaacatcaccgtgcccttcctgctggtgggcaagaccacagagcccctcatcagcctgaacaagagccacctgaacttcagcagcctgctgattggccgggaggcccgggagaccgtgcagatcatcaacaaggaggagcagggctttgacttctccttccaggacaacagccgctacagcgagggcttcagcaacagcctgctggtgtgccccatggagggctggatcccccccctgagccgcttccccatcgacatcttcttcacccccaagcaggagggagatgtgaacttcaacctgatctgcaatgtggagaagaaggtgcaccctgtgaccctgaatgtgaaggccgagggctacaccatgaatgtggagatcaagtgcaaggacagaacaggcagcatcaccctgctgacccccaaccagaccaacatcatcaacttctatgaggtggagctgaatgaatgtgtgcagtgtgagttcaacttcatcaacacaggcaagttcaccttctccttccaggcccagctgtgtggcagcaagaccctgctgcagtacctggagttcagccccatcgacagcacagtggatgtgggccagagcgtgcacgccaccctgtccttccagcccctgaagaagtgtgtgctgacagacctggagctgatcatcaagatcagccacggccccaccttcatgtgcaacatcagcggctgtgctgtgtccccagccatccacttctccttcaccagctacaactttggcacctgcttcatctaccaggccggcatgccaccctacaagcagaccctggtgatcaccaacaaggaggagacccccatgagcattgactgcctgtacaccaacaccacccacctggaggtgaacagccgggtggatgtggtgaagccaggcaacaccctggagatccccatcaccttctacccccgggagagcatcaactaccaggagctgatcccctttgagatcaatggcctgagccagcagacagtggagatcaagggcaagggcaccaagatgaagatcctggtgctggaccctgccaaccgcatcgtgaagctgggcgctgtgctgcccggccaggtggtgaagaggacagtgtccatcatgaacaacagcctggcccagctgaccttcaaccagagcatcctcttcaccatccctgagctgcaggagcccaaggtgctgaccctggcccccttccacaacatcaccctgaagcccaaggaggtgtgcaagctggaggtgatctttgcccccaagaagagggtgccccccttcagcgaggaggtgttcatggagtgcatgggcctgctgcggcccctcttcctgctgagcggctgctgccaggccctggagatcagcctggaccaggagcacatccccttcggccctgtggtgtaccagacccaggccacccggcgcatcctgatgatgaacacaggagatgtgggcgcccgcttcaagtgggacatcaagaagtttgagccccacttcagcatcagccctgaggagggctacatcaccagcggcatggaggtgtcctttgaggtgacctaccaccccacagaggtgggcaaggagagcctgtgcaagaacatcctgtgctacatccagggcggcagccccctgagcctgaccctgagcggcgtgtgtgtgggccccccagctgtgaaggaggtggtgaacttcacctgccaggtgcgcagcaagcacacccagaccatcctgctgagcaacagaaccaaccagacctggaacctgcaccccatctttgaaggagagcactgggagggccctgagttcatcaccctggaggcccaccagcagaacaagccctatgagatcacctaccggcccaggaccatgaacctggagaacaggaagcaccagggcaccctcttcttccccctgcctgatggcaccggctggctgtatgccctgcacggcaccagcgagctgcccaaggctgtggccaacatctaccgggaggtgccctgcaagaccccctacacagagctgctgcccatcaccaactggctgaacaagccccagcgcttccgggtgattgtggagatcctgaagccagagaagccagacctgagcatcaccatgaagggcctggactacattgatgtgctgagcggcagcaagaaggactacaagctgaacttcttcagccacaaggagggcacctatgctgccaaggtgatcttcagaaatgaggtgaccaatgagttcctgtactacaacgtgtccttccgggtcatccccagcggcatcatcaagaccatcgagatggtgacccctgtgcggcaggtggccagcgccagcatcaagctggagaaccccctgccctacagcgtgaccttcagcacagaatgtaggatgccagacatcgccctgcccagccagtttgtggtgcctgccaacagcgagggcaccttctcctttgagttccagcccctgaaggccggggagaccttcggccgcctgaccctgcacaacacagacctgggctactaccagtatgagctgtacctgaaggccaccccagccctgcctgagaagcctgtgcacttccagacagtgctgggcagcagccagatcatcctggtgaagttcatcaactacacccggcagaggacagagtactactgcaggacagactgcacagacttccacgccgagaagctgatcaatgctgcccctgggggccagggcggcacagaggcctctgtggaggtgctgtttgagcccagccacctgggggagaccaagggcatcctgatcctgagcagcctggccggcggggagtacatcatccccctgtttggcatggccctgccccccaagccccagggccccttcagcatccgggccggctacagcatcatcatccccttcaagaatgtgttctaccacatggtgaccttcagcatcatcgtggacaacccagccttcaccatccgggccggggagagcgtgcggcccaagaagatcaacaacatcaccgtgtcctttgagggcaaccccagcggcagcaagacccccatcaccaccaagctgactgtgtcctgccccccaggagagggcagcgagaccggggtgaagtgggtgtactacctgaagggcatcaccctgtag

SEQ ID NO: 95754 - DNA, 15363 bp, Artificial Sequence
  derived and/or modified sequence
atgaccagccggcggctggaggagagcatgggcgctgtgcagatgggcctggtgaacatgttcaagggcttccagagcaaggtgctgccccccctgagccccaaggtggtgacagaggaggaggtgaacaggatgctgaccccatctgagttcctgaaggagatgagcctgaccacagagcagaggctggccaagacccggctgatgtgccggccccagatcatcgagctgctggacatgggagagaccacccaccagaagttctctggaattgacctggaccaggccctcttccagcccttccccagcgagatcatcttccagaactacaccccctgtgaggtgtatgaggtgcccctcatcctgagaaataatgacaagatcccccggctggtgaaggtggtggaggagagcagcccctacttcaaggtgatcagccccaaggacatcggccacaaggtggcccctggggtgcccagcatcttccgcatcctcttcaccccagaggagaacaaggactatgcccacaccctgacctgtgtgacagagcgggagaagttcatcgtgcccatcaaggcccggggggcccgggccatcctggacttcccagacaagctgaacttcagcacctgccctgtgaagtacagcacccagaagatcctgctggtgaggaacatcggcaacaagaatgctgtgttccacatcaagacctgccggcccttcagcattgaaccagccatcggcaccctgaatgtgggggagagcatgcagctggaggtggagtttgagccccagagcgtgggggaccacagcggccgcctgattgtgtgctatgacaccggggagaaggtgtttgtgtccctgtatggagctgccatcgacatgaacatccggctggacaagaacagcctgaccatcgagaagacctacatcagcctggccaaccagaggaccatcaccatccacaacagaagcaacatcatcgcccacttcctgtggaaggtgtttgccacccagcaggaggaggaccgggagaagtaccgggcctgtgatgacctgatcaaggaggagaaggatgaaacagatgagttctttgaggagtgcatcacagaccccctgctgcgggagcacctgtctgtgctgagcaggacctttgccaaccagaggcggctggtgcagggcgacagcaagctgttcttcaacaacgtgttcaccgtggagcccctggagggagatgtgtggcccaacagcagcgctgagatcaccgtgtacttcaaccccctggaggccaagctgtaccagcagaccatctactgtgacatcctgggccgggagatccggctgcccctgcgcatcaagggggagggcatgggccccaagatccacttcaactttgagctgctggacatcggcaaggtgttcaccggcagcgcccactgctatgaggccatcctgtacaacaagggcagcattgatgccctcttcaacatgaccccacccaccagcgccctgggcgcctgctttgtgttcagccccaaggagggcatcatcgagcccagcggcgtgcaggccatccagatctccttcagcagcaccatcctgggcaactttgaggaggagttcctggtgaatgtgaatggcagccctgagcctgtgaagctgaccatccggggctgtgtgattggccccaccttccacttcaacgtgcctgccctgcactttggagatgtgtcctttggcttcccccacaccctcatctgcagcctgaacaacaccagcctcatccccatgacctacaagctgcgcatccctggagatggcctgggccacaagagcatctcctactgtgagcagcacgtggactacaagaggcccagctggaccaaggaggagatcagctccatgaagcccaaggagttcaccatcagcccagactgtggcaccatccggccccagggctttgctgccatccgggtgaccctgtgcagcaacacagtgcagaagtatgagctggccctggtggtggatgtggagggcatcggggaggaggtgctggccctgctgatcacagcccgctgtgtggtgcctgccctgcacctggtgaacacagaggtggactttggccactgcttcctgaagtacccctatgagaagaccctgcagctggccaaccaggatgacctgcccggcttctatgaggtgcagccccaggtgtgtgaggaggtgcccaccgtgctcttcagcagccccaccccatctggagtcatcagccccagcagcaccatccacatccccctggtgctggagacccaggtgactggagagcacaggagcacagtgtacatcagcatcttcggcagccaggacccccccctggtgtgccacctgaagtctgctggggagggccctgtgatctacgtgcaccccaaccaggtggactttggaaacatctacgtgctgaaggacagcagccgcatcctgaacctgtgcaaccagagcttcatcccagccttcttccaggcccacatggcccacaagaagagcctgtggaccatcgagcccaatgaaggcatggtgcccccagagacagatgtgcagctggccctgacagccaacctgaatgacaccctgaccttcaaggactgtgtgatcctggacatcgagaacagcagcacctaccgcatccctgtgcaggccagcggcaccggcagcaccatcgtgtctgacaagccctttgcccctgagctgaacctgggcgcccacttcagcctggacacccactactaccacttcaagctgatcaacaagggccgccgcatccagcagctgttctggatgaatgacagcttccggccccaggccaagctgagcaagaagggccgggtgaagaagggccacgcccacgtgcagccccagcccagcggcagccaggagccccgggacccccagagccctgtgttccacctgcacccagcctccatggagctgtacccaggccaggccattgatgtgatcctggagggctacagcgccaccccaagaattgtgaaggagaagctggtgtgccacgccatcatcggggcccagaagggcaagagcctggtgatggctgtgaacatcacctgtgaatttgtggcccccctcatccagctgagcaccaagcagctgatctaccgcctggagaagaagcccaacagcatcctgaagccagactaccagcccctggccatcaagaacatcagcaccctgcctgtgaacctgctgctgagcaccagcggccccttcttcatctgtgaaacagacaagagcctgctgcctgccaccccagagcccatcaagctggagattgatgaggagaagaacctgctgatcaagtttgaccccagctacagaaatgacctgaacaactgggtggccgaggagatcctggccatcaagtatgtggagcacccccagattgacagcctggacctgcggggggaggtgcactaccccaacctgagctttgagaccaaggagctggactttggctgcatcctgaatgacacagagctgatccgctacgtgaccatcaccaactgcagccccctggtggtgaagttccgctggttcttcctggtgaatgatgaggagaaccagatccgctttgtgaccctgcccaagaagccctacagcgcccctgtgtcccagatggagagcatcccagccaccagcgaggccgccagccccccagccatcctggtgacagtggagagccctgagatggacctgaatgactttgtgaagacagtgctggtggatgaagatgcccggcctgaggagaaggagctgaggaagaccaaggccagcagcgtcatcagtgatgtgcgctgccccttccacggggaggagcgcatctacagcagccagagccaggtggaggaccaggagagcctgcagacctgtgagcagaatgagatgctgagcattggaattgaggaggtgtttgacatcctgcccctgtttggagtgctgcagccccacagcagccaccagatctccttcaccttctacggccacgccaacatcatcgcccaggccaaggccctgtgtgaggtggaggagggccccacctatgagatcaccctgaagggggaggccagcctggtgaactacagctttgacaccaaggacatccactacggcctgcagctgtttgaccacgtgacagagcgggagatcaccctgaccaacatgggcaaggtgggctttgagttcaaggtgctgacagaccaccagagcagcccagacaacctgctgcccggggtgcccctcatcctgcctgtgtctggcttcatcagcagccaccaggagcaggtgctgaaggtgtactacctgcccggggtgcctgaggtgttcaagaggagcttccagatccagatcgcccacctggaccctgagaacatcaccctgtctggagagggcatcttcccccagatctgcctggacctgcccaggaacctgacagccaatgagaagtatgagatgttcctgaaccaggccaggaagaacacagacaaggagtacaacaagtgtgagatgctggaccactttgacatcatcacagaggaggtgcctgaagatgagcctgctgaggtgtctgcccacctgcagatggaggtggagcggctcatcgtgcagagctatgtgctggagcaccagaagaccaccaccccagaccccatggatgacccctgcttcagccacaggagcaggaggaagctggccaagatccagctgcctgagtacatcctggactttggctacatcatcctgggggaggtgaggacccacatcatcaagatcatcaacaccagccacttccctgtgtccttccacgccgacaagagggtgctgcatgaaacaggcttcagcacagagctggacagagtgaagaacctgccccactgtgaaacagagatctttgaggtgcgctttgacccccagggcgccaacctgcctgtgggcagcaaggaggtgatcctgcccatcaaggtggtgggcggccccaccgtgcacatctgcctgcaggccaaggtgaccatccccaccatgaccctgagccggggcaaggtggactttgccaccatccagtgtggccagtgcctggtggagaccatccagctgagcaaccacctgcaggtgccctgtgagtggtttgtgcagagccagaagcctgtggacaagctggagaagcacatgcccaagtacctgcggcagaagctgcgggcagagctgaagcccaagacccgcatctttgagatccagcccatcagcggcgtgctggaccctggagagaagagcaatgtgcaggtgaagttcatgcccaaggaggagaagttctacagccagaccctggtgttccagatcgcccagagcgcccagaagctgaccctgctggcccggggccagggcctggagccccggctggagttcagccccagcgtgctggacctgggccccctgctgctgtgtgcccctggagatgaggccgaggtgattgtgaagaacccctgcaacttccccatcgagttctacagcctggagtttgaccagcagtacctgattgaggagaagatcctgaggaagctgaagggctatgacagctacaacaccctgctgctgcccccaagaaatcctggagagaagctgcccccagagctgtatgagtacttcaaggagatcaagaagagcaaggaggagcagatgagggccaagtacctggagaacctggcccaggagaatgaggaggaggacatcaccagcagtgaccagggcaccagcaacagcaccaagaggaccagcctgagccggggcatctctgtgaccagcaacctggaggagtggcacgccctgctggtggagagcaagacctacctggaggaggaggaggatgaggagagcctggagaagatcatcttccagacagacaagctgcagagcattgacagccacagcatggaggaggtgggggaggtggagaacaaccctgtgtccaaggccatcgcccggcacctgggcatcgacatctctgctgagggccgcctggccaagaacaggaagggcatcgccatcatcatccacggcacccccctgagcggcaagagcgccaatgctgtgtctgtggccaagtactacaatgctgcctgcctgagcattgacagcatcgtgctggaggccgtggccaacagcaacaacatccctggcatccgggcccgggagctgtgcatccgggccgccatcgagcagagcgtgaaggagggggaggaggccgcccaggaggccgctgtgggccagaatgtgattggccagggccgcctgagcacagacaccctgggcaagctggccagcgagatgaccctggtggcccctgagatcaagccaggcaagtctgtgcggggctctgtggtgatcaccaagagcaaggctgacagccacggcagcggcagccagaagcagcaccacagccaccagagcgagaccccccagatcagcagcagccccctgcccccaggccccatccaccgctggctgtctgtgagccccagcgtgggcggggagaccggcctgatgagctgtgtgctgcctgatgagctgctggtgcagatcctggccgagcgcatccagctgagtgactgctacagaggagtggtgtttgatggcctggacaccctgtttgcccagaatgctgctgctgccctgctgtgcctgctgaaggccatcggcagccgggagcacatctacatcctgaacatggcccaggactatgctgccatgaaggcccaggagaaggccaagaaggagcaggaggagaggaagcacaagggggccctggagaaggagaaggagcggctgcagaacatggatgaggaggagtatgatgccctgacagaggaggagaagctgacctttgaccggggcatccagcaggccctgcgggagaggaagaagcgggagcaggagcggctggccaaggagatgcaggagaagaagctgcagcaggagctggagcggcagaaggaggaggatgagctgaagagaagagtgaagaagggcaagcagggccccatcaaggaggagccccccatgaagaagagccaggccgccaacaagcaggtgccccccctgaccaaggtggatgtgaagatggagaccattgaaaggaagatctctgtgcgggagcagaccatgtctgagaaggaggagctgaacaagaagaagaggaacatgggagatgtgtccatgcacggcctgcccctggtgcaggaccaggaggacagcgagggggacaacagcaaggaccctgacaagcagctggcccccaagttcaagacctatgagctgaccctgaaggatgtgcagaacatcctgatgtactgggacaggaagcagggcgtgcagctgcccccagctggcatggaggaggcccctcatgagccagatgaccagaggcaggtgcccctgggcggccggcggggcaggaaggaccgggagcgggagcggctggagaaggagaggacagagaaggagcggctggagcgggagaaggccgagcgggagcggctggagaagctgcgggccctggaggagaggagtgactgggagggggagggggaggaggaccacgagggcaagaaggagaaggacctgggcgtgcccttcctggacatccagaccccagactttgagggcctgtcctggaagcaggccctggagagtgacaagctgcccaagggggagcagatcctggacatcctgggcctgggcgccagcggcccccccatccccccaccagccctcttcagcatcgtgtcctaccctgtgaagaggcctcccctgaccatgacagatgacctggagcactttgtgtttgtgatccccccatctgaggacatcagcctggatgagaagaaggagatggagattgaaagtgacttcctggccaccaccaacaccaccaaggcccaggaggagcagaccagcagcagcaaaggaggcaagcagaagatgaaggagaagattgaccaggtgtttgagatccagaaggacaagaggcacatggccctgaacaggaaggtgctgagcggggagcccgccggcaccatcagccagctgagtgacacagacctggacaacttcaacggccagcacagccaggagaagttcacccggctgaaccacttccgctggatcgtgcctgccaacggggaggtgaccctgcaggtgcacttcagcagtgatgaatttggaaactttgaccagaccttcaactttgagatcctgggcacctgctgccagtaccagctgtactgccggggcatctgcacctacccctacatctgccaggaccccaaggtggtgttcccccagaggaagatggacatgaagaccaatgaagtcatcttcaagaagtatgtgatgagcacagagacctactacttcggccccctgctgtgtgggaagagccgggacaagtacaagagcagcctcttccctggcaacatggagaccctgaccatcctgaacaccagcctgatggtggtggaggccagcttctacttccagaatgatgtgaaggccaacacctacttcctggagcccaacaccatggtgctgaagcccaatgagaagcagatcctgaatgtgtgggcctaccccacctctgtgggcgtgtttgaggacagcatcgtgtgctgcatcaatgacaaccctgagcccgccatcttccagctgagctgccagggcatccggcctgagctggagctggagccccggcagctgcactttgaccggctgctgctgcaccggcaggagagccgggtggtgctgctgagaaatgtgaccctgctgcctgtggcctggaggatcaccagcctggagcacctgggagatgacttcaccgtgtccctgatgcagggcaccatccccccagaggccgagtatggcctgcacctgtacttccagcccaccaagcctgtgaacatcaagaaggccatccggctggaggtgctggatgctgagaacctgctgggcgtggtgcagatcgagaacatcatggtgtttgctgaggcctatgacatcgccctggacatcaccttccccaagggagctgagggcggcctggactttggcatcgtgcgggtgacagaggaggccaagcagcccctgcagctgaagaacagaggcaagtatgaaattgccttctccttctctgtggacagcgtgggcatcagcacccccaacatcaacagcatgatctctgtgcagcccaagaagggcagcctgacccccacagagaagcccaccaacgtgcaggtgttcttccacgccaagaaggaggtgaagattgagcaccagcctgtgctgcgctgccagatcatcgagcccaacatcagcgagggcggggagatcatcgccagcatccccatcaagttcagcgccaatgctgtgtacagcaagtacaacatcacccccagcagcgtcatcaactttggagccctgatctgtggcaccaggaagagcaccaccttcaccatcgagaaccagggcgtgacagacttcaagtttgccctgtacaagctgaccggggagagccccatccaccagaagaaggccgccagccacgtgagacatgcccggagccgggagagcgagagcttctacaagacaggcagcagcagagctgccaagttcagtgacaccatccagaaggaggtgaccaccaccggccaggccaggtttgcccacggcatgttcaccgtgtacccaggcttcggcagcatccccagcggcggccagcaggtgatcaacgtggactgtgtggctgatgccatgggcaaatgtgaggagttcatcgccatcgacatcagcggccgggaccctgctgtgcaccctgctggcatcctgtacaccctgctggccgaggcctgcctgcctgcctttgtgacagagaacaatgccctgatctttgaggagcaccagatctgcaccagcgccaacctgcaccacatcctgcagaccatcgagagcggcggcctgtttgtggaggatgagaacaagttcatcttctgcaatgtgctggtgggccggcaggccaaggcccgcttcaagatcagcaatgtgggcaagatcacctgtgatgtgaacatcgtggtgcggcccatcagcaacaagccctttgccagaattgtggacatctttgaggtggagcccagcaagatgtgcatcgccagccacagccacgcctttgccaccgtgtccttcaccccccagatcatgcagaactaccagtgcatctttgaggccaccctggatggcctgcccagcaccctggccaagagccggggcctggtgtttgatattgctggggagggcaacctgccccgggtgacagtggtgcggcctgtgctgcacaaccagtatggcaaccccctgctgctcttcaagaggctgctgctgggccacagcgagaagctgcccctcatcctgaagaacaacggggtgctgcctgcccagctgcacgtggacctgcaggatgagctgggcgtcttcagcctgaagggccggcccaccacagcctacatctacatcacagaggagaacaagccccacgtgaaggccaagaaggcccacacagccagcctggtggtgtcccctggggacacagctgagtttgatgtggtgttccacagccagaaggtgggccgcatgaggggcatcatccacctgagcgtcatcaacaaccagtatgaggagaccagcatccacatggtgggggagggctatgaagatgacatcaccctggacaacatccacggcctggtggcccccaccagccaggaggacatcagcatcagcgagttcacagagatcattgaagataatgacatggaggacctggtggccgccgccctggtggaccacatccagtttggagactgccacatcggccacagctacaatgccagcttcaccgtgaccaaccacagccaggtgaacctgatccgctttgagtggcctgtgtctgccaccatcgccttcagcccccagatgggccacctgcaccctggctgtgccaaggacatcgtggtgaccatgaagagtgatgtgcccatcaacctgaagaacatgaggatccgctgcaagctgagccgcatcatgttccagctgcctgctgaccaggtgcctgactgggatgacaggatgcacacagtgaagtgggtggatgtgcccaggaacatgcctggcaccttcaccaccaagaggaaggtgattgaaacagatcctgagcccgcccacagcgtgctggaggagaactaccaggagctgcagctgcagatcagcgccaacgtggactttgccagctaccactgccaggccagagatgtgcgcttcaaggagaccctggtgtaccagaccagggtgtttgaatttgatgtgatcaacagcggccgggtgcagctggagttctcctgggtgtctgaggacaccagcaaggctgtgtcctttgccaagccagaccaccagggcagcgcccagaaggaccagctgagccagggcaccatgcacacaggcagcaccctggacagcaccatggaccactgggccgagggcagcccccagcccttctctgtggagcccagcagcggcatcgtgcctgtgggcaagatccagaagttcaaggtgaagttcagccccctggacattggagactttgagagcaacctcttctgccagatccccaacctgcccccaggagagcagggccctgtgctggtggccaagggccgcagcaccctgcccatctgccactttgacctgaaggacagcgactacatcagcggccaccagaggaaccctgagctgcggggcagcagcggcggggccctggaccccaacaccagggtgattgagttcaccaccgtgggcatcggcggcaagaacctgcggaccttcaccatcctgaaccccaccaacagcacctacagcttctgctggatcagcgaggagattgagagcctgcagaacccagctgccttcacctgcctgacagagaagggcttcatccaccctgagaagaaggccgagatcgtgttccagttcacccccttccacctgggcatcacagagagctcctggaccttcctgatccctgagcacaacatcaccgtgcccttcctgctggtgggcaagaccacagagcccctcatcagcctgaacaagagccacctgaacttcagcagcctgctgattggccgggaggcccgggagaccgtgcagatcatcaacaaggaggagcagggctttgacttctccttccaggacaacagccgctacagcgagggcttcagcaacagcctgctggtgtgccccatggagggctggatcccccccctgagccgcttccccatcgacatcttcttcacccccaagcaggagggagatgtgaacttcaacctgatctgcaatgtggagaagaaggtgcaccctgtgaccctgaatgtgaaggccgagggctacaccatgaatgtggagatcaagtgcaaggacagaacaggcagcatcaccctgctgacccccaaccagaccaacatcatcaacttctatgaggtggagctgaatgaatgtgtgcagtgtgagttcaacttcatcaacacaggcaagttcaccttctccttccaggcccagctgtgtggcagcaagaccctgctgcagtacctggagttcagccccatcgacagcacagtggatgtgggccagagcgtgcacgccaccctgtccttccagcccctgaagaagtgtgtgctgacagacctggagctgatcatcaagatcagccacggccccaccttcatgtgcaacatcagcggctgtgctgtgtccccagccatccacttctccttcaccagctacaactttggcacctgcttcatctaccaggccggcatgccaccctacaagcagaccctggtgatcaccaacaaggaggagacccccatgagcattgactgcctgtacaccaacaccacccacctggaggtgaacagccgggtggatgtggtgaagccaggcaacaccctggagatccccatcaccttctacccccgggagagcatcaactaccaggagctgatcccctttgagatcaatggcctgagccagcagacagtggagatcaagggcaagggcaccaagatgaagatcctggtgctggaccctgccaacagaattgtgaagctgggcgctgtgctgcccggccaggtggtgaagaggacagtgtccatcatgaacaacagcctggcccagctgaccttcaaccagagcatcctcttcaccatccctgagctgcaggagcccaaggtgctgaccctggcccccttccacaacatcaccctgaagcccaaggaggtgtgcaagctggaggtgatctttgcccccaagaagagggtgccccccttcagcgaggaggtgttcatggagtgcatgggcctgctgcggcccctcttcctgctgagcggctgctgccaggccctggagatcagcctggaccaggagcacatcccctttggacctgtggtgtaccagacccaggccacccggcgcatcctgatgatgaacacaggagatgtgggcgcccgcttcaagtgggacatcaagaagtttgagccccacttcagcatcagccctgaggagggctacatcaccagcggcatggaggtgtcctttgaggtgacctaccaccccacagaggtgggcaaggagagcctgtgcaagaacatcctgtgctacatccagggcggcagccccctgagcctgaccctgtctggagtgtgtgtgggccccccagctgtgaaggaggtggtgaacttcacctgccaggtgcgcagcaagcacacccagaccatcctgctgagcaacagaaccaaccagacctggaacctgcaccccatctttgaaggagagcactgggagggccctgagttcatcaccctggaggcccaccagcagaacaagccctatgagatcacctaccggcccaggaccatgaacctggagaacaggaagcaccagggcaccctcttcttccccctgcctgatggcaccggctggctgtatgccctgcacggcaccagcgagctgcccaaggctgtggccaacatctaccgggaggtgccctgcaagaccccctacacagagctgctgcccatcaccaactggctgaacaagccccagcgcttccgggtcatcgtggagatcctgaagccagagaagccagacctgagcatcaccatgaagggcctggactacattgatgtgctgagcggcagcaagaaggactacaagctgaacttcttcagccacaaggagggcacctacgccgccaaggtgatcttcagaaatgaggtgaccaatgagttcctgtactacaacgtgtccttccgggtcatccccagcggcatcatcaagaccatcgagatggtgacccctgtgcggcaggtggccagcgccagcatcaagctggagaaccccctgccctacagcgtgaccttcagcacagagtgcaggatgccagacatcgccctgcccagccagtttgtggtgcctgccaacagcgagggcaccttctcctttgagttccagcccctgaaggccggggagaccttcggccgcctgaccctgcacaacacagacctgggctactaccagtatgagctgtacctgaaggccaccccagccctgcctgagaagcctgtgcacttccagacagtgctgggcagcagccagatcatcctggtgaagttcatcaactacacccggcagaggacagagtactactgcaggacagactgcacagacttccacgccgagaagctgatcaatgctgcccctgggggccagggcggcacagaggcctctgtggaggtgctgtttgagcccagccacctgggggagaccaagggcatcctgatcctgagcagcctggccggcggggagtacatcatccccctgtttggcatggccctgccccccaagccccagggccccttcagcatccgggccggctacagcatcatcatccccttcaagaatgtgttctaccacatggtgaccttcagcatcatcgtggacaacccagccttcaccatccgggccggggagagcgtgcggcccaagaagatcaacaacatcaccgtgtcctttgagggcaaccccagcggcagcaagacccccatcaccaccaagctgactgtgtcctgccccccaggagagggcagcgagactggagtgaagtgggtgtactacctgaagggcatcaccctgtag

SEQ ID NO: 95755 - DNA, 2223 bp, Artificial Sequence
  derived and/or modified sequence
atgaccagccggcggctggaggagagcatgggcgctgtgcagatgggcctggtgaacatgttcaagggcttccagagcaaggtgctgccccccctgagccccaaggtggtgacagaggaggaggtgaacaggatgctgaccccatctgagttcctgaaggagatgagcctgaccacagagcagaggctggccaagacccggctgatgtgccggccccagatcatcgagctgctggacatgggagagaccacccaccagaagttctctggaattgacctggaccaggccctcttccagcccttccccagcgagatcatcttccagaactacaccccctgtgaggtgtatgaggtgcccctcatcctgagaaataatgacaagatcccccggctggtgaaggtggtggaggagagcagcccctacttcaaggtgatcagccccaaggacatcggccacaaggtggcccctggggtgcccagcatcttccgcatcctcttcaccccagaggagaacaaggactatgcccacaccctgacctgtgtgacagagcgggagaagttcatcgtgcccatcaaggcccggggggcccgggccatcctggacttcccagacaagctgaacttcagcacctgccctgtgaagtacagcacccagaagatcctgctggtgaggaacatcggcaacaagaatgctgtgttccacatcaagacctgccggcccttcagcattgaaccagccatcggcaccctgaatgtgggggagagcatgcagctggaggtggagtttgagccccagagcgtgggggaccacagcggccgcctgattgtgtgctatgacaccggggagaaggtgtttgtgtccctgtatggagctgccatcgacatgaacatccggctggacaagaacagcctgaccatcgagaagacctacatcagcctggccaaccagaggaccatcaccatccacaacagaagcaacatcatcgcccacttcctgtggaaggtgtttgccacccagcaggaggaggaccgggagaagtaccgggcctgtgatgacctgatcaaggaggagaaggatgaaacagatgagttctttgaggagtgcatcacagaccccctgctgcgggagcacctgtctgtgctgagcaggacctttgccaaccagaggcggctggtgcagggcgacagcaagctgttcttcaacaacgtgttcaccgtggagcccctggagggagatgtgtggcccaacagcagcgctgagatcaccgtgtacttcaaccccctggaggccaagctgtaccagcagaccatctactgtgacatcctgggccgggagatccggctgcccctgcgcatcaagggggagggcatgggccccaagatccacttcaactttgagctgctggacatcggcaaggtgttcaccggcagcgcccactgctatgaggccatcctgtacaacaagggcagcattgatgccctcttcaacatgaccccacccaccagcgccctgggcgcctgctttgtgttcagccccaaggagggcatcatcgagcccagcggcgtgcaggccatccagatctccttcagcagcaccatcctgggcaactttgaggaggagttcctggtgaatgtgaatggcagccctgagcctgtgaagctgaccatccggggctgtgtgattggccccaccttccacttcaacgtgcctgccctgcactttggagatgtgtcctttgccacccaggagctgcgggacccccaggtgctgatccccttccagcgcttcccccacaccctcatctgcagcctgaacaacaccagcctcatccccatgacctacaagctgcgcatccctggagatggcctgggccacaagagcatctcctactgtgagcagcacgtggactacaagaggcccagctggaccaaggaggagatcagctccatgaagcccaaggagttcaccatcagcccagactgtggcaccatccggccccagggctttgctgccatccgggtgaccctgtgcagcaacacagtgcagaagtatgagctggccctggtggtggatgtggagggcattggagaggaggtgctggccctgctgatcacagccagcgcccctgagctgtgcaacaggaaggtgatgctgtctgtgctgcagtggaagatccaccgggccaagaggagcctgccccgggacacagtggccgtgacctag

SEQ ID NO: 95756 - DNA, 3645 bp, Artificial Sequence
  derived and/or modified sequence
atgaccagccggcggctggaggagagcatgggcgctgtgcagatgggcctggtgaacatgttcaagggcttccagagcaaggtgctgccccccctgagccccaaggtggtgacagaggaggaggtgaacaggatgctgaccccatctgagttcctgaaggagatgagcctgaccacagagcagaggctggccaagacccggctgatgtgccggccccagatcatcgagctgctggacatgggagagaccacccaccagaagttctctggaattgacctggaccaggccctcttccagcccttccccagcgagatcatcttccagaactacaccccctgtgaggtgtatgaggtgcccctcatcctgagaaataatgacaagatcccccggctggtgaaggtggtggaggagagcagcccctacttcaaggtgatcagccccaaggacatcggccacaaggtggcccctggggtgcccagcatcttccgcatcctcttcaccccagaggagaacaaggactatgcccacaccctgacctgtgtgacagagcgggagaagttcatcgtgcccatcaaggcccggggggcccgggccatcctggacttcccagacaagctgaacttcagcacctgccctgtgaagtacagcacccagaagatcctgctggtgaggaacatcggcaacaagaatgctgtgttccacatcaagacctgccggcccttcagcattgaaccagccatcggcaccctgaatgtgggggagagcatgcagctggaggtggagtttgagccccagagcgtgggggaccacagcggccgcctgattgtgtgctatgacaccggggagaaggtgtttgtgtccctgtatggagctgccatcgacatgaacatccggctggacaagaacagcctgaccatcgagaagacctacatcagcctggccaaccagaggaccatcaccatccacaacagaagcaacatcatcgcccacttcctgtggaaggtgtttgccacccagcaggaggaggaccgggagaagtaccgggcctgtgatgacctgatcaaggaggagaaggatgaaacagatgagttctttgaggagtgcatcacagaccccctgctgcgggagcacctgtctgtgctgagcaggacctttgccaaccagaggcggctggtgcagggcgacagcaagctgttcttcaacaacgtgttcaccgtggagcccctggagggagatgtgtggcccaacagcagcgctgagatcaccgtgtacttcaaccccctggaggccaagctgtaccagcagaccatctactgtgacatcctgggccgggagatccggctgcccctgcgcatcaagggggagggcatgggccccaagatccacttcaactttgagctgctggacatcggcaaggtgttcaccggcagcgcccactgctatgaggccatcctgtacaacaagggcagcattgatgccctcttcaacatgaccccacccaccagcgccctgggcgcctgctttgtgttcagccccaaggagggcatcatcgagcccagcggcgtgcaggccatccagatctccttcagcagcaccatcctgggcaactttgaggaggagttcctggtgaatgtgaatggcagccctgagcctgtgaagctgaccatccggggctgtgtgattggccccaccttccacttcaacgtgcctgccctgcactttggagatgtgtcctttggcttcccccacaccctcatctgcagcctgaacaacaccagcctcatccccatgacctacaagctgcgcatccctggagatggcctgggccacaagagcatctcctactgtgagcagcacgtggactacaagaggcccagctggaccaaggaggagatcagctccatgaagcccaaggagttcaccatcagcccagactgtggcaccatccggccccagggctttgctgccatccgggtgaccctgtgcagcaacacagtgcagaagtatgagctggccctggtggtggatgtggagggcatcggggaggaggtgctggccctgctgatcacagcccgctgtgtggtgcctgccctgcacctggtgaacacagaggtggactttggccactgcttcctgaagtacccctatgagaagaccctgcagctggccaaccaggatgacctgcccggcttctatgaggtgcagccccaggtgtgtgaggaggtgcccaccgtgctcttcagcagccccaccccatctggagtcatcagccccagcagcaccatccacatccccctggtgctggagacccaggtgactggagagcacaggagcacagtgtacatcagcatcttcggcagccaggacccccccctggtgtgccacctgaagtctgctggggagggccctgtgatctacgtgcaccccaaccaggtggactttggaaacatctacgtgctgaaggacagcagccgcatcctgaacctgtgcaaccagagcttcatcccagccttcttccaggcccacatggcccacaagaagagcctgtggaccatcgagcccaatgaaggcatggtgcccccagagacagatgtgcagctggccctgacagccaacctgaatgacaccctgaccttcaaggactgtgtgatcctggacatcgagaacagcagcacctaccgcatccctgtgcaggccagcggcaccggcagcaccatcgtgtctgacaagccctttgcccctgagctgaacctgggcgcccacttcagcctggacacccactactaccacttcaagctgatcaacaagggccgccgcatccagcagctgttctggatgaatgacagcttccggccccaggccaagctgagcaagaagggccgggtgaagaagggccacgcccacgtgcagccccagcccagcggcagccaggagccccgggacccccagagccctgtgttccacctgcacccagcctccatggagctgtacccaggccaggccattgatgtgatcctggagggctacagcgccacccccaggaagcccaacagcatcctgaagccagactaccagcccctggccatcaagaacatcagcaccctgcctgtgaacctgctgctgagcaccagcggccccttcttcatctgtgaaacagacaagagcctgctgcctgccaccccagagcccatcaagctggagattgatgaggagaagaacctgctgatcaagtttgaccccagctacagaaatgacctgaacaactgggtggccgaggagatcctggccatcaagtatgtggagcacccccagattgacagcctggacctgcggggggaggtgcactaccccaacctgagctttgagaccaaggagctggactttggctgcatcctgaatgacacagagctgatccgctacgtgaccatcaccaactgcagccccctggtggtgaagttccgctggttcttcctggtgaatgatgaggagaaccagatccgctttgtgaccctgcccaagaagccctacagcgcccctgtgtcccagatggagagcatcccagccaccagcgaggccgccagccccccagccatcctggtgacagtggagagccctgagatggacctgaatgactttgtgaagtag

SEQ ID NO: 95757 - DNA, 15366 bp, Artificial Sequence
  derived and/or modified sequence
atgaccagccggcggctggaggagagcatgggcgccgtgcagatgggcctggtcaacatgtttaaagggttccagagtaaggtgttgccacctctttctccgaaggtagtgaccgaggaggaggtcaatagaatgctgacaccatctgagtttttaaaggaaatgagtcttaccacagaacagaggttagccaaaacacgcctgatgtgccgtccccagataatcgagctgctggacatgggcgaaaccacgcaccagaaatttagcgggatagacctggatcaggccctgtttcagccctttccctccgaaatcattttccagaactacaccccatgtgaggtctatgaagttcccctaattttgcggaataacgataagatccctagactggtgaaagttgttgaagagtcctcgccctacttcaaagtgatctcccccaaagacattggacataaagtcgcacccggagtaccaagcattttccgaattttatttacccccgaggaaaacaaagattacgcgcatacgcttacatgcgtgacagagcgggaaaagtttatagtcccgattaaggccagaggcgctcgagctatactggacttccctgacaagttgaacttcagcacctgcccggtcaagtactccacacagaaaatcctgctggtgagaaacataggtaataaaaacgcagtattccacatcaaaacctgtaggcccttttcgattgagccagccatagggacactcaatgtcggggaatccatgcaattggaggtagagttcgagccccagagcgttggtgaccacagtggaagactgatcgtgtgttatgacaccggagagaaagtgttcgtgtccctgtacggggcagccatcgacatgaatattcgcctggacaagaattccttgacaatagagaagacatatataagtttagctaatcagcggactatcacaatacacaataggagtaacataatagcccactttttgtggaaggtgttcgctacccagcaggaagaggatcgagaaaagtaccgtgcttgtgacgacttgattaaagaggagaaggacgaaactgacgagttctttgaggaatgtatcacagatccgctcttgcgggagcacctctctgtgttgagtcgtacttttgcaaatcagaggcggctcgtccagggagactccaaactattcttcaataatgtcttcacagtagaacctctggagggcgacgtgtggcctaatagcagcgccgagatcactgtttactttaaccccctggaagccaagctgtaccagcagaccatctattgtgatatcctgggcagggagatcaggcttcctttgagaattaagggcgagggcatgggccccaaaatccacttcaacttcgagctcctagatatcggaaaagtttttaccggttctgcccactgttacgaggccattttgtataataagggatcaatagacgccctatttaacatgacgcctcctacaagcgctcttggggcgtgtttcgtgtttagcccgaaggaaggtataatcgagccttctggagtacaggctatacagatctctttctcctctaccatattgggcaacttcgaagaagaattcctcgtgaacgtgaatggctcgccagagcccgtgaaacttacgattcgcggatgtgtcattgggccgacttttcacttcaacgttccagcactccatttcggggatgtgtcattcgggtttccgcataccctgatctgttctctcaacaacacctccctgatccctatgacatataagctgcgcattccaggcgacgggctaggacataagagcatctcatactgcgaacagcatgtggattataaacgcccgagttggacaaaagaagaaatatcttctatgaaaccaaaggagttcaccattagccccgactgtggaactataaggccacaaggttttgccgctatccgagtgaccctgtgcagtaacacagtgcagaaatatgagctcgcactggtcgtcgatgtcgagggtattggtgaggaagtgctggccttactgatcacagccagatgtgtagtgccagccctgcacctcgtcaataccgaagtggattttggccattgctttctgaagtatccatacgaaaagaccttgcagttggcgaatcaggatgatttgcccgggttttatgaggtccagccccaggtctgcgaggaagttccaaccgtgttgttcagctcccccaccccaagcggtgtgatttcacctagctcgactatccatatccccctagtgctggagacacaagtaactggagagcaccgcagcaccgtgtatatttccatatttgggtcccaggacccaccactggtgtgccatctaaaatctgccggcgagggtcctgtaatctacgtgcaccccaatcaagtggacttcggcaacatttatgtgctcaaagactcatctagaattctcaatctctgcaatcagtcgtttatcccagccttttttcaggcacatatggctcataaaaagagcctatggaccatcgaacccaacgaaggcatggttccaccagaaactgatgtacagctggccctgacggcaaatcttaacgacacgttaacatttaaagactgcgtgattctggacattgaaaacagctccacctaccgtattccagtgcaggcctccgggaccgggtccacaatcgtctccgacaaaccttttgctcccgagctaaacctcggcgcacattttagcctcgatacccactactaccactttaaactgattaacaagggtagacgaatccagcagttattctggatgaacgattccttcagaccacaggctaaactgagcaaaaaggggagagtcaagaaaggacatgcccacgtgcagccccagccatcaggaagccaggagccccgagacccacagtctcccgtgttccacttgcaccccgcttccatggaactgtaccctgggcaagctatcgacgtcatcctggaaggatatagtgcgaccccgagaattgtcaaggaaaagctggtttgccatgctatcatcggagctcagaagggaaaatcgctggtaatggcagtaaatattacgtgcgagtttgtcgcgccacttatacagctgagcacaaagcagctgatctacagactggagaagaaacccaatagcattctcaagccggattaccagccactcgcaatcaagaacataagcaccttacctgtgaacttgcttttatctacgtccgggccgtttttcatttgtgaaacagataaatcgctgcttccggctacacccgagccaatcaagctggagattgacgaggaaaagaatctgctgatcaaatttgaccctagctacaggaacgatcttaacaactgggtggccgaagagattcttgccatcaagtacgtggaacacccccagattgatagcttggaccttcgcggagaggtgcactacccaaatttgtccttcgaaaccaaagagttagatttcgggtgtattctgaacgatacagagcttattagatatgtgaccatcaccaattgctcacccctggtggtgaaatttcggtggttcttccttgtgaacgatgaggagaaccagattcgcttcgtgacacttcccaagaagccatatagtgccccggtttctcagatggagtccatccctgctactagcgaagcagccagcccgccggccatactggttactgttgagtcgccagagatggacctgaatgattttgtgaagacagtgctggttgacgaggacgctaggccagaagaaaaggagttgcggaagacgaaggccagcagcgtaatctcagatgagatcaagatatccagtacggaaatcgagaggatctatagctcgcagtcacaggtggaagatcaggagtcactgcagacatgcgagcagaatgagatgctcagtattggcattgaggaggtgttcgacatactaccgctgttcggcgttctgcagccccactcctcccaccaaatcagctttaccttctacggccacgcaaacataatcgcacaggcaaaggccctgtgcgaggtcgaagagggcccaacttacgaaattacactgaagggggaggcctcacttgtgaattactctttcgacacaaaagatattcactatggactgcagctttttgatcacgtgaccgagagggaaatcacattgaccaacatggggaaggtggggttcgaattcaaagttctgactgatcatcaatcgagtcccgacaacctgttacctggtgtacccctgattctgccagtctctggattcatttcttcccaccaggagcaagtgctgaaggtgtattatctgcctggtgtacctgaggtgttcaagaggtcctttcagatccagattgcacaccttgatccggagaatatcacgctctcaggggagggcatatttccgcaaatctgtttagacctcccgaggaacctgaccgccaacgagaagtatgaaatgtttcttaatcaggcacgaaagaatacagacaaggagtacaataaatgtgagatgcttgatcactttgacatcattacagaggaggttcccgaggatgaaccggcagaagtcagtgctcatctacagatggaagtcgagagactgatcgtacagtcctacgtgttagagcatcagaagactactaccccagaccccatggacgacccatgtttcagtcaccgctctcgtaggaagctggccaagatacagctgcctgaatatatcttagacttcggttacattatacttggcgaggtacgcacgcacattatcaagattatcaacacgtcccactttccagtgtcttttcacgccgataaaagagttctgcatgagaccgggttttctaccgagctggatcgggtgaaaaacctgcctcactgcgaaactgaaatctttgaagtgagattcgatcctcagggagcgaatttgccagttggctcaaaagaagtgatactccctattaaagttgtgggggggcctacagtgcatatatgtctccaggctaaagtgacaattccaactatgactttaagccgcggcaaagtggactttgccacaatacagtgtggccagtgcctggtggaaaccattcagctgtctaaccacctgcaggtgccttgtgaatggttcgtacagagtcaaaaacctgttgacaaactggagaagcatatgccgaagtatctgcgccaaaaactgcgagctgaactgaagccgaagactcggatatttgagatccagcctatttctggtgtcctggatcctggggagaagtccaatgtgcaagttaaatttatgcctaaggaggagaaattctactcccagacactggtttttcagatcgcccaatcagctcagaaactgaccctcttggccagaggccagggtctggagcccagactggagttcagcccctcggtacttgacctgggccctctgttgctgtgtgctcctggcgacgaggcagaggtgattgtgaaaaacccctgcaactttcccatagagttctatagcctagagtttgatcagcagtaccttatcgaagaaaagatcctcaggaagttaaaggggtacgattcatataacacacttttgctgcctccaaggaacccgggtgagaagctgccccctgagctctacgagtattttaaagagatcaagaaaagtaaggaagaacagatgagagccaagtacctcgaaaatctcgctcaagagaatgaagaggaggacataacatccagcgatcagggcacttccaattctacaaaacggacttcactgagtaggggtattagcgtcaccagtaatcttgaagaatggcatgctttactggttgagtctaagacatacctggaagaggaagaagacgaagaatcactcgagaagattattttccaaactgacaagctgcagtccatcgactctcactctatggaggaggtgggtgaagtggaaaacaacccagtatctaaagcaatcgctagacatctgggtatcgacatctcagcggagggaaggctcgccaaaaatcgaaagggaattgcaatcattatacatggaacaccactgagtggcaaatccgccaacgctgtttccgtggccaagtactataacgccgcttgtttgtccatcgattctatcgtgcttgaagctgtcgccaactcaaataatatacctgggattcgtgctcgtgagctttgtattcgagctgctatcgagcagagcgtgaaagaaggtgaggaggcagcccaggaggccgcagtcggacagaatgttatagggcaaggtagattgtctacagacacccttgggaagctggcaagtgagatgactctcgtggctcccgaaattaagcccgggaaaagtgtgcggggaagtgtggtgattaccaagtctaaggccgactcacacgggtccggatctcagaaacagcaccatagccaccagtctgagaccccacagatctcgtcctccccactgcctcccggccctatccaccgctggctgtcggtgtctccaagcgttggaggagagacaggcttaatgagctgtgtgctgcccgacgaactgctagtacagattctggctgagcgtattcagcttagcgattgctatcgaggagtcgtgttcgacggcctggatacattgttcgctcagaatgcagcagcagccctcttgtgcttactgaaagcaatcggttctcgagagcatatatacatacttaacatggctcaggactatgcggcgatgaaggctcaagagaaagcaaaaaaagagcaggaggagagaaagcacaagggagccctggagaaggaaaaggaaagactccagaatatggatgaagaggagtacgacgcgttgaccgaagaagagaaactgacctttgaccggggtatccagcaggcactgcgtgagagaaagaaacgggagcaagagcgcttggctaaagagatgcaagagaaaaagctgcagcaggagttggagcggcagaaagaagaagatgagctgaaacgaagggtcaaaaaagggaagcagggcccaattaaagaagagcctccgatgaagaagagccaggccgctaacaagcaggtgcccccattgacaaaagtcgacgtcaaaatggaaactatcgagcgaaagatttcggtgagggaacagacaatgtctgagaaagaagagttgaacaagaagaaaaggaatatgggggacgtttccatgcacgggctgcccctggtccaggatcaagaagacagtgagggtgacaattccaaggaccccgacaagcagctggctcccaaattcaaaacctacgaactgaccctcaaagacgtccagaacatcctgatgtattgggaccgaaaacagggggtacagctgccaccggctggcatggaggaagcaccgcatgaacccgatgatcagaggcaggtacccttaggcgggcggaggggccggaaagatcgagaaagagaaaggcttgaaaaggagagaacggagaaagagcgtctggaacgtgaaaaggctgaacgagaacggttagaaaagcttcgcgctctggaagaacgtagcgattgggaaggcgagggcgaagaagaccacgagggaaagaaagaaaaggacctgggagttcccttcctagacatccagactccagacttcgagggtcttagttggaagcaggcccttgagtccgataaactccctaagggggagcaaatacttgacatcctcggtctgggtgcatctgggcctccgatacccccccccgccttgttctccattgtaagctatcccgtgaagcgtcccccacttaccatgaccgacgatttggaacatttcgtattcgtgatcccaccctccgaggacatcagcctagacgagaaaaaggagatggagattgaatccgatttcctggccacgactaataccacaaaggcccaggaggagcagacgagtagttctaagggggggaaacaaaaaatgaaggagaagatcgaccaggtgttcgagattcagaaggacaagcggcacatggccctgaaccgaaaagtcttgtcaggcgagcctgccgggacaatatctcagctgtctgacacagacttggacaatttcaacggtcagcactctcaggaaaagttcactcgcctcaatcattttaggtggattgttccagcaaacggcgaggtgacactccaggtacattttagctctgacgaatttggtaacttcgaccagacgttcaactttgagatcctgggaacgtgctgtcagtatcagctctactgtcgcggcatctgtacctacccttatatatgccaggaccctaaggtagtcttccctcagcgaaaaatggacatgaagacgaatgaggtcatcttcaaaaagtacgtcatgagtacagagacatactatttcggtccgcttctctgcggaaagtctagagacaagtataagtcctccctgttccccggaaacatggagacattgactatcctgaatactagtctgatggtagtggaggcgtccttttacttccagaatgatgtcaaggccaacacttacttcttggagccgaacactatggtgttgaagccgaacgaaaaacaaatcctgaacgtgtgggcctacccgacttcagttggagtatttgaagattcaattgtctgttgcatcaatgacaaccccgagccagcaatattccagctttcctgtcaaggcataaggccggagctggagttggaacccaggcagctccacttcgaccgactactcctccaccgccaggaatcccgcgtggtactcctccgcaatgtgacattattacctgtggcttggcgcatcaccagtcttgagcacctcggggatgactttacggtgtccctcatgcagggtactatcccacccgaggccgaatacggactgcacctctactttcagcctacaaagcccgtcaatatcaaaaaggctatcaggctcgaagttctagatgctgagaacttgctcggggttgttcagatcgaaaatattatggtgtttgcagaagcgtacgatatagccctcgatatcacatttccaaagggggccgagggcggattagattttgggattgtgagggtgaccgaggaggcaaaacagcctctgcagcttaagaaccggggcaagtacgaaatagctttctctttttcggtggatagtgtgggtattagtacccccaatattaactccatgattagtgttcaacctaagaagggtagtctgacacccacagaaaagcccacaaacgtacaggtgttctttcatgccaagaaggaggtcaaaatagaacaccagcccgtattgagatgtcaaataattgagccaaatatcagcgagggaggcgaaataatagccagcataccaattaaattttccgcaaatgcggtctactctaaatataacattacaccctctagtgtcatcaacttcggcgcccttatttgtggcactcgtaagagcaccacgttcaccattgaaaaccagggggtgaccgatttcaagttcgctctttataagctgacaggcgaatctccaattcaccagaagaaagcagcctcccacgtgcgtcacgcgcgctcaagggagagcgaatcattctataagaccggcagctctcgggctgccaagtttagtgataccatccagaaggaggtaaccacgaccgggcaggcaaggttcgcgcacgggatgtttaccgtatatccaggctttggatcaataccttctgggggacaacaagtaatcaacgtggactgcgtcgccgacgccatgggaaagtgtgaggaatttatcgccattgatatctctggcagagaccccgctgtccatcccgcaggcattctctacacactcctggccgaggcatgccttcctgccttcgttactgaaaataacgccctgatctttgaggagcatcagatttgtacgagcgccaaccttcatcacatactgcagaccatagaaagcggaggcctgtttgtcgaagatgagaataagttcattttctgtaatgtcctggtggggaggcaggctaaagcccgcttcaagatctcaaacgtgggcaagatcacttgcgatgtaaatatcgtggtacgtcctatctcaaataagccttttgccagaattgtcgatatatttgaggtcgagccctccaagatgtgtatcgcatcccactcacacgctttcgctacagtgtcatttacgccccaaatcatgcagaattaccagtgcatcttcgaggcaacccttgatggactccctagcaccttagccaagagcagagggctcgtgttcgacatagccggagaaggaaacctgccaagggttaccgtcgtgagacccgtcttacataaccagtacggcaatcccctgttgctcttcaagaggctgctgcttggccacagtgaaaagctgccgctaattcttaaaaataacggtgtgttgccagctcaactgcacgtggacttacaagacgagctgggcgttttctcacttaaaggcagaccaaccaccgcctatatttatatcaccgaagagaataagccacatgtcaaggctaagaaggctcatacagcaagccttgtggtgagtcccggcgacactgccgagttcgacgtggtcttccactcacaaaaggttggacgcatgcgcggtatcatccacttgtcagtgatcaacaaccaatacgaggaaacttcaatccacatggtgggagaaggttatgaggatgacatcactttggataacatccatggcctcgtggcacctactagccaagaggatatttcaatttctgaattcaccgagatcatcgaagacaacgatatggaagacttagtagcagctgcccttgtggatcacattcagtttggcgattgccatatcggccactcatataacgcctcattcacagtcactaatcactctcaggtgaatttgattcggttcgagtggcccgtaagcgccacaattgcattcagtccacagatggggcacttgcacccaggctgtgctaaggatatcgttgtgaccatgaaaagcgacgtgcctataaatctgaaaaatatgcgcatacgatgcaaactgtcccggatcatgtttcagctgcctgccgaccaagtaccagactgggacgaccgaatgcatacagttaagtgggtagacgttcctcgcaatatgcccgggacatttaccacaaagagaaaggtgattgagacagacccagagccggctcattccgtactggaagagaattatcaagagctccagttgcagatcagcgcaaacgtcgatttcgcatcctaccactgtcaggcccgggatgtgcgctttaaggaaacactggtgtatcaaactagagtgttcgaattcgatgtgatcaactccggccgcgtgcagctggaattctcttgggtatcagaagatacttcaaaggccgtgtcatttgcaaagcctgatcaccagggaagtgcacaaaaagaccagttaagccaagggacaatgcacactgggtcgactcttgattccactatggaccactgggctgagggcagtcctcagcctttctcggtcgagccgtcctcaggcattgttcctgtgggaaaaatacagaagtttaaggtgaagttttcccccctcgacatcggagatttcgagagtaatctattctgccagatccccaacctgcccccgggcgagcagggacctgtgctcgtggcaaagggtaggtcgaccctgccgatctgccactttgatctcaaagatagcgactatatatcagggcaccaaaggaatcctgaactgcgcgggtccagcggcggagctctagatccaaacaccagagtcattgagttcaccacagtgggtatcggcggtaagaaccttcgaacctttacgatcctcaacccaacaaatagcacctacagcttttgttggatctccgaggagatcgagtccctccaaaacccagctgcctttacttgcctgacagaaaagggcttcatccatcctgagaaaaaagccgaaatcgtgtttcagtttactcctttccatctgggcatcacagagtctagctggacttttctgattccagagcataatatcaccgttccttttcttcttgtgggcaagacaactgagcctctcatcagcttgaacaaaagccaccttaacttttcgagcttactcatcggccgagaagcgcgggaaaccgtccagataatcaacaaggaggagcagggatttgatttttccttccaggacaatagcagatactctgagggcttttctaacagcctcctcgtttgtcctatggaggggtggatccctcccctatcaagattccccatcgacattttttttactccaaaacaggaaggcgatgtaaattttaatcttatatgtaatgttgagaagaaagtccatcctgttacacttaatgtgaaagcagaggggtacaccatgaatgttgagattaagtgcaaggaccgcacaggaagcataaccttattgactcccaatcaaacgaacatcataaatttttacgaggtggagttaaatgaatgtgtccaatgtgaattcaattttattaataccggcaagttcacgttttccttccaagctcaactgtgcggatccaagaccctgctccagtatttagaatttagccccattgactccaccgtggacgtaggccagagcgtgcatgccaccctgagtttccagcctttaaagaaatgtgttctgaccgatctggaactcatcattaaaatctcccatggcccgaccttcatgtgcaatatttccggctgcgctgtctcacctgcgatacacttctccttcacgtcctataacttcggaacttgtttcatctatcaggctggaatgcctccttataagcagacactggtcatcactaacaaggaggaaaccccaatgtccattgattgcctctacaccaataccacacacctggaagtcaacagccgcgtggatgtggtgaaaccaggtaacaccctggagatccctatcaccttttaccctcgggagagcattaattatcaggaactgatccctttcgagatcaatggccttagccaacagacagtggaaatcaagggaaaggggacaaagatgaaaatcctcgttctagatcctgctaatcggattgttaagttgggtgccgtgctccccggccaggttgtgaagcgcacagtgagcatcatgaataattccttagcccagctgacctttaaccagagcatactgtttaccatccctgaacttcaggaacctaaggtcttgactttagccccattccataatattaccctaaaaccgaaagaggtctgtaagctcgaagttatctttgcccctaaaaagcgcgtgccaccctttagtgaggaagtctttatggaatgtatggggctgctgaggccacttttcctcctcagtgggtgttgccaggcccttgaaatttcactggaccaagagcacatcccattcgggccagtcgtataccaaacgcaggccacgcgacggatactcatgatgaatactggagacgtgggagcccgcttcaagtgggacatcaagaaatttgagccacatttctcaatttcgccagaggagggctacatcacttccggcatggaagtgagtttcgaagtcacatatcatccaaccgaagtggggaaggagtcactgtgtaagaacatcctatgttacatccaggggggctcccccctgagccttacattatccggcgtttgtgttggaccaccggccgtcaaagaagttgtgaactttacctgccaggtgcggagcaagcacactcagaccatactcctgagcaatcggacaaatcagacctggaacctacatcctatctttgagggggagcactgggaaggtccagagtttatcaccctggaggctcaccagcagaacaaaccttacgaaatcacctacaggccgagaactatgaatctggagaaccggaaacaccagggcaccttatttttcccacttcccgacgggaccggctggctgtacgcactacacgggacttctgagcttcccaaagccgtggccaatatatatagggaggtgccctgcaagaccccttacactgagctccttccgatcaccaattggttaaacaagcctcagaggttcagagtgattgtggagatacttaaacccgaaaagccagacctgagcattacgatgaagggactcgactatattgacgtactgagtggcagcaagaaagattacaaactgaatttcttcagccataaagaagggacctatgcggccaaagtcatctttcggaatgaggtaacaaacgagtttctgtactacaacgtgagctttagggtgatccctagtgggattataaagaccattgagatggttactcctgtccggcaagtggcttcagcctccatcaaactggaaaaccctctgccatactccgtcacctttagtacagagtgtcggatgcccgacatcgccctgccatcacagttcgttgtccctgcgaattctgagggaacatttagctttgagttccagcctctcaaggccggagagacatttggccggttaacattgcataatactgatctgggctactaccagtacgagctgtacttgaaggccacgcccgccctgccagagaagcctgtgcatttccagacagtattaggctccagtcagattatcttagtaaaattcatcaattatactcgccagcgcacggagtattactgccgtacggactgcacagattttcacgctgaaaaactgatcaacgctgctcccggcggccaggggggcaccgaggccagcgtggaggtcctgttcgaaccttctcatcttggggagactaaaggaatcttgatcctcagctcactggccggcggggaatatattattccactcttcggaatggctttgccccctaagcctcaaggaccattttctattagggccggatattcaatcatcattcctttcaagaatgttttttaccacatggtcaccttttctatcatcgttgacaaccctgcctttactatccgggccggcgagtcggtcaggccgaaaaagatcaataatatcaccgtctccttcgaagggaacccttccggctcaaagacacccataactactaagctgaccgtctcctgtccgcctggcgaaggatcagaaaccggggttaaatgggtgtattacttaaaaggaattacactgtag

SEQ ID NO: 95758 - DNA, 15363 bp, Artificial Sequence
  derived and/or modified sequence
atgaccagccggcggctggaggagagcatgggcgccgtgcagatgggtctggtaaatatgttcaagggctttcagtcaaaagtactccccccgctgagccctaaggttgtgaccgaggaggaggtgaatagaatgttgactcctagcgaatttctgaaagagatgagcctgaccaccgagcagcgcctcgcaaaaacaaggctcatgtgtcgaccccagattatcgagctgctggacatgggagaaaccacccatcaaaaattctccggaatagatttggaccaagccctgttccagcccttcccttccgagattatctttcagaactacactccatgcgaagtgtatgaggtacccctcattctgcggaataacgacaaaataccccggttggtcaaggtggtggaggaaagcagcccgtacttcaaagttatttcccccaaggatatcgggcacaaagttgccccaggagtcccatcaatctttcgcatcttatttactcccgaggaaaacaaggattatgctcacacactgacctgtgtgaccgagagagagaagtttattgtgccgataaaagctaggggggccagggcaatcttagacttcccagataaactcaatttcagtacgtgtcctgtgaaatattcaacccaaaagatactactcgtgcgcaacattggaaataagaacgccgtgttccatatcaagacatgccgtcctttcagcatcgaacccgctattggcacattgaacgtcggtgaatccatgcagctggaggtcgaattcgaacctcagtcggtgggcgatcatagcggtcgtttgatcgtctgttacgataccggggagaaagtctttgtatcactctatggtgcagccattgatatgaatatcagattggataaaaacagcctgacaattgaaaagacctacatctcgttggccaaccaacgcactatcactatccacaaccgctccaacatcatagcacacttcctgtggaaggtattcgccacccagcaagaagaagatagagagaaataccgggcctgtgacgatcttataaaagaggaaaaggacgaaactgatgagttcttcgaggagtgtattacagacccattactgcgggagcacctgagcgtgttaagccgcacatttgctaatcagagaagactggtccaaggtgacagtaaacttttcttcaacaatgtcttcacagtggaacctctcgagggagatgtgtggcctaactcttctgccgaaatcacagtttattttaatcctctggaggcaaaactttatcagcagaccatatactgtgacatcttgggaagagaaatcagactgccactgagaattaaaggagaaggcatgggccctaagattcacttcaattttgaactgttggacatcggcaaggtgttcacagggtccgcgcattgttatgaagcaatcctgtataacaaggggtctattgacgcgctcttcaatatgacccctcctacatcggctctgggcgcctgctttgtgttttccccaaaggagggaatcattgaaccttccggagtacaggccattcagatttctttcagtagcactatactcgggaacttcgaggaagagttcctggttaatgtaaacgggtcgcccgagccagtgaagctcacgattagaggatgcgtcataggccctacgtttcactttaacgtgcccgccctgcactttggagatgtcagctttggattcccccataccctgatctgtagcctcaataacacttcactcatcccaatgacatacaaactaaggatccccggcgacgggctaggccacaagtccatctcatactgtgaacagcatgtggactacaagaggccatcttggacaaaggaggaaatcagctctatgaagccaaaggagtttacaattagcccagactgcgggactatcaggcctcagggctttgccgctataagggttaccctgtgttccaatactgtccaaaaatatgagctggccctggtggttgatgttgaaggtattggagaagaagttctggcgctcttaatcactgcgcgctgtgttgtccctgctctgcacctggtgaacacagaggtggacttcggccattgtttcctcaagtatccatatgagaagaccctgcagcttgccaatcaggatgacctcccgggcttttacgaagtgcagcctcaggtctgtgaggaagtgcctacggtgctgttctcctcaccaactcccagcggagtgatctccccctctagcactattcacatacccttggtgctggagacacaggtcactggcgaacatcgttctactgtttatatcagtatattcggatctcaggacccccctctggtctgtcatcttaagtccgcaggagaagggccagtcatctatgtgcacccgaatcaggtagatttcggtaatatctacgtgctgaaagattccagtcgaattctgaatctgtgtaatcagtcttttattcctgcattcttccaggctcatatggctcataaaaaaagcctctggaccatagagccaaatgagggtatggtgccgcccgagaccgatgtacagctggccttgacagccaacttaaacgatacactgacgttcaaggattgtgtgatcttagatattgagaattcatctacttacaggatcccggttcaggcctcgggaacaggatccacgattgtgagtgataagccattcgcacccgagctgaatctgggcgcccatttttctctggacacacattactaccatttcaagcttatcaacaagggccggaggattcagcaactgttttggatgaacgactcttttcgcccacaggcaaaattgagtaagaagggacgggtgaagaaaggtcatgctcatgtgcagccccagccctcaggaagtcaggagccacgagacccacagtctccagtcttccacctccatcccgcctctatggaactgtacccagggcaggccatcgatgtcatcctggagggatacagcgcgacccctcgtattgtgaaggagaagcttgtgtgccacgctatcatcggtgctcagaaggggaagtctctcgttatggctgtgaacatcacctgtgagtttgtggccccgttaatacagttgtcaactaagcagctgatatatcgcctggagaaaaagcctaatagtatccttaaacctgactaccaaccgttggccattaaaaatatcagtacacttccagtcaatttattgctgtcaacttcaggccccttttttatttgcgaaaccgacaaaagcttgttacccgccacacccgagcctatcaaactggagattgatgaagaaaaaaacctcttgatcaagtttgacccctcgtatagaaacgacttgaataactgggtagccgaggagattctggctatcaaatacgtggagcacccccagatcgactctctcgacctccgaggcgaggtacactacccaaacctcagcttcgagaccaaggaattggactttggatgcatcctgaatgatacggaactgattagatacgtcaccatcactaactgctcaccacttgtggtgaagttccggtggttctttttggtgaatgatgaggagaatcaaatccgattcgtgaccttgcccaagaagccgtacagcgcccccgtgagtcagatggagtccatccctgccactagtgaggctgcttctcctcctgctattctagttactgttgaaagcccggaaatggacctcaatgacttcgtcaagaccgtcttggtggatgaggacgcaagacccgaagaaaaggaactcaggaagacaaaggcctcaagtgtgatttcagacgtgcgatgtccattccacggagaagagcggatctacagtagtcagtctcaggtcgaggatcaggagagcctgcagacctgtgaacaaaatgagatgttgtccataggcatagaagaagtctttgatattttgccactgttcggcgtgcttcaaccgcattcaagtcaccagatcagcttcactttttatggacacgccaacattatcgcccaggccaaagccctgtgtgaagtggaagaaggaccaacttatgaaatcacgctgaaaggcgaagcctccctggtcaattactcctttgatactaaggacattcactatggactccaactgtttgatcacgtgacggagcgagaaataacccttaccaatatggggaaagtcggctttgaattcaaagtgcttacagatcatcagtccagtcctgataacctactgcccggcgtgcctctcatcctgcccgtgagtggctttattagttctcaccaggaacaagtgctgaaggtgtactacctccccggggttcccgaggttttcaagcgttcatttcagatacagatcgcacatctcgatccagaaaacatcacattaagcggcgagggcattttccctcagatctgcctggacctgccccgtaatttgacagctaatgagaagtatgagatgttcctgaatcaggccagaaagaataccgataaggagtataacaagtgtgagatgctggatcattttgacatcattacggaagaggtgccagaggacgaacccgcagaggtttccgcccacctccagatggaagtggagagactgatcgtgcaatcttatgtgctagaacaccaaaaaactacgacccccgaccctatggacgatccatgtttctcacaccgatccagacggaaacttgcgaagattcaactcccagagtacattcttgacttcgggtacattatcctgggcgaggtcaggacccacattatcaagatcatcaatacgtcccactttccagtgagctttcatgccgataagcgggtgctgcacgaaaccggcttctcgacagagcttgatcgcgtcaaaaatctaccccactgcgaaaccgaaatcttcgaagttcgcttcgacccccagggcgccaatttgcctgtaggatccaaggaggttatcctgcctatcaaagtcgtcggagggcccacagtgcacatctgtctgcaggccaaggtgacaatcccaaccatgacattaagcagagggaaagttgatttcgccactattcaatgtggacaatgtctcgtagaaactattcagctgagcaatcatcttcaggtcccctgcgaatggtttgtgcagtctcagaaacccgtggacaaactcgagaaacatatgcccaagtaccttcggcagaaactcagagctgaacttaaacctaagacgcgaattttcgaaattcagcccatctcaggggtcctggacccgggcgaaaaatcaaacgttcaggtcaaattcatgccaaaggaagagaaattctattctcagacactggtgttccagattgcccagtcagcgcagaagctcacccttctggctagagggcaaggcctcgagccccggcttgagttctctccttcagtgctagatcttggtccattattgctgtgtgccccaggcgacgaagccgaagtcattgtgaaaaacccttgtaattttccaatagaattttactccttagagttcgaccagcaatacttaatcgaggagaagatccttcggaagctcaaaggttatgacagttacaacaccctgttactgcctcccagaaatcctggggagaagctgcccccagagctgtacgaatacttcaaggagattaaaaagagcaaagaggaacagatgcgagccaagtacctggaaaacctcgcccaggaaaatgaagaggaagatataacttcttctgatcagggcacatccaattcaacaaaacggacctctctgtctcgtgggatctcagtcacctcgaatctagaagagtggcacgccctgctcgtcgagagcaagacctatctggaagaagaggaggacgaggagtcacttgaaaagattattttccaaaccgataaattgcagtctatagacagtcactccatggaggaagttggcgaggtggaaaacaatcctgtcagcaaagcaatcgcacgtcatcttggcattgacattagtgcagaggggcggctggccaaaaaccgcaagggaattgctatcattattcatgggactccactttctggaaagagtgccaatgcagtgagcgtggctaagtattataatgcagcttgtctgtccattgactcaatcgtgctcgaagccgtcgccaacagcaataatattcccggaatccgggcccgagaactttgtattagagcggctattgagcagagcgtcaaggagggggaggaagccgcgcaggaggcagcagtcggtcaaaacgtgatcggacagggtcggctctctacggacacgctcgggaagctggcttctgaaatgaccttagtggcgcccgagatcaagcccggaaaatctgttaggggatctgtggttattacaaagagcaaggccgatagccatggaagtggttcgcagaagcagcatcattctcaccaatctgagactcctcaaatttcctcctctccgctccctcccggcccaattcaccgttggctgagcgtgagccctagcgtcggcggagagacaggtttaatgtcttgtgtcctgcctgacgaactgttggtccagatccttgccgaacggatccagctgtccgactgctacagaggagtggtgtttgacgggttagatacattgttcgcacaaaacgcagcagccgctctcctctgccttttgaaggctattggctctagggagcacatttacatcttaaatatggcacaagactatgctgccatgaaggcccaggagaaggctaagaaggaacaggaggagcgtaagcacaagggcgcgttagaaaaagaaaaagagagacttcagaacatggatgaggaagagtatgacgctctgacggaagaggagaaattaacgtttgatcgcgggatccagcaggccctgcgtgaacgaaaaaagcgggagcaggagaggctagctaaagagatgcaagagaaaaagctgcagcaggaactcgagcgtcagaaggaagaggatgagctgaagagaagagtcaagaaaggaaagcaggggccaatcaaagaagagccccccatgaaaaaatctcaggctgccaataagcaagtgccacctttgacaaaggtggacgtgaaaatggagaccattgagcgtaagatcagcgtgagagagcagactatgtctgagaaggaagaattaaacaagaagaagcggaatatgggcgatgtgtccatgcatgggctgcccctggttcaggaccaggaggacagcgaaggtgacaactcaaaggaccctgataagcagctggccccaaagttcaagacctacgagcttactcttaaggatgtgcagaacatcttaatgtactgggatcggaaacagggagtgcaactcccacctgctggcatggaggaagccccacatgaacccgacgaccagagacaagtgcctctcggtgggcggagagggaggaaggaccgcgagagggagcggctggaaaaagaacgaaccgagaaagaacggctcgagagggagaaagctgagcgtgagaggctggagaagcttcgtgccctcgaggaaaggtcagactgggagggggagggtgaagaggatcacgagggaaagaaagaaaaggacctgggagtgccattcctagacattcagacccccgacttcgagggcctgtcctggaaacaggccctggaaagtgacaagttaccaaaaggggaacagattcttgacatcctaggactgggagctagcggcccccctattccccctccggcattgttctccatcgtgtcttatcctgtgaaaaggcccccgctgaccatgacagatgatctagaacactttgtcttcgtgatacccccaagtgaagatatctccctggacgagaagaaggagatggaaatcgaaagcgattttcttgccaccacaaatactaccaaagcccaggaagaacagacgagctcctctaaagggggcaaacaaaaaatgaaggagaagatcgatcaagtgttcgagattcagaaggacaagcgccacatggctctgaacaggaaagtactcagcggtgaacctgcaggcaccatctctcagttgtctgatacagacctagataattttaatgggcagcatagccaggagaaatttacccggctgaaccactttagatggattgtgcctgctaacggtgaagtcacgctgcaggtccatttcagcagcgatgagtttggtaattttgatcagacattcaactttgagatcttaggaacatgctgtcagtatcaactgtactgcaggggcatttgcacatacccatacatttgccaggatcccaaagtggtctttccccagagaaagatggatatgaaaacgaatgaggtaatttttaagaagtatgtgatgagcactgagacttattattttggaccgctactatgcgggaagtcccgcgataaatacaagtcttctctgtttcctggcaacatggagactttgacaattctgaacacatctttgatggtcgtcgaggcgtcattctacttccaaaacgacgtcaaggcaaatacatattttttggaacccaacacaatggtgttaaaaccaaatgagaagcagattcttaatgtgtgggcctatccaacatctgtaggcgtatttgaagattctattgtgtgctgcattaacgataaccctgaacctgccatttttcagcttagttgtcaaggcattcgtcccgagctcgagttggagcctcgtcagctgcactttgatcggctgctacttcaccgacaggagtctagagttgtgctccttcgcaatgtcacacttcttcccgtggcttggaggattacgtcactggagcatctgggcgatgattttacagtttcacttatgcagggaaccatccccccggaagccgaatacggtctacatttatactttcagccaactaaacctgttaacatcaaaaaagctattcgccttgaggtcctggacgctgagaacctgctcggagtggtccaaatcgaaaacataatggtgttcgcagaagcttacgacattgcccttgacatcacttttcctaagggcgccgaaggggggcttgatttcggcatcgtgagggtgacagaagaggcaaaacagcccctccaattgaagaatcgcggtaaatacgagattgctttctcattcagcgtggattccgttggcattagcactcccaatattaattctatgatttcagtgcaacctaagaagggcagcctcacccccactgaaaagccaacaaacgttcaggtcttcttccacgctaaaaaggaggttaaaattgagcaccagccagtgcttcgctgccagattattgaacctaatatatcagaaggaggcgagatcattgccagcattccgataaaatttagtgccaacgctgtctactcaaaatataacataacgccaagctcagtgataaacttcggagccctcatatgtgggaccagaaagtcaacaacttttacaatcgaaaaccagggggtcacagatttcaagtttgccctttacaagctgaccggcgagagcccaattcaccagaagaaggcagcatcgcacgtgcgccatgctaggtcccgcgaatccgagagcttctacaagacaggcagctctcgcgccgcaaagttctctgataccatccagaaagaagtcaccacaaccgggcaggcccggtttgcacatggcatgtttaccgtttatccagggttcgggagcatcccttccggcggccagcaggtgattaatgtggattgtgtggccgatgcaatgggaaagtgcgaggagtttattgctatcgatatttccggacgcgatcccgccgtccatccagccggcattctgtacactctgctcgccgaggcttgtctgcccgcttttgtgaccgagaacaatgccctaatttttgaggagcaccagatctgcaccagtgctaacttacatcacattttgcagaccattgagagcgggggcctgtttgtcgaggacgaaaataaattcattttttgcaatgtgttggtgggccgacaggctaaagctaggttcaaaatcagcaatgtgggcaagatcacctgtgatgtgaacatagttgtgaggcccatatctaacaagccctttgccagaattgtggatatctttgaggtggagccctccaaaatgtgcatcgccagccacagccacgctttcgccactgtttcatttaccccacaaataatgcagaactatcaatgtattttcgaagcaactctggatgggctcccttcaactcttgccaaatcccgaggccttgtcttcgacatcgcgggtgaaggaaacttgccgcgggtcaccgtagtgagacccgtcctgcataatcagtatggaaacccactgctactttttaagcgtctgctgctcggtcactcggagaagctgcctctgattcttaagaacaatggagtactgccagctcagcttcatgttgacctgcaggatgagcttggggtattttccctgaaaggacgcccgaccactgcatatatttacataacagaggaaaacaagccacatgtgaaagccaagaaggcccataccgcatccctggtggtgtcaccaggagacacagccgagttcgacgttgttttccactcacagaaggtgggcagaatgcgggggattattcatttatcagtgattaacaaccaatacgaggagacgagtattcatatggtcggagagggctatgaggacgatatcaccctggacaacatccacggactggtggcacctaccagccaggaagacatttctatctcagagttcaccgaaattatcgaggacaatgacatggaggaccttgtcgccgcagcgctggttgatcacatccagttcggagactgtcatattggccacagctataatgccagctttacggtcaccaaccatagtcaggttaacctcatccgcttcgaatggccagtctccgctaccatcgcttttagtccccagatgggccacttgcaccccggctgtgccaaggatattgtcgttacaatgaaatcagatgtgccgattaatctgaaaaatatgagaatccgttgcaagctgtctaggattatgttccaactgccagccgatcaggtcccagactgggacgacaggatgcacaccgtgaagtgggtcgacgttcccaggaacatgcctggtacatttaccaccaaacggaaagtcatcgagactgatcctgaaccggcacactcagtgctggaagaaaactaccaggaactccagctgcagatttctgctaatgtagactttgcatcctatcactgccaagcacgggacgtccgatttaaggagacactagtttatcagaccagggtgttcgagtttgacgtcatcaacagcggaagggtccagctggaattttcctgggtttccgaagatacatccaaagccgtgagtttcgctaagcccgaccatcaagggtcagctcagaaagaccagctgtctcagggtaccatgcacaccggaagtaccttagatagcaccatggatcattgggctgagggatcaccacagccattctcagtagaaccatcgtctggtatagtacccgtaggcaagattcagaagtttaaggtgaagttttccccactcgacatcggggattttgagagcaacctgttttgtcagatccctaacctgccccccggggagcagggcccggtgttggtcgctaagggccgttccacgctgcccatctgccactttgatcttaaggattctgattacatcagtgggcatcagcgaaaccccgaattaagaggatcctctggcggtgcgctggaccctaacaccagggttatcgaatttacaacggtcggcattggcggcaaaaaccttagaacgttcactattctcaatcccacgaattccacatattcgttttgttggatctctgaagagattgagagcctgcaaaaccctgcagcttttacctgccttaccgagaagggttttatacatcccgagaaaaaagcggaaatcgtcttccagttcaccccgttccacctggggataaccgagagctcttggacatttttgattcccgaacacaacattaccgtcccattcctgcttgtgggcaaaacaacagaacccctcatctctttgaacaaaagccatcttaatttttctagtctcctgatcggcagggaagccagagaaaccgtccagataatcaacaaggaggaacagggttttgatttcagttttcaagataattcacgctactccgagggtttcagtaattcgctattggtgtgtccaatggaagggtggatcccccccttgtcacgctttccaattgatattttctttaccccaaaacaggagggtgacgtcaacttcaatctaatttgcaacgtggaaaaaaaggtgcatcctgtgacactgaacgtgaaagcagaggggtataccatgaacgtcgagataaagtgtaaggataggaccgggtcaataacattgttgacaccaaatcagaccaacatcattaatttctatgaagtggaacttaacgaatgcgtacagtgcgagttcaatttcatcaacactggaaaattcactttctccttccaggcacagctttgcggctccaaaaccctgttgcagtacctggaattcagcccgatcgatagcacagtcgatgtaggacagagtgtgcacgctactctgagtttccagccgctgaagaagtgcgtgctcacagacctagagttgattatcaagatcagtcacgggccgactttcatgtgcaacattagcgggtgcgcagtttcacccgcaatccacttttccttcacctcctataactttggaacttgctttatttatcaggccggaatgccaccttacaagcagaccttagtgattactaacaaggaggagaccccaatgtccatcgattgcctgtataccaacaccacccatttggaggttaactcccgggtggatgtcgtgaagcccggaaatactctggaaatccctatcacattctaccctcgggaatccattaattatcaggagcttattcctttcgagattaatggcctttcccaacagaccgtggaaatcaaaggcaaaggaacgaaaatgaaaatcctagtgctggatcctgctaacagaatagtaaagctgggggccgttcttcccgggcaggttgtcaagcgcacagtctccatcatgaacaactctctggctcagctaacctttaaccagtccattttgtttaccataccagagttgcaagagccaaaggttctcaccctggctccttttcacaatatcaccctaaagccaaaggaagtttgtaaattggaggttatttttgcccctaagaaacgcgtgccaccattcagcgaggaagtgttcatggagtgcatgggtctgctcaggcctttgtttcttctaagtgggtgctgtcaggccctagagatttctctggaccaggagcacattcctttcggaccggtggtgtatcaaactcaagcaactaggcgcatacttatgatgaacactggcgatgtgggagccaggtttaaatgggacatcaagaagtttgagccccacttttcaatatcccccgaggagggctatattacttccggaatggaggtctcctttgaggtgacctaccatcccacagaagtaggcaaggaatcactgtgcaagaacatcctttgctacatccagggcggtagccctctcagcctgaccctctcaggcgtttgtgtggggcctccggccgtaaaggaggttgtgaacttcacctgtcaggttcgctcaaaacacacccaaacgatcttactgtcgaatcgcaccaaccagacctggaatcttcaccccattttcgagggtgagcactgggagggaccagagttcatcacccttgaggcacatcaacagaacaaaccatatgaaattacctaccggcctcgtacgatgaacctggagaatcgaaaacaccaaggaactctcttttttccccttccagacggtaccgggtggctgtatgctctccatggaacatctgaattaccaaaggccgtggcgaatatctatagagaggtcccctgtaagactccctatacagaattgttaccaatcaccaattggttaaacaagccacaacgtttccgagtaatcgtagagatacttaaacctgaaaagccagatctctcaataaccatgaaagggttggattatatcgatgtcttgtcagggagtaagaaggactacaaattgaattttttttcacacaaagaaggtacttatgctgctaaggtgatttttcgtaacgaggtcactaacgagtttctgtactacaacgtgtcatttcgtgtgatacccagcggtatcattaaaaccatagaaatggtgacccccgtgcgacaggtcgcatccgccagcattaagctggagaatcccttgccatattcggtgactttttccaccgaatgcagaatgcccgatatcgccctcccttctcagtttgtagttcccgctaacagcgagggcacctttagcttcgagttccaaccgctgaaagctggcgaaaccttcggacgtctgactttgcataacactgacctgggctattaccagtacgaactgtatctgaaggccacgcccgcattgcccgaaaaaccagttcactttcaaacagtcctggggagctcacagattatccttgtgaagttcattaattatacaaggcagcgtaccgaatactactgccgaacagattgcaccgatttccacgcagagaaactgataaacgccgctcccgggggccagggaggcacggaggcgtctgtggaagtgctgttcgaaccttcgcacctgggcgagaccaagggcatcctaatcttgtctagcctggccggaggggagtacattatccccctgtttggtatggcgctaccacccaaaccacagggacccttctctattcgagccggctactctatcatcattccttttaaaaacgtcttctatcacatggtgacattcagcatcatagtggataacccagccttcacaatcagagctggtgagagcgtccggcccaagaaaattaataatatcaccgtgtcttttgagggtaacccaagtggatctaaaacacctatcaccaccaagttgactgtttcctgtccccctggtgagggaagcgaaacgggagtgaaatgggtgtattatcttaagggaataaccctttag

SEQ ID NO: 95759 - DNA, 2223 bp, Artificial Sequence
  derived and/or modified sequence
atgaccagccggcggctggaggagagcatgggcgccgtgcagatgggccttgtgaacatgttcaaaggctttcaaagtaaggtgctgccgccgctcagccccaaggttgtgacagaagaggaagtgaacaggatgctcactccctctgaatttctcaaagagatgagccttacaacagagcagagactcgccaaaacacgattgatgtgtcggccacaaattatagagcttcttgatatgggcgagactacccatcagaaattcagtggtatcgaccttgaccaggccctgttccagcccttcccttctgagatcatcttccagaattatacaccctgcgaggtgtatgaggtccccctcatcttacgcaataatgacaaaatccctcgattggtgaaggtggtggaggagtcttccccgtattttaaggtgatttctcccaaggacatcggtcataaggtggcaccaggcgtcccatctatttttcgaatcctatttacacccgaggaaaataaagattacgcccatacactgacatgcgtgaccgaacgggaaaagtttatagtgccaattaaagccagaggtgccagagctatcctcgattttcccgataaacttaacttcagcacttgccccgtaaagtattctacacagaagatattgctggtgcggaacattggtaacaagaatgctgtcttccacataaaaacctgtcgccctttcagcatcgagcccgccattggaacacttaacgttggagaaagcatgcagttggaagtcgaattcgagccacagagcgtgggggaccacagcggccgacttatcgtatgttacgatactggagagaaggtttttgtaagcttgtacggggctgccatcgacatgaacattcgattggataaaaattcattgaccatcgagaagacatatatttctctcgcaaatcagcgtacaatcaccattcataatcgcagcaatataatcgcccactttctctggaaagtgtttgcgacacagcaggaggaggatcgggaaaaatatagagcctgtgacgacctaatcaaagaggagaaagatgagaccgacgagttctttgaagaatgcatcacagaccctctgttgagggaacacctatcggtcctctcaagaaccttcgcaaatcagcgcagactggtgcagggagattcaaaattgttctttaacaatgtatttaccgtggagccactggaaggtgacgtgtggccaaacagctccgccgaaattaccgtctattttaacccacttgaggcaaagctctatcaacaaaccatatattgcgacatcctgggccgcgagattcggcttccactgagaattaaaggcgaggggatgggtcctaagatacactttaatttcgaactgctggacattggaaaggtgtttacaggcagtgcccactgctacgaagcaatactttacaacaaaggatccatagatgcactgtttaacatgacccccccgaccagcgcactgggggcatgttttgtgttcagtcccaaagaaggcatcattgagccatcaggggtgcaggccatccagatatctttctcctccacaatcctgggaaacttcgaagaggagtttctggtaaatgtgaatggctctcccgagcctgtcaagttgacaatccggggatgtgttatcggaccaacgtttcactttaacgtcccggcactgcacttcggggacgtctctttcgccacacaggagctgagggatccacaggtgctcattccgtttcagcgttttccgcacactctaatctgtagtctgaataacacgtccctcatccctatgacttataagttgcgtatcccgggagatggactgggacacaagagtatttcctactgtgagcagcatgttgattataaacgcccgtcatggactaaggaagaaattagcagtatgaaacccaaagagttcactatcagccccgattgtggcaccataaggccacagggtttcgccgcgattagagtgaccctctgctcaaatacagttcagaaatacgagttagcacttgttgtggacgtcgaaggaattggcgaagaggtcctcgccctgcttattactgcgtctgcccccgagctgtgcaaccgaaaggttatgctgtctgtacttcaatggaagatccatcgcgccaagcgaagcctacccagggataccgtggccgtgacctag

SEQ ID NO: 95760 - DNA, 3645 bp, Artificial Sequence
  derived and/or modified sequence
atgaccagccggcggctggaggagagcatgggcgccgtgcagatgggattggtcaacatgttcaagggattccagtcaaaggtgttgcccccactctccccaaaggtagtgactgaagaagaggttaaccgcatgctgacaccttctgagttcctcaaagaaatgtcactgactacagagcagcgcttggctaaaactagattaatgtgcagaccacaaataatcgagctcctggacatgggcgagacaacccatcaaaagttcagcggaatcgaccttgatcaggccctgttccaaccatttcccagtgagatcattttccaaaattatacaccctgcgaagtatatgaagtgccactgattctacgcaataatgacaagatcccccggctagtaaaggtggtcgaagagagttcaccttacttcaaagtaatttctcctaaagatattggccacaaagtcgctccaggcgtgccctcaatttttagaatcctctttacccccgaggagaacaaggactacgctcacacactcacgtgcgtgaccgagcgcgagaagttcatcgttccaatcaaggctcgcggggctcgggccatattggactttcccgacaaattaaatttctccacttgtcctgtcaaatacagtacccagaagatcctgctggtccggaacattggtaacaaaaacgccgtgtttcacattaagacatgtcgaccattctcaatcgagccagccatcggaactttgaacgtcggtgagagcatgcagctcgaagtggagtttgaaccccagtcagtaggggatcattccggccggttaatagtctgttatgacactggagagaaggtctttgtgtcgttatacggagcggctatcgacatgaatatcaggttagataagaacagtctcactatcgaaaaaacgtacatcagtctggctaatcaaaggactattaccattcacaatcgcagcaacattatagcacactttctgtggaaagtgttcgcaacccagcaagaagaggaccgcgagaaataccgtgcctgtgacgatctgattaaggaggaaaaggacgagacggacgaatttttcgaggagtgcataactgacccacttctcagagagcacctgagtgtgctttcgcgtaccttcgccaatcagcggaggctggtccagggtgattcaaagcttttctttaataatgtgtttaccgtggaacccctggaaggggatgtctggcctaacagctccgctgagatcaccgtgtatttcaatcctctggaggctaagttatatcagcagacaatttattgcgacatcttaggaagggaaattagattgcccctcagaatcaaaggggagggaatgggaccaaagattcattttaattttgaacttttggatatcggaaaggtgttcactggctccgcacattgctatgaggccatactgtacaataagggctctattgatgccttattcaacatgacaccgcccaccagtgctttaggtgcctgtttcgttttctcgccaaaggagggtataattgaaccttctggagttcaggctatacagatctctttttcttccacaatccttggaaacttcgaggaggagttcctggtaaatgtaaacggcagcccggagccagttaagctaaccattcggggctgtgttatcgggccaacgtttcatttcaatgtgcccgccctacacttcggggatgtgtctttcggctttccacacaccctgatttgcagcctcaataataccagtcttatccccatgacatataaactgcgcatccctggcgacggcctgggccacaagtcaatctcctactgtgagcagcacgtagattataaaaggccttcgtggactaaggaggagatatcttccatgaaacctaaagaatttaccatttctccggattgcggaacgattagaccccagggttttgcagccattagagtgacactgtgctccaatacagtccagaagtacgaactggctctggtggtggacgtcgagggtattggcgaggaagtgctggcactacttataaccgcacggtgtgtagtgcccgccctccacctcgtaaacacagaggttgacttcgggcactgttttctgaaatatccatatgagaagacattgcagttagcaaatcaggatgaccttcctggcttttacgaagtccagccacaggtgtgcgaggaggtacctacagttctattttcaagtcccaccccgagcggcgtgatcagcccatcctcgaccatccacattccccttgtgctggaaacccaagtgactggtgagcatagatcgacggtgtacattagcattttcggaagccaggaccctcctctggtgtgccacctcaaaagtgccggggaaggtccagtcatatatgtgcatcctaatcaagtggactttggcaacatctatgtcctgaaagactcttcgagaattttgaatctttgcaatcagtcattcataccggcttttttccaagctcatatggcacataaaaagtcattgtggacaattgagcccaatgaggggatggtgcctcccgagaccgacgtccaactagccttgacagccaatctgaatgacaccctgacattcaaggactgcgttatcctggacatcgaaaacagcagtacatacaggatccctgtgcaagcaagcggcactggcagtacaattgtttccgacaaaccatttgcaccagaactgaacttgggcgcacacttctcactcgacacgcactactatcacttcaagctgatcaataagggtagacgaatccagcagcttttctggatgaatgattcctttcgtccccaagccaaactcagcaagaagggcagggtcaaaaagggccacgcacacgtgcagcctcagcctagcgggtcccaggagccccgcgaccctcagagccctgtgtttcacctgcacccggcaagcatggagctttatccaggacaggcgatcgacgtcattcttgagggctactcagcgacccccagaaaaccgaattctatcctgaagcctgactaccagcctcttgcaattaagaatatttccacactgcccgttaacctgctcctgagcacttcaggtccgttttttatatgtgaaaccgataagagcctccttcccgcaaccccagaaccgataaagctggaaatcgatgaggaaaaaaacctcctgatcaaatttgatcccagctacaggaacgatctgaataactgggttgctgaagagatcttggcgataaagtacgtcgagcaccctcaaatagatagtctggatcttagaggcgaagtgcactacccaaacctttcattcgaaacaaaggaattggattttggctgcatcctgaatgataccgagcttatccgctacgttaccattacaaactgctcaccccttgtcgttaagttcagatggttcttcctggtgaacgatgaagagaaccaaatacgctttgtcacacttcctaagaagccatactccgccccagtatctcagatggaatccataccagctacttccgaggccgcctctcctccagcgatcctggtaaccgtggagtcaccagaaatggacctaaacgatttcgtgaagtag

SEQ ID NO: 95761 - DNA, 15366 bp, Artificial Sequence
  derived and/or modified sequence
atgactagtcgtcggctggaggaaagcatgggcgcagttcagatgggtctcgtcaacatgttcaaaggatttcagtccaaggtgttgcccccactgtctcccaaggtggtcacagaagaagaagtgaatcgcatgctgactccaagtgagttcctgaaggagatgagcctgacaaccgaacagagattggccaagacccggctgatgtgcaggccgcagatcatcgaactgttagatatgggagagaccacccatcagaaattcagtggaatcgacctcgaccaggcactgtttcagccattcccctccgagattatcttccaaaactacactccctgtgaagtatacgaagtcccgttgattctgcgcaataacgacaagatcccgagactggtcaaagtggtggaagagtcatccccgtatttcaaagtgattagccccaaagacattggccacaaagtggcccctggtgtgccttctatttttagaatcctatttacaccagaagaaaacaaagactacgctcacaccctcacctgtgtaactgagagagagaaattcattgttcccattaaggctagaggagctagagccatcctcgactttccggacaagcttaacttctctacttgcccagtgaaatattctactcagaagatcttgctggtgcgaaatattggaaataagaacgcagtattccatataaagacctgtagacctttctctatagaacctgccattggcactctcaacgtcggggaaagcatgcaactggaggtggaatttgaaccgcagtccgtgggcgatcatagcggcaggctgatcgtgtgctacgacacaggggagaaggtgtttgtctctttgtatggcgctgctatcgacatgaacatcaggctggataaaaactcactgacaatagagaagacttatatctccctcgcaaatcagcggacaatcaccatccataatagatcaaatatcatagcgcattttctatggaaagtgttcgctacacagcaggaagaggatcgcgaaaagtacagggcctgtgatgacctgattaaagaagagaaggacgaaactgacgagttttttgaggaatgcatcacagacccgctgttgcgagaacacttgtcggtgctaagccgaacttttgccaatcagcgacgcttagtgcagggtgacagcaagcttttcttcaataacgtgtttacggtggaacctctggagggcgatgtatggccaaacagctcagctgaaatcaccgtctacttcaatcccctggaggctaagctctaccagcagacaatctattgcgatatcctgggtcgggagatacgactgcctctgagaattaaaggtgaaggcatggggcctaaaatccattttaatttcgaactcctggatattggcaaagttttcactggatccgcacattgctacgaagccatcctgtacaacaaaggatccatagatgcgctttttaatatgaccccccctacctcagccctgggtgcctgtttcgtgttctctcccaaggaaggcatcattgagcccagcggcgtgcaggctatacagatatcttttagtagcactatcctcgggaatttcgaggaggaatttctggtgaatgtgaatggctccccggagcccgtgaagttaactatccggggttgcgtcatcggccctacattccatttcaacgtccccgctctgcatttcggtgacgtttcttttgggtttcctcatacactgatatgcagtctgaataacacgtccttgataccaatgacatataagctgcgtatacctggcgacggcctgggtcataagtctatcagttattgcgaacagcatgtcgattataaaaggcctagctggaccaaggaggaaatatcgtctatgaagcccaaggagttcacaatttccccagactgcggtaccattagaccccagggattcgccgctatccgggtgacactgtgcagtaacactgtgcagaagtacgagctggccctggtagtagatgtagaaggaattggcgaagaagtcctagccctgcttataaccgctagatgtgttgtccccgcactgcacctagtcaataccgaggtggattttgggcactgctttctgaaatacccttacgagaagactctccaactcgctaatcaggacgacctgcccggattttacgaggttcagccccaggtttgcgaggaggttcccaccgtgcttttctccagcccaactccgtctggggtgatttccccttccagcactatccatatcccattggttttggaaacgcaggtgaccggtgagcatcgttctaccgtttacatctccatctttggatctcaggatccacccttagtgtgtcatcttaagagtgccggtgaaggaccagtgatctacgtgcacccaaatcaagtggatttcgggaatatttacgtgctgaaagactcatcaaggatcctgaacctatgcaaccagtcatttatacccgctttcttccaggcgcacatggcccacaaaaagtctctctggactattgagcccaatgaggggatggttccacccgagaccgatgttcagctggccttgactgccaatttaaacgatacacttaccttcaaggattgcgtcatcctggacatcgagaatagctcgacctaccgcatccccgtccaagcgagcggaacagggtcaactatcgttagcgataagccattcgctcctgagctgaacctgggcgcacatttttctctagacacacactattaccacttcaaactgatcaacaagggtcggaggatacagcagctcttctggatgaacgacagctttcgtcctcaagctaagctttctaaaaaggggagagttaaaaagggacacgcacatgtccagccccagccatctggcagccaggaacccagagacccccagtccccagtttttcacctccacccagctagcatggagctatatccaggacaagctatagatgtgattctggaagggtactctgccacccctcgcatcgtcaaggagaaacttgtatgccatgctatcattggggctcagaagggcaaatcactcgtcatggccgtaaatataacgtgtgaattcgtggcgccactgatccagctgagtacaaagcaattgatctacaggttggaaaagaaacccaattcaattctgaagcccgattatcaaccccttgctataaagaacatttctacccttccagttaaccttctgttgtctacaagtggccctttttttatttgcgagacagacaagtctctgctaccagcaaccccagagccaatcaagctggagattgatgaagagaaaaatttgctgatcaagttcgatccctcttacagaaacgacctcaataactgggtggccgaggagatactggccattaaatatgtggaacatccccagattgattctctggatttgcgtggcgaggtgcattatcctaacctatctttcgaaaccaaggaactggactttggctgcatcctaaacgacacagaactgattcggtatgttacaattacaaattgcagcccgctcgtggtcaagtttcggtggttttttcttgtgaatgatgaggaaaatcagattcgctttgtgaccctgccaaagaagccttactctgccccagtctcacagatggagtcaatcccggctacctctgaagcagcctcaccccctgctatcctagtcacagtcgaaagtccagaaatggacctcaacgacttcgtcaagacggtgctggtcgatgaagatgcccgtccagaagaaaaggagctgagaaagactaaggcaagcagcgtcatcagtgacgagattaagatctcctccacagaaatcgagcgcatatacagttcccagtctcaggtggaagaccaggaaagcctccagacctgtgagcaaaatgagatgctctccattgggattgaggaagttttcgacatcctgcccttgttcggggtgctgcagccgcactccagccatcagatcagctttacattctatgggcacgcgaacatcatcgcccaggcaaaagccttatgtgaagtggaggaaggtccgacctatgagatcaccttgaagggcgaagcctctctcgtcaactactccttcgataccaaagacatccattacggtctgcagctgttcgaccatgtgaccgagcgtgaaatcactcttacaaacatggggaaagtcggcttcgaatttaaggtcctgaccgaccatcagtcctcccctgacaacttgctgcctggggtgcccttaattttacccgtgtctgggtttatttcgtcgcaccaggagcaggtgcttaaggtatattacttacccggagttcccgaggtgttcaagaggtcatttcagattcagatagcacatctcgaccctgagaacattaccctttccggggagggcattttcccgcagatttgtctggacctccctcggaacctcaccgcaaacgagaaatatgaaatgtttctcaatcaggcccgaaaaaacacagacaaagaatacaacaagtgcgagatgctggaccactttgatattataacagaagaggtgcctgaggatgagccagcggaagtaagtgctcacctgcagatggaagtcgaacgcctaatcgtacaatcctacgtgctggaacaccagaaaacaacaactcccgacccaatggatgatccatgcttctcccatcgcagtcgcagaaagctcgccaagatccagctgcccgaatacattctggacttcgggtacatcatcctgggcgaggtccggacacatattatcaaaataatcaacacatcacactttcccgtgtctttccacgccgacaaaagggtcctgcacgaaaccggattcagcacagagcttgacagggtgaaaaatctgcctcactgcgaaacagaaatctttgaagtgagattcgatccccagggagccaatctccccgtgggttcaaaagaggtgatcctcccaattaaggtcgtcggaggacccactgtgcacatctgtctccaggccaaagtaaccatacctactatgacactctctcggggtaaggtggatttcgctacaatacagtgtggccagtgtttagtagaaacaatccaactaagcaaccatctgcaggtcccatgtgagtggttcgtacagagccagaagccggtcgataagcttgagaagcacatgccaaaatatctgaggcaaaaacttcgggcagagttaaagcctaaaactagaattttcgagatacaaccaatctctggagtgctagatccgggagaaaagagcaatgtgcaagtcaaattcatgcctaaagaggaaaagttctatagtcagactctggtgtttcagatcgctcagagcgctcagaagttgacactcctggcgaggggacaggggttggagccacgactggaatttagcccctccgtgctggacttgggtcccctgttgctgtgcgctcccggtgacgaggccgaggtgatcgttaaaaacccttgtaactttcccatagaattctacagccttgaattcgatcagcaatacctcatcgaggagaagatcctgcggaagctgaaagggtacgattcttataataccctcctcctgccccctcgcaacccaggggagaaactgcccccagagctttacgagtatttcaaggagatcaagaaaagcaaggaagaacagatgcgcgcaaagtacctcgaaaacctagcgcaagaaaacgaagaggaggatatcacctccagcgatcaggggacgtctaacagtaccaaaagaacatcactgtcgagaggcatcagtgttacctcaaacttagaggagtggcacgccctgctggtggagtccaagacttacctggaggaggaagaagatgaagagtccctcgaaaagatcattttccaaacagacaagttgcagtcaatagattcccacagcatggaggaggtgggggaggtggagaacaatcctgtctctaaagcgattgccagacatctaggcatcgacatctccgctgagggacgtttggcgaagaaccgcaagggcatagccatcattattcacgggactcctctctccggaaaatccgccaacgcagtgtcagtggccaagtactacaacgccgcttgcctgagcattgattctatcgtgttagaggcagttgcaaatagcaataacatcccgggaatcagagcgagagagctatgtatcagggcagctatagagcagagcgtgaaggaaggcgaggaggccgctcaggaggccgctgtgggacaaaatgttatcggccagggcaggctaagtacggacacactcggcaagctcgcctctgagatgaccctagtggctccagagataaagcccggtaaatcggtccgcggatcagtcgttatcaccaagagcaaggcagactcccacggctccggttcccagaaacagcatcactctcaccagagtgagacaccccaaatttcctcctccccactgcccccaggccctatccataggtggctttctgtgtctcctagcgtcggcggtgagacagggctgatgagttgtgtattgccagatgaactcctagtgcagatactggcggaacgtatccagctgagcgactgctacaggggagtagttttcgacggactggacaccctatttgcccagaatgccgcagctgcactcctgtgcttacttaaggccatcggcagccgtgaacacatttatatcctgaatatggcacaggactatgctgccatgaaggcccaggaaaaggcaaagaaagagcaggaggagaggaagcacaagggcgcactggaaaaggagaaggaaagattgcaaaacatggacgaggaggaatatgacgccctgacggaagaagagaagttaactttcgatagaggaattcagcaggcgctgcgtgaacgaaagaaacgagagcaggagcgactcgcaaaggaaatgcaagaaaaaaagctccaacaggaactggaacggcaaaaagaagaagatgagctcaagaggagggtgaagaaggggaagcagggccctatcaaagaggaacctcccatgaaaaaatcccaggctgctaacaagcaggtccccccactgacgaaggtagatgtgaaaatggaaaccatcgagcgcaaaatcagcgtgcgcgagcagacaatgagcgagaaggaggagcttaataaaaaaaagcgcaacatgggggacgtgagcatgcatggtttgcccttggtgcaggaccaggaggactccgagggggataattctaaggaccccgataagcagcttgccccaaagttcaaaacctatgagcttactctcaaagatgtccagaatatcctgatgtactgggatagaaaacagggggtacagctgccacccgctgggatggaggaagctcctcacgagccagatgaccagagacaggttcctctgggaggtcggcgaggacggaaagatcgtgagagagagagattggagaaagagcgaaccgagaaagaacgcctcgaaagggagaaagcagagcgcgagagacttgagaagctccgggcattagaagaaaggtccgattgggaaggcgaaggggaagaggatcatgaaggtaagaaggagaaagatctgggagtgccctttctggatattcagactcccgactttgaggggctcagctggaagcaagcattagagagcgataaacttcccaagggcgaacaaatcctcgacattctgggcctgggcgcttctggcccacccataccccctccagcactgttctccattgtgtcctatcccgtcaagcggccacctttaactatgactgacgacttagaacattttgtatttgtgatccccccttcagaagatatctctttggatgaaaagaaggagatggagattgagagtgattttctggctacgaccaacactacaaaagcccaggaggagcagacaagtagctctaaggggggtaaacagaagatgaaggaaaaaatcgatcaggtgtttgaaattcaaaaggacaaaaggcacatggcactaaaccgcaaagttctcagcggtgaacccgctggaacaataagccagctgagcgatacagacctggacaacttcaacggccagcattcccaagagaagtttacccggctgaatcacttcaggtggatcgtgccggcaaatggtgaggtgacgttgcaagtgcactttagttccgacgaatttggtaatttcgaccagacattcaatttcgaaatcctgggtacctgctgccaatatcagttgtactgtcggggaatctgtacctacccgtatatttgtcaggatcctaaagtggtgtttcctcaacgaaagatggatatgaaaacaaatgaagtcatatttaagaagtatgtcatgagtactgaaacctactatttcggcccactgctctgcgggaaatcccgcgacaaatacaagagtagtctatttccaggaaacatggagacactgaccatactgaatacctctctgatggttgtggaagcctctttctactttcagaacgacgtgaaagccaacacttattttctggaacccaataccatggtgctcaaacctaatgaaaagcagatcttaaacgtatgggcataccctaccagcgtgggtgtgtttgaggatagcatcgtgtgttgcattaatgataaccctgaacctgctatctttcagctgtcatgccaggggataaggcccgagctggaactggagccgagacaactgcacttcgatcgtctgctgctgcatcggcaggagagcagagttgtgttgcttaggaatgtgaccctgctccctgtcgcctggagaatcacttctctggaacatttgggggacgatttcactgtgagcttgatgcagggcacaatacctccagaggccgagtacggcctacatctgtatttccagccaactaaaccagtcaacatcaagaaagctattcggctggaagtgcttgatgctgaaaaccttctgggggtggtccaaatcgaaaacataatggtgtttgctgaagcatacgacatagctcttgatatcacctttccaaaaggtgctgagggtggactggatttcgggatcgttcgcgtcaccgaggaagctaagcagccacttcaactgaagaatcggggaaagtacgagatcgctttctccttctctgtggattccgtgggcatttccaccccaaacatcaattctatgatcagtgtgcagcccaagaagggctctctaacccctaccgagaagccaaccaatgtgcaggttttcttccacgcgaaaaaggaagttaaaatcgagcaccagccggtgttacggtgtcagatcatcgaaccaaacatctcagagggcggagaaatcatagctagcattccaatcaagttctccgcaaatgccgtgtactctaagtataatattacccccagtagtgtcataaactttggcgctctgatctgcgggaccaggaagtcaaccacctttaccattgagaaccagggtgtgactgatttcaagttcgctctctacaagcttaccggcgaatccccgattcaccagaaaaaggcagcgtcccacgtgcgccacgcacgctctagggagtcagagagtttctataaaacaggcagctcccgggcagctaaattcagtgatacaatccaaaaggaagtgaccacaacaggacaagcgcgttttgcacacgggatgtttaccgtgtatcccggtttcggctctattccttccggcggtcaacaggtcattaatgtcgactgcgtagccgatgctatggggaagtgtgaggaattcattgctatcgacatcagcggtcgcgaccccgcagtccaccccgcaggcatactgtacacactcttagccgaggcatgcttgcctgcgttcgtcacagagaacaatgccctgattttcgaagaacatcagatttgcacaagcgcaaatttgcaccatatcctgcagactatcgagagcgggggattgttcgttgaggatgaaaataaattcattttctgcaacgttctcgtgggccgtcaggccaaggctaggttcaagatttctaatgtggggaaaatcacctgcgacgtaaacatagtggtgaggcctatctccaataaaccgtttgcaaggattgttgacatttttgaggtggaacccagcaaaatgtgcattgcttcccatagccacgcattcgctacagtgtctttcaccccccagattatgcagaactaccagtgcattttcgaagcaacactagacgggcttcccagcactttagcaaagtcacgcggacttgttttcgacattgctggggagggcaacttgcctcgggtgacagtggtcagaccagtgctccataaccagtatggcaatcctctgcttctgttcaagagactgcttttggggcactcagagaagttgcctctcattctcaaaaacaatggcgtgctgcctgcgcagctccatgttgacctccaggacgaattgggtgtgttcagcctcaagggcagacccactacagcctacatttacatcaccgaggagaacaaaccccatgttaaagcgaagaaagctcacacagcttcgctagtggtttcaccaggggacaccgctgaattcgacgtggtgttccactcccaaaaagtcggcaggatgagaggaattatccacctgtccgtcattaacaatcagtacgaggagactagtatccatatggttggggagggctatgaagatgatataacgctggacaacatccacggattggtggctccaacctcacaggaggatatctccatatctgagttcactgagatcattgaagataatgacatggaggacctggttgcagcagcacttgtggatcatattcagttcggagattgtcacatcgggcactcatataacgccagctttacagtcactaaccattcgcaggtgaacctcattcggtttgagtggcctgtgagtgcaacgatagctttcagccctcagatgggccatcttcatcctggctgcgcaaaggatatagttgtaactatgaagtctgatgtcccgattaatttaaagaatatgcggatccggtgtaaactctcccgtattatgtttcagcttcccgctgatcaggtgcccgattgggacgatcggatgcacactgttaaatgggttgacgtcccccgaaacatgccaggcacctttacgaccaagcgaaaggtgattgagactgaccctgagccagctcactcagtcctagaagagaattaccaggaacttcaactccagatttcggcaaatgtggacttcgcgtcataccattgccaggcacgggacgtgcgctttaaagaaactctcgtatatcagacccgtgtgttcgagtttgacgtaataaattccgggagagtgcagctggaattctcgtgggtctccgaagatacctcaaaggcagttagtttcgctaaacccgatcaccaagggtcagcccagaaggatcagctgagccagggtaccatgcacactggatctactctcgactcaacaatggaccattgggccgaagggtccccacaaccctttagcgtggaaccatcatcaggaattgtgccagttgggaaaatccaaaagttcaaggtcaagtttagtcctctcgatattggcgacttcgagtctaatttgttctgtcagatccctaacctcccccctggcgagcaaggacctgttctggttgcaaaaggccgaagtactctccccatatgccatttcgatctgaaggactccgactacatctcagggcaccagagaaacccagaactgcggggaagttctggtggagcactcgacccaaacacacgggttattgagttcacaactgtcggcatcggcggtaagaatctgcgcaccttcaccattttaaaccctaccaattctacctattccttttgttggatctctgaggagatcgaatccctccagaaccccgcagctttcacatgcctcaccgagaaagggttcatccatccagaaaagaaagcagaaatcgtgttccagtttaccccctttcacctgggaattactgaaagctcctggacattccttattccagaacataatataacggtgcccttccttctggtcggtaagaccactgaacccctgatttccttaaacaaatcccaccttaacttctccagcttgctcatcggtagagaggcgcgtgagaccgtgcagataataaacaaagaggaacagggattcgacttctccttccaggataactcacgatatagtgagggcttctctaatagtttgctggtatgtcctatggaaggatggattccccctctcagccggttccctatcgacattttctttacgccgaagcaggagggagacgttaacttcaacttgatttgcaacgtggaaaagaaggtgcaccccgtcacactgaacgttaaggcagaaggctacaccatgaacgtggaaataaagtgcaaagatcgaacaggctccattactttattgactcctaaccagactaacatcataaacttctacgaggtggagttaaatgaatgtgttcagtgtgaatttaatttcatcaatacagggaagtttacttttagcttccaggctcagctgtgtgggtccaagactttgctacagtatctggagttctcccccatcgatagcacagtggacgtggggcaaagtgtgcacgccaccttgagcttccaacccctaaaaaaatgtgttctgacagacctggagctaattatcaaaatctcccacggcccaacctttatgtgtaacatttctggatgcgctgtctcccctgctattcacttttccttcacctcttataacttcggcacctgttttatataccaggccggaatgcctccctacaaacaaactctagtgatcactaataaagaagagacgccaatgagtattgactgcctgtacaccaatacgacacacttggaggtgaacagtagggttgacgtggtgaaacctgggaacactctggagattccaattaccttttatcctcgtgagtcgatcaactaccaggagctcatccccttcgaaattaatggactcagccagcaaactgtcgagattaaaggaaagggcacaaagatgaaaattctggttctcgatccggctaaccgaattgttaaactaggagcggtcctgcccggacaggtcgtaaaaaggactgtgagcattatgaacaattctctcgcccagctgacttttaatcagagcatcctattcactatcccagagctgcaggagcctaaagtgctgactctggccccttttcacaacatcacccttaagccgaaagaggtctgtaaactggaagtgatttttgcgccaaagaaacgtgttccccctttctccgaggaggtgttcatggagtgcatgggtctattacggccactgttcctgctgtcagggtgctgccaagcactggagatatccctggaccaagagcacatcccctttgggccagtggtatatcagacccaggcaacccgcaggatcctgatgatgaatactggtgacgtaggggcacgattcaaatgggatatcaaaaagttcgaaccacacttcagcatttcacccgaagaaggctatattacatcggggatggaagtctcgttcgaggtgacatatcacccgacagaggtgggaaaagagagcctgtgcaagaatattctatgttacatccaaggcggttctcccctgtcactgacactatccggagtatgtgtcggtcccccagcggttaaagaggtggtgaacttcacttgccaagtgaggagcaagcacacgcaaaccatccttctctccaatcgcaccaaccagacctggaacttacaccccatatttgagggagaacactgggaggggcctgaattcattactctggaggcccaccaacaaaataaaccttatgaaataacctatcgaccccgaaccatgaatttggaaaaccgcaaacaccaaggaacactgtttttccccctgccagatgggacaggatggttatacgctctgcatggcacttcggaattgccgaaagccgttgcaaacatctatcgtgaagtgccctgtaagacaccctacacggagctcctgcccattacaaactggctaaataaaccccagcgcttcagggtgatcgttgaaatcctcaagccagagaaacctgatctgtccattaccatgaaaggcctggattatattgatgtgcttagtggcagcaaaaaggattacaagctgaatttcttctcccacaaggaaggcacatatgctgcgaaggtgatcttccgcaatgaagtcacgaatgaattcctatactataatgtcagttttcgggtgataccgtcaggaattattaagactattgagatggtgacacctgtccgtcaagtcgcctctgcctcaatcaagttagagaatcctctgccttacagtgttacgttttcaactgagtgcagaatgccagatattgctctcccttcacagttcgttgtgcctgccaactctgaggggactttcagctttgaatttcaacccctgaaagccggtgagacctttgggaggctcacccttcacaacactgacctggggtactaccagtatgaactatacttaaaagccacacctgctctccctgaaaagcccgtccattttcagacagtcctcggctcttctcagataatccttgtgaaattcatcaactatacacggcaaaggaccgagtactactgtagaacagactgtaccgattttcatgctgagaagctgatcaacgcagcgccaggaggacagggaggcactgaggcatccgtcgaggtgctgtttgaacctagccacttgggggagactaagggcattcttatcttaagtagcttggccggaggagagtacatcattcctctgtttggcatggctctgcctcctaagccacaagggcctttcagtattcgagcgggatattcaatcatcatccccttcaaaaacgtcttttaccatatggtgaccttttctattattgtcgataaccccgcattcacgatcagggcgggagagtctgtgaggccaaaaaagatcaacaacataaccgtatcctttgagggcaatccctctggttccaaaacgcccattacaacaaaactgacagtcagctgcccgcctggcgaaggtagtgagactggggtgaagtgggtgtattatctaaagggaatcactctttaa

SEQ ID NO: 95762 - DNA, 15363 bp, Artificial Sequence
  derived and/or modified sequence
atgacgtctagaagattggaggagagtatgggcgcagtgcagatggggttagtcaacatgttcaaaggctttcagtcaaaggtcctgcctccactcagtccaaaggttgtgaccgaagaagaagttaaccggatgctgaccccctccgagttcctcaaggagatgtctctgactactgaacagcgattagcaaaaacgagacttatgtgtagaccgcagattattgaattgctggacatgggcgaaacaacccatcagaagttttccggcattgatctcgaccaagcactctttcagccatttccaagcgagatcatctttcaaaactataccccttgcgaagtgtatgaggtgcctctgattcttaggaacaacgacaagatcccccgattggttaaagtcgttgaggagtcctctccatacttcaaagtgataagccctaaagacatcggacataaagtggctcctggcgtgccgtccatcttcaggatactgttcaccccagaggaaaataaggattatgcacacacactaacctgtgttaccgaacgggagaagttcatcgttcctattaaagccagaggcgcaagagccatcctcgatttccccgacaagctcaacttcagtacttgtcccgtgaagtactcaacccaaaagatccttctggtaaggaatattggcaacaaaaacgcggtgttccatattaagacatgccggcctttttcaatagagcctgccataggaactctgaacgttggtgaatctatgcagttggaagttgagtttgagccccagtcagtgggagaccattctgggagactgattgtctgctacgatactggtgagaaggttttcgtgtcactgtatggggctgccatcgacatgaatataagactcgataagaacagcctaaccatcgaaaagacctacatttccttggctaaccagagaaccatcactattcataatcgctccaatatcatagcccacttcctttggaaggtctttgctacacagcaagaagaggatcgggaaaagtaccgtgcgtgtgatgatctgattaaggaggagaaagatgaaaccgatgaatttttcgaggaatgtatcacagaccccctgctccgcgagcatctcagtgtgctttctcgcacctttgccaatcaaagacgcctagtgcagggtgattcaaagcttttctttaacaacgtgttcacagtggagcccttggaaggcgatgtgtggcctaacagctccgccgagattaccgtctacttcaaccctctggaggcgaaactgtatcagcagactatttattgtgatattctcggccgagaaatccgcttgccattaaggataaagggagaaggcatgggcccaaagatccacttcaactttgagttactggatattggcaaagtctttactggttcagcccattgttacgaggcaatactgtataataaaggctcaatagacgccttgttcaatatgaccccccctaccagcgccctgggcgcatgcttcgtgttttctcccaaggagggtatcatcgaaccatcgggtgtccaagcaatacagataagcttctctagcacaattctggggaattttgaagaggaattcttggtgaacgtaaatggttcgccggagcctgtgaaattgacaattcggggttgcgttatcggccctacttttcattttaacgtacccgcactgcacttcggagacgtgagcttcggctttcctcatactcttatctgttccttgaacaacacaagcctcattccaatgacctacaaactcaggataccaggcgacgggctaggccacaagagcatcagctattgcgagcagcacgttgattataaacgcccatcctggactaaagaagagatatcgtctatgaagcctaaggagtttacaatttcccctgactgtggcaccattaggccacaggggttcgctgctatcagggtcactctttgctccaatactgtccaaaaatacgagctcgccctggttgtcgacgttgagggtataggcgaagaggtcctggctctgttgatcactgcccgttgtgtggttcctgccctgcatctagtgaacaccgaggtggacttcggacactgcttcctgaagtacccctacgagaaaactctgcaactcgcaaaccaggacgacctgccaggattttacgaagtccagccacaggtctgcgaggaggtccccacagtcctgttctcgtctccaaccccatcaggggtgatatcaccgagctctacaattcacatccccctggtgctggaaacccaggtgacaggtgaacatcgctccacggtctacatctctatcttcggctctcaagatccacccctggtgtgccatctgaaaagtgcgggagagggtcctgtgatttacgtccaccccaaccaggtggatttcgggaatatttatgtattgaaggatagttcacggatccttaacctgtgtaatcagtcctttatccccgcttttttccaggctcacatggcccacaagaaaagcctctggactatcgagccgaacgaagggatggtacctcccgaaaccgacgtgcaacttgcgttaactgcgaacttaaacgacaccttgaccttcaaagattgcgtgatccttgatattgagaacagctcaacttaccggatcccagtgcaggcttctgggacaggtagtacaattgtgtccgacaaaccatttgcaccagaattaaacctgggcgcacacttctctctcgacacgcactactaccattttaagcttatcaataaaggcaggcgcatccagcaactgttttggatgaatgacagttttcgcccacaggccaaactgtctaagaaaggtcgggttaagaaaggtcatgcacatgtccagccacagccatccggctcccaagagcccagagacccacagtctccggtctttcacttgcaccccgcttcaatggaattgtatcctggccaagccattgatgtcatcctggaaggatactctgctacccccaggatcgtgaaagagaagcttgtatgccatgccataataggtgcccagaagggcaagtcccttgtgatggccgtgaacattacgtgcgaattcgtggcccctctcatacagctttcaactaagcagttgatatacagacttgagaaaaagcctaatagcatactaaaacctgattatcagcccctcgccattaagaatatttccaccctgcctgtcaacctgctattgtccacaagtggtcccttttttatctgcgagaccgacaagtccctcctccctgccactcccgagcccattaaactggagatcgacgaggaaaaaaacttgctaatcaaattcgacccgtcttaccgtaatgacctcaacaactgggtcgccgaagaaatcctggccattaaatatgtggagcacccgcagatcgattcattggacctgcgaggagaggtacactacccaaacctatcattcgagaccaaggagctcgatttcgggtgtatcttaaatgatactgaactcattcggtatgtaaccatcactaattgttcacctttggtggtgaagtttcggtggttttttctggtgaatgacgaggagaaccagatcaggttcgtgaccctgcctaaaaaaccctattccgccccagtgagccagatggagtcaatacccgctacttctgaggccgcttctcctccagctattcttgtaaccgtggagtctcctgaaatggatctcaacgactttgttaagaccgtattggtggatgaggatgctcgcccagaggagaaagaactgcggaagactaaggcctcatccgtgatatccgatgtaagatgtccattccacggagaggagcgcatctactctagtcagagtcaggtggaagaccaggagagccttcaaacctgcgagcagaatgaaatgctgtctatcggaatcgaagaggtatttgatattctcccgctgttcggggttcttcagccccacagtagccaccagatctcttttacattttatggacatgccaatatcatcgctcaggccaaagcattatgcgaggtcgaggaggggcctacttatgagattacccttaaaggcgaggcttcacttgtgaattattccttcgacaccaaggatattcattatggcctacagttattcgatcacgtgacggaacgcgaaatcaccttgacgaatatggggaaagtcggcttcgaattcaaggtgctcactgatcaccagagctcccctgataacctgctcccgggagtgcctctgatcctgcccgtgagcggctttatctcatctcatcaggagcaggttctgaaagtgtactatcttcctggagttcccgaagtctttaagcgatcatttcaaatccagatcgcccacctcgaccccgaaaacataacactctccggtgaagggatctttccccagatctgcctggaccttcctcggaatcttactgccaatgaaaagtacgaaatgttcctgaatcaggctcggaagaacaccgataaagagtataacaagtgcgagatgcttgatcactttgacatcatcacagaagaagttcctgaagacgagcccgctgaagtctccgcacatttgcagatggaggtcgaaagactgatcgtgcagagctatgtcctcgagcaccagaaaaccacaacaccagaccccatggacgatccatgcttctcacacagaagccgccgaaaactggctaagattcagctgcctgagtatattctggactttggctacattatacttggcgaagtccggacccatatcattaagattattaacacctctcatttccccgtcagctttcacgccgacaaaagggttctgcacgaaacaggtttcagcactgaactcgaccgcgtaaagaacctcccccactgcgagaccgagatttttgaagtgagatttgacccccaaggagcaaatctccctgtaggatctaaggaggttatcctgccaattaaggttgtgggaggtccaactgtgcacatctgtctgcaggctaaggttacgatccccactatgaccctctctcgcggtaaggtggattttgctaccatccaatgtggacaatgcctcgtcgagacgatccagctgagcaatcatctgcaagtcccctgcgaatggtttgtccagtctcagaaacctgtggacaaactggagaagcatatgccaaaatacttgagacagaaattgcgcgctgagctgaaacccaagacccggatctttgagatacaacctattagtggggttctggacccaggagagaagtctaatgtgcaggtcaagtttatgcctaaggaagagaagttctatagtcagaccctagtcttccagattgctcagagcgcccagaagttgaccctgttggcccgagggcagggcctcgagccacgtctggaattttctccctcagtgctggatcttggcccactgctcctatgcgcccctggggatgaggctgaggtcatcgtgaagaatccttgtaactttcctatcgagttctatagcctggaattcgatcagcagtacctcatcgaggagaagattctgagaaaacttaagggatacgatagttataacaccctgctgctcccacctaggaatcccggtgagaaacttccccctgaactgtacgagtactttaaagaaattaaaaagtctaaggaggagcagatgcgggctaaatacctggagaacctggcacaggagaacgaggaggaggacatcacatcatccgaccagggcacatccaatagcactaagcggaccagtctgtctagaggaatctccgtgaccagcaacctggaggagtggcacgctctgctggttgagagtaagacatacctggaggaggaagaagacgaggagtcactggagaagatcatcttccagacagataaattgcaatcgattgactctcacagtatggaggaggtaggtgaggtggaaaataacccagtcagtaaagccatagcccgtcatctggggattgacatctccgctgagggtcgcctggcaaaaaatcgcaagggaatagctatcattattcacggaactccactttcaggcaaatctgcaaatgcagtgtccgtggccaagtactacaacgctgcctgtctttctatcgatagcattgtgctagaggccgtggccaactccaacaacattccaggcatcagggcccgtgagctctgcatccgggcagccattgagcagtccgtgaaggagggggaggaagccgctcaggaagccgctgtgggccagaatgttattggccagggcaggttatccacagacactctgggtaagctcgctagtgagatgacccttgtcgcacccgagatcaagcccggaaaatctgtgcggggttctgtcgtgatcacaaagtccaaagctgattctcacggcagtggatcccagaagcagcatcattcgcaccagtcagagacaccgcagattagtagctctcccctgccgccaggtcccattcaccgatggttaagtgttagtcctagtgtgggcggagaaactggacttatgagctgcgttcttcctgatgagttgctcgtgcagattctcgccgaaaggatccagctttctgattgctataggggagtagtgtttgatggtttagatactttgtttgcacaaaacgcagccgctgcacttctctgtctgcttaaagcaattggctcccgggagcacatatacattctgaacatggcccaagattacgccgcaatgaaagcccaggaaaaagcgaaaaaagagcaggaagagagaaagcataagggcgctctggagaaagagaaagagcgcctgcaaaacatggacgaggaagaatatgacgccctaaccgaggaggagaagctgactttcgatcggggaatccagcaggcactgcgggaacgcaaaaaaagagagcaggaacggctggcgaaggaaatgcaggagaaaaagttgcaacaggagttagaaagacagaaggaggaagacgagctgaagagacgggttaaaaaaggcaaacagggcccaatcaaggaagaaccccctatgaagaaatcccaggctgctaacaaacaggtccctcccttgacaaaagttgacgtcaagatggaaacaatcgaacggaaaatatcagtgcgcgagcaaacaatgtcagaaaaagaggagctgaacaagaagaaacggaacatgggggatgtatcaatgcacgggctgcccctggtccaggatcaggaggactcagagggagacaattctaaggatccagataagcaattagctcccaagtttaagacatacgaattgacgctgaaagatgtgcagaacattttaatgtactgggatagaaagcagggggtccagctgccacctgccggtatggaagaagcaccgcatgaacccgacgaccagcgccaggtcccgttaggaggacggagaggcagaaaggatagggagcgcgagaggctggaaaaggaacgtaccgagaaggagcggttggagagagaaaaagccgaaagggaacggcttgagaagctgcgagcactggaggagcgtagcgactgggagggggaaggggaagaggaccacgagggcaagaaggaaaaggatctcggcgtgccctttctagacattcaaacccctgattttgagggcttaagctggaagcaagccctggaatccgataaactgcccaaaggagaacagatactggacattctaggtctgggagcatcaggaccacctatcccaccccctgcactgtttagcattgtctcatacccagtgaagcgccctcccctaaccatgacagacgaccttgaacacttcgtctttgtcatcccgccttctgaagacatttcactggacgagaagaaggaaatggaaatcgagtccgacttcttggccacaaccaatacaacaaaagctcaagaagagcagacctcttccagtaagggaggtaaacagaaaatgaaagaaaagatcgatcaggtgtttgaaattcaaaaagacaagaggcatatggccctgaataggaaagttctgtctggtgagcctgccggaacaatctcacagctgtccgacaccgatcttgacaactttaatgggcagcattcccaggagaagtttactcgcctcaaccacttccggtggatcgttccagcgaacggggaagtaactctgcaagtgcatttcagcagcgacgaattcggaaattttgatcagaccttcaacttcgagatcctcgggacgtgctgccagtaccagctgtattgccggggaatatgcacatacccctacatttgccaggatccgaaggttgtgttcccacagcggaagatggatatgaaaaccaacgaagtaatattcaagaagtatgtgatgagcaccgaaacatactactttggacccctgctctgtggcaagtccagggataaatacaagagttccctgttccccggaaacatggaaactctaacaatccttaacacttctctcatggttgtggaggcgtctttctattttcagaacgacgtcaaagccaatacttacttcctcgagccaaacacaatggtccttaagcctaacgaaaagcagatcctgaacgtctgggcctatcccacttctgttggggtatttgaagatagcattgtctgttgtattaatgataatcctgagcctgcaatttttcagctaagctgccaagggataaggccagagctcgagttggagcctcgacagcttcactttgacaggctgctcctgcatcgtcaggagtctcgggtggtgttgttgagaaatgttactttgctgcccgttgcctggcggatcacttccctggagcatctgggggacgacttcacggtctcacttatgcagggaaccataccccctgaggcagagtatggccttcacctttattttcagcctactaaacctgtgaacatcaaaaaagccatccgacttgaagttcttgacgcagaaaatctgctgggagttgttcaaatcgagaatattatggtctttgcagaggcctacgatattgctctggatatcacctttccaaagggggcagaagggggactggactttggtatagtacgcgttactgaggaagccaagcagccacttcagctgaagaatcgcggaaaatatgaaattgccttctctttctcggtggactcagttggcatcagtacgccaaatatcaatagcatgatctccgtccagcccaaaaaaggctctttaacccctactgagaagcccacaaacgtgcaggtattcttccacgcaaagaaggaggtgaaaatcgagcatcaaccagtactgcggtgccagataatcgagcctaatatcagcgaaggcggagaaatcatcgcttctataccaatcaaattctcagccaacgctgtctattccaagtacaacatcacaccttccagtgttatcaacttcggggcactgatctgcgggacaaggaagtcgacaacttttaccattgagaaccagggagtgaccgatttcaaattcgccctctataagctaactggcgagagccctatccaccaaaagaaggccgcttcccacgtacgccacgcccgttcccgggaatctgagtcattttataagaccgggtctagtcgcgcagctaagtttagcgacactattcagaaggaagtgactactacaggccaggcaagatttgctcacggcatgttcaccgtgtatcccggattcgggagcatccctagcggcggacagcaggttattaatgtcgattgtgtggccgacgcaatgggcaaatgcgaggaatttatagctatcgacatcagcggaagagacccagctgtccatccggcaggcatcctctataccctcctggcagaagcctgtttgccagctttcgtgaccgaaaacaatgcactgatcttcgaggaacaccagatttgcacgagcgcaaatctccatcacatcctacagaccatcgagtctggcggactcttcgtggaggatgaaaataaattcatcttctgcaatgtcctggttgggagacaggcaaaggctcggtttaaaatttccaacgtgggtaagatcacttgcgatgtgaatattgtcgtgaggcccatatccaacaagccatttgccagaatcgtggatatctttgaggtagaaccgtccaaaatgtgcattgcatcacacagccacgcctttgcaactgttagcttcacccctcaaatcatgcaaaattaccagtgtatcttcgaggccactctagatggcctgccctcgaccctggccaagagtaggggcttagtgttcgacattgcaggagaaggcaatttacctagggtcactgtagtccgaccagttctacataaccagtatggaaatccattgttgttatttaagcgcctcctcctcggccactctgaaaaactacccctcatccttaaaaataacggcgtgcttccggctcaattacacgtcgacctacaggatgagctgggagtcttttccctcaagggtcggccaacaactgcgtacatttatataactgaggagaacaaaccacacgtgaaagccaagaaggcccacactgccagtctggtagtttcaccaggtgatacagctgaattcgatgtggtttttcactcccagaaagtgggtcgtatgagggggattatccacctgagtgtcatcaataaccaatacgaggagacgtccatccacatggttggagagggctacgaggacgacattactctcgacaatatccatggccttgtcgcacctacgtctcaggaggatatcagtatctctgagttcacagaaatcattgaggacaacgacatggaggatctggtagctgcggcactcgtggaccacatccagtttggggattgtcatattggccattcctacaatgcctccttcactgtgactaaccactctcaggtcaacctcatcagatttgaatggccagtctccgcgacaattgcattctcacctcaaatgggccaccttcaccccggatgtgccaaagatatagtggtcaccatgaaatcagacgtgccaatcaatttaaaaaacatgcggatccgttgtaagctttctagaatcatgtttcagctgcctgcggaccaggttcctgattgggacgacagaatgcacaccgtaaagtgggtggatgtgccgaggaatatgcccggaacgtttactacaaaaaggaaagtcatcgagacagaccccgaaccagcccactcagttctggaggagaactaccaggaactccagcttcagatcagcgccaacgttgattttgcctcctaccactgccaggcacgtgacgtgagattcaaggagacactggtataccaaactcgcgtattcgagtttgatgttattaacagtggcagagtgcagcttgagttcagctgggtcagtgaggacacaagtaaggcggtgagcttcgcgaagcctgaccaccagggcagtgcgcaaaaagaccagctatcgcagggaactatgcatacaggtagcaccctcgacagcaccatggatcattgggcggaaggctcaccgcagccgttttccgtggagcccagttccggcatagtgccagtggggaagatccaaaagttcaaggtgaagttcagcccgctggatatcggagatttcgagagtaaccttttctgtcagattcccaacctgcctcccggtgagcagggcccagtcctggtcgcgaaggggcgatcaactttgcctatatgccattttgacctgaaggatagcgactatatcagtggccaccagcgcaacccggagctaagaggctcctcgggtggggctctcgatcccaatactcgggtgatagagttcacaacagtcggcattgggggaaagaatctacgaactttcacaattctcaaccccactaatagcacttacagcttttgttggatctctgaagagatcgagtcactgcagaacccggctgccttcacgtgcctgaccgagaaggggttcatccacccggaaaaaaaagcagaaatcgtgttccagtttaccccgttccacctcggaatcactgagagcagctggacctttctgattcctgaacacaatataactgtgccgtttctcctggtgggcaaaactactgagcccctaattagtctgaataagagccatcttaacttcagcagcctcttgattgggagagaagcacgggagaccgtgcagatcatcaacaaggaggagcaaggcttcgacttttcattccaggacaattcccgatactccgagggcttctccaactcattactggtgtgcccaatggaggggtggatccctccattgagcagattccccattgacattttttttactcccaagcaggagggagacgtgaattttaatctgatttgtaatgtcgagaaaaaagtacacccagtaaccctcaatgttaaggctgaaggctacacaatgaacgtcgagatcaaatgcaaggacaggaccggatccataacattgcttacccctaatcagaccaacataatcaacttttatgaagtggagctcaatgaatgtgtacagtgcgaattcaactttattaacacagggaagtttaccttctccttccaggcacagctgtgcggctccaaaacattgctgcaatacctggagttctcaccaatcgatagtactgtcgacgtcggacaaagcgtgcatgccaccctttcattccagcctttgaagaagtgtgtgctgactgaccttgagctcatcatcaaaatcagtcacggtccgacatttatgtgcaacatctccggctgcgccgtttcgccagccatccacttcagtttcacctcgtacaacttcggcacctgttttatctatcaggctgggatgccaccatacaagcagactctggttattaccaacaaggaagaaacacccatgtcaatcgactgcttatatacgaatactacccacctcgaggttaattccagggttgacgttgttaagcccggaaacaccctggaaattcccattactttctatccgagagagtctatcaattatcaggaactgatcccttttgaaatcaatggtctgagccagcaaaccgttgagatcaagggaaaaggcaccaagatgaaaatccttgttctcgacccagccaacaggattgtgaaactgggagcagtgctgccaggacaggttgtgaaacgtacagtttcaatcatgaacaattcgctggctcagcttacctttaatcagtcaatcctgttcaccatcccggaattacaggaacctaaagtgctcactttagctcccttccataacatcactcttaagcctaaggaggtttgcaagctcgaggtcatcttcgccccaaaaaaaagagtcccccctttctctgaggaagtctttatggaatgtatggggttacttaggccactgttccttctgagtggttgttgtcaggcgctggaaatctctctggatcaggagcatatcccttttggtccagtggtctatcagactcaggccaccaggaggatactgatgatgaatacaggggatgtgggtgccagatttaagtgggatattaagaagttcgagcctcatttcagcatcagccctgaggaggggtatatcacttcaggaatggaggtgtcttttgaggtgacttaccacccaacggaggtcggaaaagaaagcttgtgcaaaaatattctgtgttacatccaggggggatcccctttgtcactcaccctaagcggcgtctgcgttggcccaccagccgttaaggaggtggttaactttacatgccaagtacgctctaagcacacacagacaattctcctgagcaacaggacaaaccagacatggaatctgcaccctatattcgagggcgagcattgggagggccctgagttcattactcttgaggcccatcagcagaacaagccatacgaaattacttaccgacctaggaccatgaacctggaaaaccggaagcaccaggggaccttgttcttcccactgccggacggcacaggctggctgtacgcattgcacggcacaagcgagttgcctaaagctgttgctaacatttacagggaggtgccctgtaaaacgccatacacagaactcttacctataactaattggcttaacaagcctcaaaggtttagagtgattgtcgagatactgaaacctgagaaacccgatctctctataacaatgaaagggttagactacatcgacgttttgagtgggagtaagaaggactacaaactcaattttttctcccataaggaagggacttatgcagccaaagtgatttttaggaatgaggtgacaaacgaattcctgtactataatgtttcctttcgagtgatcccatcaggcattattaaaaccatcgaaatggttacacctgtccggcaggtagctagcgcgtcgatcaagctcgagaaccctctgccttactctgtaaccttttccaccgagtgcagaatgcccgatattgctctgccctcccagttcgtggtccccgctaacagtgaggggacctttagtttcgaattccagcctttgaaggctggagaaacctttggacgactgaccctgcataataccgatctgggctactaccagtacgagctctatctgaaagctacaccagcactgcccgaaaaacccgttcatttccaaaccgtactggggtcttcccagattattttggtgaaatttatcaactacacacggcagaggacagaatactattgccgcacggactgtaccgatttccacgcggagaagctaatcaacgccgctcccggtgggcagggaggaaccgaagcgtctgtggaagtcctgttcgaaccaagtcatttgggggagactaagggtatcctcatcttaagttctctggctggcggtgagtatatcatcccgttatttggaatggccctgccaccgaaaccacaagggccattttccattcgagctgggtacagtatcattattccgtttaaaaacgtattctaccatatggtgaccttctctattattgtggacaatccagcattcacaatccgcgcaggagagtctgtgagacctaaaaaaataaacaatataactgtgagcttcgaaggcaacccgtctggatcaaagaccccaatcaccactaaattgaccgtgagctgcccgccaggtgagggttctgaaactggcgtcaagtgggtgtattacctgaagggcataactctgtag

SEQ ID NO: 95763 - DNA, 2223 bp, Artificial Sequence
  derived and/or modified sequence
atgacgtcccgccgtctcgaggaatcaatgggggctgtgcagatgggccttgtaaatatgttcaaaggcttccagtctaaggtgcttcctcctctttcacctaaggtggttaccgaggaggaggtaaataggatgctgacccccagcgagttcttaaaggagatgagcctgacaacagagcagcgactcgcaaagacaagactgatgtgccgaccccaaataatcgagctcctcgatatgggggagactacacaccagaaattctccggaatcgacctggaccaggcattattccagcctttcccatctgagattatcttccagaactataccccgtgcgaagtgtatgaagtcccactaatccttcgcaataacgacaagataccacgattagttaaggtggtggaggagagcagcccgtatttcaaggtgatttctccaaaagatattggccataaggtcgctcccggagttccgagcattttccgtattctgttcacccctgaagagaacaaggactatgctcacacattaacttgcgtaaccgaaagagagaaatttatagtgccgataaaagccagaggggctcgggctattttggacttccccgataaactcaacttctccacgtgtcccgtgaagtattcaacccagaaaattctactggtgaggaatattggaaacaaaaatgcagtctttcacatcaagacttgccgacccttttctatcgaacctgccatcggaacattgaatgtcggcgaaagcatgcagctcgaggtggagttcgagccccagtctgtcggagatcattcagggcgactgatagtatgctatgatacgggagagaaggtgttcgtgagtctatatggtgccgctatagatatgaatattaggttggacaagaattcccttacgatcgagaaaacttacatatccttagctaaccagcggacgataacgattcacaaccgatcaaacataattgcccactttctttggaaggtctttgccacgcagcaggaagaggatagggaaaagtatagggcgtgcgatgatttgatcaaagaggagaaggacgaaacggatgaatttttcgaggagtgtattactgacccactcttaagggagcacctgtcagttttgtctcgcacgttcgccaaccaacgacgactggtgcagggcgacagcaagctcttttttaataacgtgttcacagtggagcccctggaaggggatgtgtggccaaattcatctgccgagatcactgtgtactttaaccccctagaagctaagttgtatcaacagactatttattgcgacatccttggcagggagatacgcctccctctgaggattaaaggcgagggtatgggccctaagatacacttcaatttcgaactgctggacatcggaaaagtgtttaccggcagcgcccactgctacgaggccatcctatacaataaaggttctatcgacgccctattcaatatgactccaccaacgagcgctttgggtgcgtgtttcgtgttctcccccaaagaaggcataatcgaaccatccggggtccaggcgatccaaatttccttctcttccaccatcctgggaaacttcgaggaagaattcttggtaaacgtgaacggatctcccgaaccagtaaagctgacaattcgcggatgcgttatcgggcctaccttccattttaacgtccctgcactgcacttcggtgacgtgagcttcgccacacaggagctccgggatccccaggtgctgatacctttccaaaggtttcctcacaccctcatttgcagcctgaataacacttcgcttatcccaatgacgtacaagctgcgcattcccggagacggtctggggcataaaagcatttcctactgcgaacaacacgtggactacaagagaccttcttggacaaaagaagaaatttctagcatgaagcctaaggaatttactatatccccagattgcggtaccatcagaccccagggtttcgccgcaatccgcgttactctctgctcaaacaccgtgcaaaagtatgaactcgccctcgtcgtggatgtcgaggggattggcgaggaggtgctggctctactgattaccgccagtgctcctgaactatgcaaccggaaggtgatgctctctgtgcttcagtggaagatccatagagccaagaggtccctgccgcgagacacagttgccgtcacttag

SEQ ID NO: 95764 - DNA, 3645 bp, Artificial Sequence
  derived and/or modified sequence
atgaccagccgccgactcgaggagtccatgggagccgtgcagatggggctggttaacatgtttaagggttttcagagcaaggtcctgcctcctctgtcacctaaagtagtgactgaagaagaggtcaaccggatgctcacacccagcgagttcttaaaggagatgtccttgacgacagagcagcgcttagccaagacacggctgatgtgtcgccctcagattatcgagcttctggatatgggagaaacaacgcatcagaagttctctggaattgaccttgatcaggcactattccagccatttccttctgaaataatatttcagaactatacgccttgtgaggtgtatgaagtcccgcttattctccgcaataatgataagattccccgattggtgaaagtggttgaggaatccagtccttatttcaaggtaattagtcctaaggacattggacacaaagtcgcacccggagtaccgtccatttttagaatcctgttcactcccgaagagaataaagactatgctcatacacttacctgtgttaccgaacgagagaagttcatcgttcctatcaaggctcgaggcgctcgtgccattttggattttcccgacaagctcaactttagtacttgccctgtgaaatattccacccagaaaatactgttggtgcgcaatatcgggaataagaatgctgtgttccacattaagacgtgtaggccctttagcatcgagcctgcaatcggtactctgaatgtcggagagtccatgcagcttgaggttgagtttgaacctcagagcgtgggcgatcactccgggaggctgatcgtgtgctacgacacaggtgagaaagtcttcgtttccctgtacggcgctgcaattgatatgaacatccgattggacaaaaacagccttaccattgaaaaaacatatatctctttagctaatcagcggacgattaccatccacaaccgaagtaacattattgctcacttcctttggaaagtcttcgccacccagcaggaggaagaccgcgaaaagtatcgggcttgtgatgacctcattaaggaagagaaagacgaaacagatgagttcttcgaagagtgtatcacagatcccttgttaagggagcacctgtctgttctgagccgcacatttgccaaccagagaaggctagttcagggagactctaaactcttttttaataatgtgtttaccgtggagccccttgaaggcgacgtgtggcctaacagttctgccgaaatcacagtctatttcaatccattggaggcaaaactctatcagcagacaatatactgcgatatcctgggtcgggaaataagactgcccctacgcataaaaggcgaaggcatgggtcccaagatccactttaacttcgaattgctcgatattgggaaagtattcacggggtccgctcactgctacgaggctatcctctacaacaaaggatctatcgacgcactgtttaacatgactcccccaacatctgcccttggggcttgtttcgttttttctcccaaggaggggatcatcgagccgtccggcgtgcaggcaatccaaattagctttagctccaccatactaggcaactttgaagaggaatttttggttaatgtgaatggctccccggaacccgttaagttgaccattagggggtgtgtcattggcccaacttttcattttaacgttcccgctctgcatttcggtgacgtatcctttggcttcccacatacactaatctgttctctgaacaacaccagtttgattcctatgacttacaagctgcgcatccccggtgacggacttggccacaagtccatctcttactgcgaacaacacgtggattacaagcggccaagctggacgaaagaggagatttccagtatgaagcctaaggagtttacaatttcacctgattgtggcacaattcgtccccaagggttcgcggctattagagtgactctgtgcagtaataccgttcagaaatacgagctggccttggtcgtcgatgtagagggtattggagaagaagttctagcactcctcattacagcacgctgcgtagtgccggctctccacctggtcaatacggaagtggatttcggacactgctttttgaaatacccctatgagaaaaccctccaactagccaaccaggacgatctgcctggcttctatgaggtgcagccccaggtgtgcgaagaagttccaaccgtcctcttcagcagccctaccccttctggagtgatcagtcctagctccaccatccatataccgctagtgctggaaacgcaggtaaccggagagcataggagtactgtgtacatctctatcttcggctctcaggatcccccactcgtgtgtcatctaaagtcagccggtgagggcccagtgatttatgtccatcccaatcaggtagattttgggaatatatatgttttgaaggatagctctcggatcctcaatctgtgtaaccaaagcttcataccagccttcttccaagcccatatggcccacaaaaaatcactgtggacaattgagcccaatgaggggatggttccacctgagacagatgtccaactcgccctgacagccaacctgaacgacaccctgacattcaaagattgtgtcatcctggacattgaaaattcgagcacataccggattcccgtccaggcatcaggaaccggcagcacaatcgtctccgacaaaccttttgctcctgagctcaaccttggcgcacatttctcgctcgacactcactattaccacttcaaactgatcaacaagggacggaggatccagcaactattttggatgaacgattctttcaggccccaggctaaattgtccaagaagggacgggtcaagaaaggccacgctcatgtgcaacctcagccctccggttcccaagagcctcgtgatcctcagtcccccgttttccatctgcatcccgctagtatggagctttatcctggtcaggccattgatgttattctcgagggctacagcgcgaccccacggaagccaaattccatcctgaaaccagactatcagccccttgccattaagaatatttccactctcccagtgaacctgttactatcaacctcagggccatttttcatctgtgaaactgacaaatcactcctccccgcaacaccagaacctattaaactggagattgatgaagaaaagaacctgctgattaaatttgacccaagctatagaaacgacctgaacaattgggttgctgaggaaattttagcaatcaagtacgtggagcaccctcagattgattcgctggatctcagaggcgaagtccactatcctaacttgtcttttgagactaaagagctcgactttggatgtatccttaacgataccgaactgatccgctacgtgaccatcactaactgcagccctttagtggtcaagtttagatggttcttccttgtaaatgacgaggagaaccagattcgcttcgtcacgctcccaaaaaagccttacagcgctcctgtgtctcagatggagtccatccccgcaacgtccgaagccgcatcacctcctgccattcttgtaaccgtggagagtccagaaatggacctcaatgacttcgtaaagtag

SEQ ID NO: 95765 - DNA, 15366 bp, Artificial Sequence
  derived and/or modified sequence
atgaccagcagaagactggaggagagcatgggcgccgtgcagatgggcctggtgaacatgttcaagggcttccagagcaaggtgctgccccccctgagccccaaggtggtgaccgaggaggaggtgaacagaatgctgacccccagcgagttcctgaaggagatgagcctgaccaccgagcagagactggccaagaccagactgatgtgcagaccccagatcatcgagctgctggacatgggcgagaccacccaccagaagttcagcggcatcgacctggaccaggccctgttccagcccttccccagcgagatcatcttccagaactacaccccctgcgaggtgtacgaggtgcccctgatcctgagaaacaacgacaagatccccagactggtgaaggtggtggaggagagcagcccctacttcaaggtgatcagccccaaggacatcggccacaaggtggcccccggcgtgcccagcatcttcagaatcctgttcacccccgaggagaacaaggactacgcccacaccctgacctgcgtgaccgagagagagaagttcatcgtgcccatcaaggccagaggcgccagagccatcctggacttccccgacaagctgaacttcagcacctgccccgtgaagtacagcacccagaagatcctgctggtgagaaacatcggcaacaagaacgccgtgttccacatcaagacctgcagacccttcagcatcgagcccgccatcggcaccctgaacgtgggcgagagcatgcagctggaggtggagttcgagccccagagcgtgggcgaccacagcggcagactgatcgtgtgctacgacaccggcgagaaggtgttcgtgagcctgtacggcgccgccatcgacatgaacatcagactggacaagaacagcctgaccatcgagaagacctacatcagcctggccaaccagagaaccatcaccatccacaacagaagcaacatcatcgcccacttcctgtggaaggtgttcgccacccagcaggaggaggacagagagaagtacagagcctgcgacgacctgatcaaggaggagaaggacgagaccgacgagttcttcgaggagtgcatcaccgaccccctgctgagagagcacctgagcgtgctgagcagaaccttcgccaaccagagaagactggtgcagggcgacagcaagctgttcttcaacaacgtgttcaccgtggagcccctggagggcgacgtgtggcccaacagcagcgccgagatcaccgtgtacttcaaccccctggaggccaagctgtaccagcagaccatctactgcgacatcctgggcagagagatcagactgcccctgagaatcaagggcgagggcatgggccccaagatccacttcaacttcgagctgctggacatcggcaaggtgttcaccggcagcgcccactgctacgaggccatcctgtacaacaagggcagcatcgacgccctgttcaacatgaccccccccaccagcgccctgggcgcctgcttcgtgttcagccccaaggagggcatcatcgagcccagcggcgtgcaggccatccagatcagcttcagcagcaccatcctgggcaacttcgaggaggagttcctggtgaacgtgaacggcagccccgagcccgtgaagctgaccatcagaggctgcgtgatcggccccaccttccacttcaacgtgcccgccctgcacttcggcgacgtgagcttcggcttcccccacaccctgatctgcagcctgaacaacaccagcctgatccccatgacctacaagctgagaatccccggcgacggcctgggccacaagagcatcagctactgcgagcagcacgtggactacaagagacccagctggaccaaggaggagatcagcagcatgaagcccaaggagttcaccatcagccccgactgcggcaccatcagaccccagggcttcgccgccatcagagtgaccctgtgcagcaacaccgtgcagaagtacgagctggccctggtggtggacgtggagggcatcggcgaggaggtgctggccctgctgatcaccgccagatgcgtggtgcccgccctgcacctggtgaacaccgaggtggacttcggccactgcttcctgaagtacccctacgagaagaccctgcagctggccaaccaggacgacctgcccggcttctacgaggtgcagccccaggtgtgcgaggaggtgcccaccgtgctgttcagcagccccacccccagcggcgtgatcagccccagcagcaccatccacatccccctggtgctggagacccaggtgaccggcgagcacagaagcaccgtgtacatcagcatcttcggcagccaggacccccccctggtgtgccacctgaagagcgccggcgagggccccgtgatctacgtgcaccccaaccaggtggacttcggcaacatctacgtgctgaaggacagcagcagaatcctgaacctgtgcaaccagagcttcatccccgccttcttccaggcccacatggcccacaagaagagcctgtggaccatcgagcccaacgagggcatggtgccccccgagaccgacgtgcagctggccctgaccgccaacctgaacgacaccctgaccttcaaggactgcgtgatcctggacatcgagaacagcagcacctacagaatccccgtgcaggccagcggcaccggcagcaccatcgtgagcgacaagcccttcgcccccgagctgaacctgggcgcccacttcagcctggacacccactactaccacttcaagctgatcaacaagggcagaagaatccagcagctgttctggatgaacgacagcttcagaccccaggccaagctgagcaagaagggcagagtgaagaagggccacgcccacgtgcagccccagcccagcggcagccaggagcccagagacccccagagccccgtgttccacctgcaccccgccagcatggagctgtaccccggccaggccatcgacgtgatcctggagggctacagcgccacccccagaatcgtgaaggagaagctggtgtgccacgccatcatcggcgcccagaagggcaagagcctggtgatggccgtgaacatcacctgcgagttcgtggcccccctgatccagctgagcaccaagcagctgatctacagactggagaagaagcccaacagcatcctgaagcccgactaccagcccctggccatcaagaacatcagcaccctgcccgtgaacctgctgctgagcaccagcggccccttcttcatctgcgagaccgacaagagcctgctgcccgccacccccgagcccatcaagctggagatcgacgaggagaagaacctgctgatcaagttcgaccccagctacagaaacgacctgaacaactgggtggccgaggagatcctggccatcaagtacgtggagcacccccagatcgacagcctggacctgagaggcgaggtgcactaccccaacctgagcttcgagaccaaggagctggacttcggctgcatcctgaacgacaccgagctgatcagatacgtgaccatcaccaactgcagccccctggtggtgaagttcagatggttcttcctggtgaacgacgaggagaaccagatcagattcgtgaccctgcccaagaagccctacagcgcccccgtgagccagatggagagcatccccgccaccagcgaggccgccagcccccccgccatcctggtgaccgtggagagccccgagatggacctgaacgacttcgtgaagaccgtgctggtggacgaggacgccagacccgaggagaaggagctgagaaagaccaaggccagcagcgtgatcagcgacgagatcaagatcagcagcaccgagatcgagagaatctacagcagccagagccaggtggaggaccaggagagcctgcagacctgcgagcagaacgagatgctgagcatcggcatcgaggaggtgttcgacatcctgcccctgttcggcgtgctgcagccccacagcagccaccagatcagcttcaccttctacggccacgccaacatcatcgcccaggccaaggccctgtgcgaggtggaggagggccccacctacgagatcaccctgaagggcgaggccagcctggtgaactacagcttcgacaccaaggacatccactacggcctgcagctgttcgaccacgtgaccgagagagagatcaccctgaccaacatgggcaaggtgggcttcgagttcaaggtgctgaccgaccaccagagcagccccgacaacctgctgcccggcgtgcccctgatcctgcccgtgagcggcttcatcagcagccaccaggagcaggtgctgaaggtgtactacctgcccggcgtgcccgaggtgttcaagagaagcttccagatccagatcgcccacctggaccccgagaacatcaccctgagcggcgagggcatcttcccccagatctgcctggacctgcccagaaacctgaccgccaacgagaagtacgagatgttcctgaaccaggccagaaagaacaccgacaaggagtacaacaagtgcgagatgctggaccacttcgacatcatcaccgaggaggtgcccgaggacgagcccgccgaggtgagcgcccacctgcagatggaggtggagagactgatcgtgcagagctacgtgctggagcaccagaagaccaccacccccgaccccatggacgacccctgcttcagccacagaagcagaagaaagctggccaagatccagctgcccgagtacatcctggacttcggctacatcatcctgggcgaggtgagaacccacatcatcaagatcatcaacaccagccacttccccgtgagcttccacgccgacaagagagtgctgcacgagaccggcttcagcaccgagctggacagagtgaagaacctgccccactgcgagaccgagatcttcgaggtgagattcgacccccagggcgccaacctgcccgtgggcagcaaggaggtgatcctgcccatcaaggtggtgggcggccccaccgtgcacatctgcctgcaggccaaggtgaccatccccaccatgaccctgagcagaggcaaggtggacttcgccaccatccagtgcggccagtgcctggtggagaccatccagctgagcaaccacctgcaggtgccctgcgagtggttcgtgcagagccagaagcccgtggacaagctggagaagcacatgcccaagtacctgagacagaagctgagagccgagctgaagcccaagaccagaatcttcgagatccagcccatcagcggcgtgctggaccccggcgagaagagcaacgtgcaggtgaagttcatgcccaaggaggagaagttctacagccagaccctggtgttccagatcgcccagagcgcccagaagctgaccctgctggccagaggccagggcctggagcccagactggagttcagccccagcgtgctggacctgggccccctgctgctgtgcgcccccggcgacgaggccgaggtgatcgtgaagaacccctgcaacttccccatcgagttctacagcctggagttcgaccagcagtacctgatcgaggagaagatcctgagaaagctgaagggctacgacagctacaacaccctgctgctgccccccagaaaccccggcgagaagctgccccccgagctgtacgagtacttcaaggagatcaagaagagcaaggaggagcagatgagagccaagtacctggagaacctggcccaggagaacgaggaggaggacatcaccagcagcgaccagggcaccagcaacagcaccaagagaaccagcctgagcagaggcatcagcgtgaccagcaacctggaggagtggcacgccctgctggtggagagcaagacctacctggaggaggaggaggacgaggagagcctggagaagatcatcttccagaccgacaagctgcagagcatcgacagccacagcatggaggaggtgggcgaggtggagaacaaccccgtgagcaaggccatcgccagacacctgggcatcgacatcagcgccgagggcagactggccaagaacagaaagggcatcgccatcatcatccacggcacccccctgagcggcaagagcgccaacgccgtgagcgtggccaagtactacaacgccgcctgcctgagcatcgacagcatcgtgctggaggccgtggccaacagcaacaacatccccggcatcagagccagagagctgtgcatcagagccgccatcgagcagagcgtgaaggagggcgaggaggccgcccaggaggccgccgtgggccagaacgtgatcggccagggcagactgagcaccgacaccctgggcaagctggccagcgagatgaccctggtggcccccgagatcaagcccggcaagagcgtgagaggcagcgtggtgatcaccaagagcaaggccgacagccacggcagcggcagccagaagcagcaccacagccaccagagcgagaccccccagatcagcagcagccccctgccccccggccccatccacagatggctgagcgtgagccccagcgtgggcggcgagaccggcctgatgagctgcgtgctgcccgacgagctgctggtgcagatcctggccgagagaatccagctgagcgactgctacagaggcgtggtgttcgacggcctggacaccctgttcgcccagaacgccgccgccgccctgctgtgcctgctgaaggccatcggcagcagagagcacatctacatcctgaacatggcccaggactacgccgccatgaaggcccaggagaaggccaagaaggagcaggaggagagaaagcacaagggcgccctggagaaggagaaggagagactgcagaacatggacgaggaggagtacgacgccctgaccgaggaggagaagctgaccttcgacagaggcatccagcaggccctgagagagagaaagaagagagagcaggagagactggccaaggagatgcaggagaagaagctgcagcaggagctggagagacagaaggaggaggacgagctgaagagaagagtgaagaagggcaagcagggccccatcaaggaggagccccccatgaagaagagccaggccgccaacaagcaggtgccccccctgaccaaggtggacgtgaagatggagaccatcgagagaaagatcagcgtgagagagcagaccatgagcgagaaggaggagctgaacaagaagaagagaaacatgggcgacgtgagcatgcacggcctgcccctggtgcaggaccaggaggacagcgagggcgacaacagcaaggaccccgacaagcagctggcccccaagttcaagacctacgagctgaccctgaaggacgtgcagaacatcctgatgtactgggacagaaagcagggcgtgcagctgccccccgccggcatggaggaggccccccacgagcccgacgaccagagacaggtgcccctgggcggcagaagaggcagaaaggacagagagagagagagactggagaaggagagaaccgagaaggagagactggagagagagaaggccgagagagagagactggagaagctgagagccctggaggagagaagcgactgggagggcgagggcgaggaggaccacgagggcaagaaggagaaggacctgggcgtgcccttcctggacatccagacccccgacttcgagggcctgagctggaagcaggccctggagagcgacaagctgcccaagggcgagcagatcctggacatcctgggcctgggcgccagcggcccccccatccccccccccgccctgttcagcatcgtgagctaccccgtgaagagaccccccctgaccatgaccgacgacctggagcacttcgtgttcgtgatcccccccagcgaggacatcagcctggacgagaagaaggagatggagatcgagagcgacttcctggccaccaccaacaccaccaaggcccaggaggagcagaccagcagcagcaagggcggcaagcagaagatgaaggagaagatcgaccaggtgttcgagatccagaaggacaagagacacatggccctgaacagaaaggtgctgagcggcgagcccgccggcaccatcagccagctgagcgacaccgacctggacaacttcaacggccagcacagccaggagaagttcaccagactgaaccacttcagatggatcgtgcccgccaacggcgaggtgaccctgcaggtgcacttcagcagcgacgagttcggcaacttcgaccagaccttcaacttcgagatcctgggcacctgctgccagtaccagctgtactgcagaggcatctgcacctacccctacatctgccaggaccccaaggtggtgttcccccagagaaagatggacatgaagaccaacgaggtgatcttcaagaagtacgtgatgagcaccgagacctactacttcggccccctgctgtgcggcaagagcagagacaagtacaagagcagcctgttccccggcaacatggagaccctgaccatcctgaacaccagcctgatggtggtggaggccagcttctacttccagaacgacgtgaaggccaacacctacttcctggagcccaacaccatggtgctgaagcccaacgagaagcagatcctgaacgtgtgggcctaccccaccagcgtgggcgtgttcgaggacagcatcgtgtgctgcatcaacgacaaccccgagcccgccatcttccagctgagctgccagggcatcagacccgagctggagctggagcccagacagctgcacttcgacagactgctgctgcacagacaggagagcagagtggtgctgctgagaaacgtgaccctgctgcccgtggcctggagaatcaccagcctggagcacctgggcgacgacttcaccgtgagcctgatgcagggcaccatcccccccgaggccgagtacggcctgcacctgtacttccagcccaccaagcccgtgaacatcaagaaggccatcagactggaggtgctggacgccgagaacctgctgggcgtggtgcagatcgagaacatcatggtgttcgccgaggcctacgacatcgccctggacatcaccttccccaagggcgccgagggcggcctggacttcggcatcgtgagagtgaccgaggaggccaagcagcccctgcagctgaagaacagaggcaagtacgagatcgccttcagcttcagcgtggacagcgtgggcatcagcacccccaacatcaacagcatgatcagcgtgcagcccaagaagggcagcctgacccccaccgagaagcccaccaacgtgcaggtgttcttccacgccaagaaggaggtgaagatcgagcaccagcccgtgctgagatgccagatcatcgagcccaacatcagcgagggcggcgagatcatcgccagcatccccatcaagttcagcgccaacgccgtgtacagcaagtacaacatcacccccagcagcgtgatcaacttcggcgccctgatctgcggcaccagaaagagcaccaccttcaccatcgagaaccagggcgtgaccgacttcaagttcgccctgtacaagctgaccggcgagagccccatccaccagaagaaggccgccagccacgtgagacacgccagaagcagagagagcgagagcttctacaagaccggcagcagcagagccgccaagttcagcgacaccatccagaaggaggtgaccaccaccggccaggccagattcgcccacggcatgttcaccgtgtaccccggcttcggcagcatccccagcggcggccagcaggtgatcaacgtggactgcgtggccgacgccatgggcaagtgcgaggagttcatcgccatcgacatcagcggcagagaccccgccgtgcaccccgccggcatcctgtacaccctgctggccgaggcctgcctgcccgccttcgtgaccgagaacaacgccctgatcttcgaggagcaccagatctgcaccagcgccaacctgcaccacatcctgcagaccatcgagagcggcggcctgttcgtggaggacgagaacaagttcatcttctgcaacgtgctggtgggcagacaggccaaggccagattcaagatcagcaacgtgggcaagatcacctgcgacgtgaacatcgtggtgagacccatcagcaacaagcccttcgccagaatcgtggacatcttcgaggtggagcccagcaagatgtgcatcgccagccacagccacgccttcgccaccgtgagcttcaccccccagatcatgcagaactaccagtgcatcttcgaggccaccctggacggcctgcccagcaccctggccaagagcagaggcctggtgttcgacatcgccggcgagggcaacctgcccagagtgaccgtggtgagacccgtgctgcacaaccagtacggcaaccccctgctgctgttcaagagactgctgctgggccacagcgagaagctgcccctgatcctgaagaacaacggcgtgctgcccgcccagctgcacgtggacctgcaggacgagctgggcgtgttcagcctgaagggcagacccaccaccgcctacatctacatcaccgaggagaacaagccccacgtgaaggccaagaaggcccacaccgccagcctggtggtgagccccggcgacaccgccgagttcgacgtggtgttccacagccagaaggtgggcagaatgagaggcatcatccacctgagcgtgatcaacaaccagtacgaggagaccagcatccacatggtgggcgagggctacgaggacgacatcaccctggacaacatccacggcctggtggcccccaccagccaggaggacatcagcatcagcgagttcaccgagatcatcgaggacaacgacatggaggacctggtggccgccgccctggtggaccacatccagttcggcgactgccacatcggccacagctacaacgccagcttcaccgtgaccaaccacagccaggtgaacctgatcagattcgagtggcccgtgagcgccaccatcgccttcagcccccagatgggccacctgcaccccggctgcgccaaggacatcgtggtgaccatgaagagcgacgtgcccatcaacctgaagaacatgagaatcagatgcaagctgagcagaatcatgttccagctgcccgccgaccaggtgcccgactgggacgacagaatgcacaccgtgaagtgggtggacgtgcccagaaacatgcccggcaccttcaccaccaagagaaaggtgatcgagaccgaccccgagcccgcccacagcgtgctggaggagaactaccaggagctgcagctgcagatcagcgccaacgtggacttcgccagctaccactgccaggccagagacgtgagattcaaggagaccctggtgtaccagaccagagtgttcgagttcgacgtgatcaacagcggcagagtgcagctggagttcagctgggtgagcgaggacaccagcaaggccgtgagcttcgccaagcccgaccaccagggcagcgcccagaaggaccagctgagccagggcaccatgcacaccggcagcaccctggacagcaccatggaccactgggccgagggcagcccccagcccttcagcgtggagcccagcagcggcatcgtgcccgtgggcaagatccagaagttcaaggtgaagttcagccccctggacatcggcgacttcgagagcaacctgttctgccagatccccaacctgccccccggcgagcagggccccgtgctggtggccaagggcagaagcaccctgcccatctgccacttcgacctgaaggacagcgactacatcagcggccaccagagaaaccccgagctgagaggcagcagcggcggcgccctggaccccaacaccagagtgatcgagttcaccaccgtgggcatcggcggcaagaacctgagaaccttcaccatcctgaaccccaccaacagcacctacagcttctgctggatcagcgaggagatcgagagcctgcagaaccccgccgccttcacctgcctgaccgagaagggcttcatccaccccgagaagaaggccgagatcgtgttccagttcacccccttccacctgggcatcaccgagagcagctggaccttcctgatccccgagcacaacatcaccgtgcccttcctgctggtgggcaagaccaccgagcccctgatcagcctgaacaagagccacctgaacttcagcagcctgctgatcggcagagaggccagagagaccgtgcagatcatcaacaaggaggagcagggcttcgacttcagcttccaggacaacagcagatacagcgagggcttcagcaacagcctgctggtgtgccccatggagggctggatcccccccctgagcagattccccatcgacatcttcttcacccccaagcaggagggcgacgtgaacttcaacctgatctgcaacgtggagaagaaggtgcaccccgtgaccctgaacgtgaaggccgagggctacaccatgaacgtggagatcaagtgcaaggacagaaccggcagcatcaccctgctgacccccaaccagaccaacatcatcaacttctacgaggtggagctgaacgagtgcgtgcagtgcgagttcaacttcatcaacaccggcaagttcaccttcagcttccaggcccagctgtgcggcagcaagaccctgctgcagtacctggagttcagccccatcgacagcaccgtggacgtgggccagagcgtgcacgccaccctgagcttccagcccctgaagaagtgcgtgctgaccgacctggagctgatcatcaagatcagccacggccccaccttcatgtgcaacatcagcggctgcgccgtgagccccgccatccacttcagcttcaccagctacaacttcggcacctgcttcatctaccaggccggcatgcccccctacaagcagaccctggtgatcaccaacaaggaggagacccccatgagcatcgactgcctgtacaccaacaccacccacctggaggtgaacagcagagtggacgtggtgaagcccggcaacaccctggagatccccatcaccttctaccccagagagagcatcaactaccaggagctgatccccttcgagatcaacggcctgagccagcagaccgtggagatcaagggcaagggcaccaagatgaagatcctggtgctggaccccgccaacagaatcgtgaagctgggcgccgtgctgcccggccaggtggtgaagagaaccgtgagcatcatgaacaacagcctggcccagctgaccttcaaccagagcatcctgttcaccatccccgagctgcaggagcccaaggtgctgaccctggcccccttccacaacatcaccctgaagcccaaggaggtgtgcaagctggaggtgatcttcgcccccaagaagagagtgccccccttcagcgaggaggtgttcatggagtgcatgggcctgctgagacccctgttcctgctgagcggctgctgccaggccctggagatcagcctggaccaggagcacatccccttcggccccgtggtgtaccagacccaggccaccagaagaatcctgatgatgaacaccggcgacgtgggcgccagattcaagtgggacatcaagaagttcgagccccacttcagcatcagccccgaggagggctacatcaccagcggcatggaggtgagcttcgaggtgacctaccaccccaccgaggtgggcaaggagagcctgtgcaagaacatcctgtgctacatccagggcggcagccccctgagcctgaccctgagcggcgtgtgcgtgggcccccccgccgtgaaggaggtggtgaacttcacctgccaggtgagaagcaagcacacccagaccatcctgctgagcaacagaaccaaccagacctggaacctgcaccccatcttcgagggcgagcactgggagggccccgagttcatcaccctggaggcccaccagcagaacaagccctacgagatcacctacagacccagaaccatgaacctggagaacagaaagcaccagggcaccctgttcttccccctgcccgacggcaccggctggctgtacgccctgcacggcaccagcgagctgcccaaggccgtggccaacatctacagagaggtgccctgcaagaccccctacaccgagctgctgcccatcaccaactggctgaacaagccccagagattcagagtgatcgtggagatcctgaagcccgagaagcccgacctgagcatcaccatgaagggcctggactacatcgacgtgctgagcggcagcaagaaggactacaagctgaacttcttcagccacaaggagggcacctacgccgccaaggtgatcttcagaaacgaggtgaccaacgagttcctgtactacaacgtgagcttcagagtgatccccagcggcatcatcaagaccatcgagatggtgacccccgtgagacaggtggccagcgccagcatcaagctggagaaccccctgccctacagcgtgaccttcagcaccgagtgcagaatgcccgacatcgccctgcccagccagttcgtggtgcccgccaacagcgagggcaccttcagcttcgagttccagcccctgaaggccggcgagaccttcggcagactgaccctgcacaacaccgacctgggctactaccagtacgagctgtacctgaaggccacccccgccctgcccgagaagcccgtgcacttccagaccgtgctgggcagcagccagatcatcctggtgaagttcatcaactacaccagacagagaaccgagtactactgcagaaccgactgcaccgacttccacgccgagaagctgatcaacgccgcccccggcggccagggcggcaccgaggccagcgtggaggtgctgttcgagcccagccacctgggcgagaccaagggcatcctgatcctgagcagcctggccggcggcgagtacatcatccccctgttcggcatggccctgccccccaagccccagggccccttcagcatcagagccggctacagcatcatcatccccttcaagaacgtgttctaccacatggtgaccttcagcatcatcgtggacaaccccgccttcaccatcagagccggcgagagcgtgagacccaagaagatcaacaacatcaccgtgagcttcgagggcaaccccagcggcagcaagacccccatcaccaccaagctgaccgtgagctgcccccccggcgagggcagcgagaccggcgtgaagtgggtgtactacctgaagggcatcaccctgtag

SEQ ID NO: 95766 - DNA, 15363 bp, Artificial Sequence
  derived and/or modified sequence
atgaccagcagaagactggaggagagcatgggcgccgtgcagatgggcctggtgaacatgttcaagggcttccagagcaaggtgctgccccccctgagccccaaggtggtgaccgaggaggaggtgaacagaatgctgacccccagcgagttcctgaaggagatgagcctgaccaccgagcagagactggccaagaccagactgatgtgcagaccccagatcatcgagctgctggacatgggcgagaccacccaccagaagttcagcggcatcgacctggaccaggccctgttccagcccttccccagcgagatcatcttccagaactacaccccctgcgaggtgtacgaggtgcccctgatcctgagaaacaacgacaagatccccagactggtgaaggtggtggaggagagcagcccctacttcaaggtgatcagccccaaggacatcggccacaaggtggcccccggcgtgcccagcatcttcagaatcctgttcacccccgaggagaacaaggactacgcccacaccctgacctgcgtgaccgagagagagaagttcatcgtgcccatcaaggccagaggcgccagagccatcctggacttccccgacaagctgaacttcagcacctgccccgtgaagtacagcacccagaagatcctgctggtgagaaacatcggcaacaagaacgccgtgttccacatcaagacctgcagacccttcagcatcgagcccgccatcggcaccctgaacgtgggcgagagcatgcagctggaggtggagttcgagccccagagcgtgggcgaccacagcggcagactgatcgtgtgctacgacaccggcgagaaggtgttcgtgagcctgtacggcgccgccatcgacatgaacatcagactggacaagaacagcctgaccatcgagaagacctacatcagcctggccaaccagagaaccatcaccatccacaacagaagcaacatcatcgcccacttcctgtggaaggtgttcgccacccagcaggaggaggacagagagaagtacagagcctgcgacgacctgatcaaggaggagaaggacgagaccgacgagttcttcgaggagtgcatcaccgaccccctgctgagagagcacctgagcgtgctgagcagaaccttcgccaaccagagaagactggtgcagggcgacagcaagctgttcttcaacaacgtgttcaccgtggagcccctggagggcgacgtgtggcccaacagcagcgccgagatcaccgtgtacttcaaccccctggaggccaagctgtaccagcagaccatctactgcgacatcctgggcagagagatcagactgcccctgagaatcaagggcgagggcatgggccccaagatccacttcaacttcgagctgctggacatcggcaaggtgttcaccggcagcgcccactgctacgaggccatcctgtacaacaagggcagcatcgacgccctgttcaacatgaccccccccaccagcgccctgggcgcctgcttcgtgttcagccccaaggagggcatcatcgagcccagcggcgtgcaggccatccagatcagcttcagcagcaccatcctgggcaacttcgaggaggagttcctggtgaacgtgaacggcagccccgagcccgtgaagctgaccatcagaggctgcgtgatcggccccaccttccacttcaacgtgcccgccctgcacttcggcgacgtgagcttcggcttcccccacaccctgatctgcagcctgaacaacaccagcctgatccccatgacctacaagctgagaatccccggcgacggcctgggccacaagagcatcagctactgcgagcagcacgtggactacaagagacccagctggaccaaggaggagatcagcagcatgaagcccaaggagttcaccatcagccccgactgcggcaccatcagaccccagggcttcgccgccatcagagtgaccctgtgcagcaacaccgtgcagaagtacgagctggccctggtggtggacgtggagggcatcggcgaggaggtgctggccctgctgatcaccgccagatgcgtggtgcccgccctgcacctggtgaacaccgaggtggacttcggccactgcttcctgaagtacccctacgagaagaccctgcagctggccaaccaggacgacctgcccggcttctacgaggtgcagccccaggtgtgcgaggaggtgcccaccgtgctgttcagcagccccacccccagcggcgtgatcagccccagcagcaccatccacatccccctggtgctggagacccaggtgaccggcgagcacagaagcaccgtgtacatcagcatcttcggcagccaggacccccccctggtgtgccacctgaagagcgccggcgagggccccgtgatctacgtgcaccccaaccaggtggacttcggcaacatctacgtgctgaaggacagcagcagaatcctgaacctgtgcaaccagagcttcatccccgccttcttccaggcccacatggcccacaagaagagcctgtggaccatcgagcccaacgagggcatggtgccccccgagaccgacgtgcagctggccctgaccgccaacctgaacgacaccctgaccttcaaggactgcgtgatcctggacatcgagaacagcagcacctacagaatccccgtgcaggccagcggcaccggcagcaccatcgtgagcgacaagcccttcgcccccgagctgaacctgggcgcccacttcagcctggacacccactactaccacttcaagctgatcaacaagggcagaagaatccagcagctgttctggatgaacgacagcttcagaccccaggccaagctgagcaagaagggcagagtgaagaagggccacgcccacgtgcagccccagcccagcggcagccaggagcccagagacccccagagccccgtgttccacctgcaccccgccagcatggagctgtaccccggccaggccatcgacgtgatcctggagggctacagcgccacccccagaatcgtgaaggagaagctggtgtgccacgccatcatcggcgcccagaagggcaagagcctggtgatggccgtgaacatcacctgcgagttcgtggcccccctgatccagctgagcaccaagcagctgatctacagactggagaagaagcccaacagcatcctgaagcccgactaccagcccctggccatcaagaacatcagcaccctgcccgtgaacctgctgctgagcaccagcggccccttcttcatctgcgagaccgacaagagcctgctgcccgccacccccgagcccatcaagctggagatcgacgaggagaagaacctgctgatcaagttcgaccccagctacagaaacgacctgaacaactgggtggccgaggagatcctggccatcaagtacgtggagcacccccagatcgacagcctggacctgagaggcgaggtgcactaccccaacctgagcttcgagaccaaggagctggacttcggctgcatcctgaacgacaccgagctgatcagatacgtgaccatcaccaactgcagccccctggtggtgaagttcagatggttcttcctggtgaacgacgaggagaaccagatcagattcgtgaccctgcccaagaagccctacagcgcccccgtgagccagatggagagcatccccgccaccagcgaggccgccagcccccccgccatcctggtgaccgtggagagccccgagatggacctgaacgacttcgtgaagaccgtgctggtggacgaggacgccagacccgaggagaaggagctgagaaagaccaaggccagcagcgtgatcagcgacgtgagatgccccttccacggcgaggagagaatctacagcagccagagccaggtggaggaccaggagagcctgcagacctgcgagcagaacgagatgctgagcatcggcatcgaggaggtgttcgacatcctgcccctgttcggcgtgctgcagccccacagcagccaccagatcagcttcaccttctacggccacgccaacatcatcgcccaggccaaggccctgtgcgaggtggaggagggccccacctacgagatcaccctgaagggcgaggccagcctggtgaactacagcttcgacaccaaggacatccactacggcctgcagctgttcgaccacgtgaccgagagagagatcaccctgaccaacatgggcaaggtgggcttcgagttcaaggtgctgaccgaccaccagagcagccccgacaacctgctgcccggcgtgcccctgatcctgcccgtgagcggcttcatcagcagccaccaggagcaggtgctgaaggtgtactacctgcccggcgtgcccgaggtgttcaagagaagcttccagatccagatcgcccacctggaccccgagaacatcaccctgagcggcgagggcatcttcccccagatctgcctggacctgcccagaaacctgaccgccaacgagaagtacgagatgttcctgaaccaggccagaaagaacaccgacaaggagtacaacaagtgcgagatgctggaccacttcgacatcatcaccgaggaggtgcccgaggacgagcccgccgaggtgagcgcccacctgcagatggaggtggagagactgatcgtgcagagctacgtgctggagcaccagaagaccaccacccccgaccccatggacgacccctgcttcagccacagaagcagaagaaagctggccaagatccagctgcccgagtacatcctggacttcggctacatcatcctgggcgaggtgagaacccacatcatcaagatcatcaacaccagccacttccccgtgagcttccacgccgacaagagagtgctgcacgagaccggcttcagcaccgagctggacagagtgaagaacctgccccactgcgagaccgagatcttcgaggtgagattcgacccccagggcgccaacctgcccgtgggcagcaaggaggtgatcctgcccatcaaggtggtgggcggccccaccgtgcacatctgcctgcaggccaaggtgaccatccccaccatgaccctgagcagaggcaaggtggacttcgccaccatccagtgcggccagtgcctggtggagaccatccagctgagcaaccacctgcaggtgccctgcgagtggttcgtgcagagccagaagcccgtggacaagctggagaagcacatgcccaagtacctgagacagaagctgagagccgagctgaagcccaagaccagaatcttcgagatccagcccatcagcggcgtgctggaccccggcgagaagagcaacgtgcaggtgaagttcatgcccaaggaggagaagttctacagccagaccctggtgttccagatcgcccagagcgcccagaagctgaccctgctggccagaggccagggcctggagcccagactggagttcagccccagcgtgctggacctgggccccctgctgctgtgcgcccccggcgacgaggccgaggtgatcgtgaagaacccctgcaacttccccatcgagttctacagcctggagttcgaccagcagtacctgatcgaggagaagatcctgagaaagctgaagggctacgacagctacaacaccctgctgctgccccccagaaaccccggcgagaagctgccccccgagctgtacgagtacttcaaggagatcaagaagagcaaggaggagcagatgagagccaagtacctggagaacctggcccaggagaacgaggaggaggacatcaccagcagcgaccagggcaccagcaacagcaccaagagaaccagcctgagcagaggcatcagcgtgaccagcaacctggaggagtggcacgccctgctggtggagagcaagacctacctggaggaggaggaggacgaggagagcctggagaagatcatcttccagaccgacaagctgcagagcatcgacagccacagcatggaggaggtgggcgaggtggagaacaaccccgtgagcaaggccatcgccagacacctgggcatcgacatcagcgccgagggcagactggccaagaacagaaagggcatcgccatcatcatccacggcacccccctgagcggcaagagcgccaacgccgtgagcgtggccaagtactacaacgccgcctgcctgagcatcgacagcatcgtgctggaggccgtggccaacagcaacaacatccccggcatcagagccagagagctgtgcatcagagccgccatcgagcagagcgtgaaggagggcgaggaggccgcccaggaggccgccgtgggccagaacgtgatcggccagggcagactgagcaccgacaccctgggcaagctggccagcgagatgaccctggtggcccccgagatcaagcccggcaagagcgtgagaggcagcgtggtgatcaccaagagcaaggccgacagccacggcagcggcagccagaagcagcaccacagccaccagagcgagaccccccagatcagcagcagccccctgccccccggccccatccacagatggctgagcgtgagccccagcgtgggcggcgagaccggcctgatgagctgcgtgctgcccgacgagctgctggtgcagatcctggccgagagaatccagctgagcgactgctacagaggcgtggtgttcgacggcctggacaccctgttcgcccagaacgccgccgccgccctgctgtgcctgctgaaggccatcggcagcagagagcacatctacatcctgaacatggcccaggactacgccgccatgaaggcccaggagaaggccaagaaggagcaggaggagagaaagcacaagggcgccctggagaaggagaaggagagactgcagaacatggacgaggaggagtacgacgccctgaccgaggaggagaagctgaccttcgacagaggcatccagcaggccctgagagagagaaagaagagagagcaggagagactggccaaggagatgcaggagaagaagctgcagcaggagctggagagacagaaggaggaggacgagctgaagagaagagtgaagaagggcaagcagggccccatcaaggaggagccccccatgaagaagagccaggccgccaacaagcaggtgccccccctgaccaaggtggacgtgaagatggagaccatcgagagaaagatcagcgtgagagagcagaccatgagcgagaaggaggagctgaacaagaagaagagaaacatgggcgacgtgagcatgcacggcctgcccctggtgcaggaccaggaggacagcgagggcgacaacagcaaggaccccgacaagcagctggcccccaagttcaagacctacgagctgaccctgaaggacgtgcagaacatcctgatgtactgggacagaaagcagggcgtgcagctgccccccgccggcatggaggaggccccccacgagcccgacgaccagagacaggtgcccctgggcggcagaagaggcagaaaggacagagagagagagagactggagaaggagagaaccgagaaggagagactggagagagagaaggccgagagagagagactggagaagctgagagccctggaggagagaagcgactgggagggcgagggcgaggaggaccacgagggcaagaaggagaaggacctgggcgtgcccttcctggacatccagacccccgacttcgagggcctgagctggaagcaggccctggagagcgacaagctgcccaagggcgagcagatcctggacatcctgggcctgggcgccagcggcccccccatccccccccccgccctgttcagcatcgtgagctaccccgtgaagagaccccccctgaccatgaccgacgacctggagcacttcgtgttcgtgatcccccccagcgaggacatcagcctggacgagaagaaggagatggagatcgagagcgacttcctggccaccaccaacaccaccaaggcccaggaggagcagaccagcagcagcaagggcggcaagcagaagatgaaggagaagatcgaccaggtgttcgagatccagaaggacaagagacacatggccctgaacagaaaggtgctgagcggcgagcccgccggcaccatcagccagctgagcgacaccgacctggacaacttcaacggccagcacagccaggagaagttcaccagactgaaccacttcagatggatcgtgcccgccaacggcgaggtgaccctgcaggtgcacttcagcagcgacgagttcggcaacttcgaccagaccttcaacttcgagatcctgggcacctgctgccagtaccagctgtactgcagaggcatctgcacctacccctacatctgccaggaccccaaggtggtgttcccccagagaaagatggacatgaagaccaacgaggtgatcttcaagaagtacgtgatgagcaccgagacctactacttcggccccctgctgtgcggcaagagcagagacaagtacaagagcagcctgttccccggcaacatggagaccctgaccatcctgaacaccagcctgatggtggtggaggccagcttctacttccagaacgacgtgaaggccaacacctacttcctggagcccaacaccatggtgctgaagcccaacgagaagcagatcctgaacgtgtgggcctaccccaccagcgtgggcgtgttcgaggacagcatcgtgtgctgcatcaacgacaaccccgagcccgccatcttccagctgagctgccagggcatcagacccgagctggagctggagcccagacagctgcacttcgacagactgctgctgcacagacaggagagcagagtggtgctgctgagaaacgtgaccctgctgcccgtggcctggagaatcaccagcctggagcacctgggcgacgacttcaccgtgagcctgatgcagggcaccatcccccccgaggccgagtacggcctgcacctgtacttccagcccaccaagcccgtgaacatcaagaaggccatcagactggaggtgctggacgccgagaacctgctgggcgtggtgcagatcgagaacatcatggtgttcgccgaggcctacgacatcgccctggacatcaccttccccaagggcgccgagggcggcctggacttcggcatcgtgagagtgaccgaggaggccaagcagcccctgcagctgaagaacagaggcaagtacgagatcgccttcagcttcagcgtggacagcgtgggcatcagcacccccaacatcaacagcatgatcagcgtgcagcccaagaagggcagcctgacccccaccgagaagcccaccaacgtgcaggtgttcttccacgccaagaaggaggtgaagatcgagcaccagcccgtgctgagatgccagatcatcgagcccaacatcagcgagggcggcgagatcatcgccagcatccccatcaagttcagcgccaacgccgtgtacagcaagtacaacatcacccccagcagcgtgatcaacttcggcgccctgatctgcggcaccagaaagagcaccaccttcaccatcgagaaccagggcgtgaccgacttcaagttcgccctgtacaagctgaccggcgagagccccatccaccagaagaaggccgccagccacgtgagacacgccagaagcagagagagcgagagcttctacaagaccggcagcagcagagccgccaagttcagcgacaccatccagaaggaggtgaccaccaccggccaggccagattcgcccacggcatgttcaccgtgtaccccggcttcggcagcatccccagcggcggccagcaggtgatcaacgtggactgcgtggccgacgccatgggcaagtgcgaggagttcatcgccatcgacatcagcggcagagaccccgccgtgcaccccgccggcatcctgtacaccctgctggccgaggcctgcctgcccgccttcgtgaccgagaacaacgccctgatcttcgaggagcaccagatctgcaccagcgccaacctgcaccacatcctgcagaccatcgagagcggcggcctgttcgtggaggacgagaacaagttcatcttctgcaacgtgctggtgggcagacaggccaaggccagattcaagatcagcaacgtgggcaagatcacctgcgacgtgaacatcgtggtgagacccatcagcaacaagcccttcgccagaatcgtggacatcttcgaggtggagcccagcaagatgtgcatcgccagccacagccacgccttcgccaccgtgagcttcaccccccagatcatgcagaactaccagtgcatcttcgaggccaccctggacggcctgcccagcaccctggccaagagcagaggcctggtgttcgacatcgccggcgagggcaacctgcccagagtgaccgtggtgagacccgtgctgcacaaccagtacggcaaccccctgctgctgttcaagagactgctgctgggccacagcgagaagctgcccctgatcctgaagaacaacggcgtgctgcccgcccagctgcacgtggacctgcaggacgagctgggcgtgttcagcctgaagggcagacccaccaccgcctacatctacatcaccgaggagaacaagccccacgtgaaggccaagaaggcccacaccgccagcctggtggtgagccccggcgacaccgccgagttcgacgtggtgttccacagccagaaggtgggcagaatgagaggcatcatccacctgagcgtgatcaacaaccagtacgaggagaccagcatccacatggtgggcgagggctacgaggacgacatcaccctggacaacatccacggcctggtggcccccaccagccaggaggacatcagcatcagcgagttcaccgagatcatcgaggacaacgacatggaggacctggtggccgccgccctggtggaccacatccagttcggcgactgccacatcggccacagctacaacgccagcttcaccgtgaccaaccacagccaggtgaacctgatcagattcgagtggcccgtgagcgccaccatcgccttcagcccccagatgggccacctgcaccccggctgcgccaaggacatcgtggtgaccatgaagagcgacgtgcccatcaacctgaagaacatgagaatcagatgcaagctgagcagaatcatgttccagctgcccgccgaccaggtgcccgactgggacgacagaatgcacaccgtgaagtgggtggacgtgcccagaaacatgcccggcaccttcaccaccaagagaaaggtgatcgagaccgaccccgagcccgcccacagcgtgctggaggagaactaccaggagctgcagctgcagatcagcgccaacgtggacttcgccagctaccactgccaggccagagacgtgagattcaaggagaccctggtgtaccagaccagagtgttcgagttcgacgtgatcaacagcggcagagtgcagctggagttcagctgggtgagcgaggacaccagcaaggccgtgagcttcgccaagcccgaccaccagggcagcgcccagaaggaccagctgagccagggcaccatgcacaccggcagcaccctggacagcaccatggaccactgggccgagggcagcccccagcccttcagcgtggagcccagcagcggcatcgtgcccgtgggcaagatccagaagttcaaggtgaagttcagccccctggacatcggcgacttcgagagcaacctgttctgccagatccccaacctgccccccggcgagcagggccccgtgctggtggccaagggcagaagcaccctgcccatctgccacttcgacctgaaggacagcgactacatcagcggccaccagagaaaccccgagctgagaggcagcagcggcggcgccctggaccccaacaccagagtgatcgagttcaccaccgtgggcatcggcggcaagaacctgagaaccttcaccatcctgaaccccaccaacagcacctacagcttctgctggatcagcgaggagatcgagagcctgcagaaccccgccgccttcacctgcctgaccgagaagggcttcatccaccccgagaagaaggccgagatcgtgttccagttcacccccttccacctgggcatcaccgagagcagctggaccttcctgatccccgagcacaacatcaccgtgcccttcctgctggtgggcaagaccaccgagcccctgatcagcctgaacaagagccacctgaacttcagcagcctgctgatcggcagagaggccagagagaccgtgcagatcatcaacaaggaggagcagggcttcgacttcagcttccaggacaacagcagatacagcgagggcttcagcaacagcctgctggtgtgccccatggagggctggatcccccccctgagcagattccccatcgacatcttcttcacccccaagcaggagggcgacgtgaacttcaacctgatctgcaacgtggagaagaaggtgcaccccgtgaccctgaacgtgaaggccgagggctacaccatgaacgtggagatcaagtgcaaggacagaaccggcagcatcaccctgctgacccccaaccagaccaacatcatcaacttctacgaggtggagctgaacgagtgcgtgcagtgcgagttcaacttcatcaacaccggcaagttcaccttcagcttccaggcccagctgtgcggcagcaagaccctgctgcagtacctggagttcagccccatcgacagcaccgtggacgtgggccagagcgtgcacgccaccctgagcttccagcccctgaagaagtgcgtgctgaccgacctggagctgatcatcaagatcagccacggccccaccttcatgtgcaacatcagcggctgcgccgtgagccccgccatccacttcagcttcaccagctacaacttcggcacctgcttcatctaccaggccggcatgcccccctacaagcagaccctggtgatcaccaacaaggaggagacccccatgagcatcgactgcctgtacaccaacaccacccacctggaggtgaacagcagagtggacgtggtgaagcccggcaacaccctggagatccccatcaccttctaccccagagagagcatcaactaccaggagctgatccccttcgagatcaacggcctgagccagcagaccgtggagatcaagggcaagggcaccaagatgaagatcctggtgctggaccccgccaacagaatcgtgaagctgggcgccgtgctgcccggccaggtggtgaagagaaccgtgagcatcatgaacaacagcctggcccagctgaccttcaaccagagcatcctgttcaccatccccgagctgcaggagcccaaggtgctgaccctggcccccttccacaacatcaccctgaagcccaaggaggtgtgcaagctggaggtgatcttcgcccccaagaagagagtgccccccttcagcgaggaggtgttcatggagtgcatgggcctgctgagacccctgttcctgctgagcggctgctgccaggccctggagatcagcctggaccaggagcacatccccttcggccccgtggtgtaccagacccaggccaccagaagaatcctgatgatgaacaccggcgacgtgggcgccagattcaagtgggacatcaagaagttcgagccccacttcagcatcagccccgaggagggctacatcaccagcggcatggaggtgagcttcgaggtgacctaccaccccaccgaggtgggcaaggagagcctgtgcaagaacatcctgtgctacatccagggcggcagccccctgagcctgaccctgagcggcgtgtgcgtgggcccccccgccgtgaaggaggtggtgaacttcacctgccaggtgagaagcaagcacacccagaccatcctgctgagcaacagaaccaaccagacctggaacctgcaccccatcttcgagggcgagcactgggagggccccgagttcatcaccctggaggcccaccagcagaacaagccctacgagatcacctacagacccagaaccatgaacctggagaacagaaagcaccagggcaccctgttcttccccctgcccgacggcaccggctggctgtacgccctgcacggcaccagcgagctgcccaaggccgtggccaacatctacagagaggtgccctgcaagaccccctacaccgagctgctgcccatcaccaactggctgaacaagccccagagattcagagtgatcgtggagatcctgaagcccgagaagcccgacctgagcatcaccatgaagggcctggactacatcgacgtgctgagcggcagcaagaaggactacaagctgaacttcttcagccacaaggagggcacctacgccgccaaggtgatcttcagaaacgaggtgaccaacgagttcctgtactacaacgtgagcttcagagtgatccccagcggcatcatcaagaccatcgagatggtgacccccgtgagacaggtggccagcgccagcatcaagctggagaaccccctgccctacagcgtgaccttcagcaccgagtgcagaatgcccgacatcgccctgcccagccagttcgtggtgcccgccaacagcgagggcaccttcagcttcgagttccagcccctgaaggccggcgagaccttcggcagactgaccctgcacaacaccgacctgggctactaccagtacgagctgtacctgaaggccacccccgccctgcccgagaagcccgtgcacttccagaccgtgctgggcagcagccagatcatcctggtgaagttcatcaactacaccagacagagaaccgagtactactgcagaaccgactgcaccgacttccacgccgagaagctgatcaacgccgcccccggcggccagggcggcaccgaggccagcgtggaggtgctgttcgagcccagccacctgggcgagaccaagggcatcctgatcctgagcagcctggccggcggcgagtacatcatccccctgttcggcatggccctgccccccaagccccagggccccttcagcatcagagccggctacagcatcatcatccccttcaagaacgtgttctaccacatggtgaccttcagcatcatcgtggacaaccccgccttcaccatcagagccggcgagagcgtgagacccaagaagatcaacaacatcaccgtgagcttcgagggcaaccccagcggcagcaagacccccatcaccaccaagctgaccgtgagctgcccccccggcgagggcagcgagaccggcgtgaagtgggtgtactacctgaagggcatcaccctgtag

SEQ ID NO: 95767 - DNA, 2223 bp, Artificial Sequence
  derived and/or modified sequence
atgaccagcagaagactggaggagagcatgggcgccgtgcagatgggcctggtgaacatgttcaagggcttccagagcaaggtgctgccccccctgagccccaaggtggtgaccgaggaggaggtgaacagaatgctgacccccagcgagttcctgaaggagatgagcctgaccaccgagcagagactggccaagaccagactgatgtgcagaccccagatcatcgagctgctggacatgggcgagaccacccaccagaagttcagcggcatcgacctggaccaggccctgttccagcccttccccagcgagatcatcttccagaactacaccccctgcgaggtgtacgaggtgcccctgatcctgagaaacaacgacaagatccccagactggtgaaggtggtggaggagagcagcccctacttcaaggtgatcagccccaaggacatcggccacaaggtggcccccggcgtgcccagcatcttcagaatcctgttcacccccgaggagaacaaggactacgcccacaccctgacctgcgtgaccgagagagagaagttcatcgtgcccatcaaggccagaggcgccagagccatcctggacttccccgacaagctgaacttcagcacctgccccgtgaagtacagcacccagaagatcctgctggtgagaaacatcggcaacaagaacgccgtgttccacatcaagacctgcagacccttcagcatcgagcccgccatcggcaccctgaacgtgggcgagagcatgcagctggaggtggagttcgagccccagagcgtgggcgaccacagcggcagactgatcgtgtgctacgacaccggcgagaaggtgttcgtgagcctgtacggcgccgccatcgacatgaacatcagactggacaagaacagcctgaccatcgagaagacctacatcagcctggccaaccagagaaccatcaccatccacaacagaagcaacatcatcgcccacttcctgtggaaggtgttcgccacccagcaggaggaggacagagagaagtacagagcctgcgacgacctgatcaaggaggagaaggacgagaccgacgagttcttcgaggagtgcatcaccgaccccctgctgagagagcacctgagcgtgctgagcagaaccttcgccaaccagagaagactggtgcagggcgacagcaagctgttcttcaacaacgtgttcaccgtggagcccctggagggcgacgtgtggcccaacagcagcgccgagatcaccgtgtacttcaaccccctggaggccaagctgtaccagcagaccatctactgcgacatcctgggcagagagatcagactgcccctgagaatcaagggcgagggcatgggccccaagatccacttcaacttcgagctgctggacatcggcaaggtgttcaccggcagcgcccactgctacgaggccatcctgtacaacaagggcagcatcgacgccctgttcaacatgaccccccccaccagcgccctgggcgcctgcttcgtgttcagccccaaggagggcatcatcgagcccagcggcgtgcaggccatccagatcagcttcagcagcaccatcctgggcaacttcgaggaggagttcctggtgaacgtgaacggcagccccgagcccgtgaagctgaccatcagaggctgcgtgatcggccccaccttccacttcaacgtgcccgccctgcacttcggcgacgtgagcttcgccacccaggagctgagagacccccaggtgctgatccccttccagagattcccccacaccctgatctgcagcctgaacaacaccagcctgatccccatgacctacaagctgagaatccccggcgacggcctgggccacaagagcatcagctactgcgagcagcacgtggactacaagagacccagctggaccaaggaggagatcagcagcatgaagcccaaggagttcaccatcagccccgactgcggcaccatcagaccccagggcttcgccgccatcagagtgaccctgtgcagcaacaccgtgcagaagtacgagctggccctggtggtggacgtggagggcatcggcgaggaggtgctggccctgctgatcaccgccagcgcccccgagctgtgcaacagaaaggtgatgctgagcgtgctgcagtggaagatccacagagccaagagaagcctgcccagagacaccgtggccgtgacctag

SEQ ID NO: 95768 - DNA, 3645 bp, Artificial Sequence
  derived and/or modified sequence
atgaccagcagaagactggaggagagcatgggcgccgtgcagatgggcctggtgaacatgttcaagggcttccagagcaaggtgctgccccccctgagccccaaggtggtgaccgaggaggaggtgaacagaatgctgacccccagcgagttcctgaaggagatgagcctgaccaccgagcagagactggccaagaccagactgatgtgcagaccccagatcatcgagctgctggacatgggcgagaccacccaccagaagttcagcggcatcgacctggaccaggccctgttccagcccttccccagcgagatcatcttccagaactacaccccctgcgaggtgtacgaggtgcccctgatcctgagaaacaacgacaagatccccagactggtgaaggtggtggaggagagcagcccctacttcaaggtgatcagccccaaggacatcggccacaaggtggcccccggcgtgcccagcatcttcagaatcctgttcacccccgaggagaacaaggactacgcccacaccctgacctgcgtgaccgagagagagaagttcatcgtgcccatcaaggccagaggcgccagagccatcctggacttccccgacaagctgaacttcagcacctgccccgtgaagtacagcacccagaagatcctgctggtgagaaacatcggcaacaagaacgccgtgttccacatcaagacctgcagacccttcagcatcgagcccgccatcggcaccctgaacgtgggcgagagcatgcagctggaggtggagttcgagccccagagcgtgggcgaccacagcggcagactgatcgtgtgctacgacaccggcgagaaggtgttcgtgagcctgtacggcgccgccatcgacatgaacatcagactggacaagaacagcctgaccatcgagaagacctacatcagcctggccaaccagagaaccatcaccatccacaacagaagcaacatcatcgcccacttcctgtggaaggtgttcgccacccagcaggaggaggacagagagaagtacagagcctgcgacgacctgatcaaggaggagaaggacgagaccgacgagttcttcgaggagtgcatcaccgaccccctgctgagagagcacctgagcgtgctgagcagaaccttcgccaaccagagaagactggtgcagggcgacagcaagctgttcttcaacaacgtgttcaccgtggagcccctggagggcgacgtgtggcccaacagcagcgccgagatcaccgtgtacttcaaccccctggaggccaagctgtaccagcagaccatctactgcgacatcctgggcagagagatcagactgcccctgagaatcaagggcgagggcatgggccccaagatccacttcaacttcgagctgctggacatcggcaaggtgttcaccggcagcgcccactgctacgaggccatcctgtacaacaagggcagcatcgacgccctgttcaacatgaccccccccaccagcgccctgggcgcctgcttcgtgttcagccccaaggagggcatcatcgagcccagcggcgtgcaggccatccagatcagcttcagcagcaccatcctgggcaacttcgaggaggagttcctggtgaacgtgaacggcagccccgagcccgtgaagctgaccatcagaggctgcgtgatcggccccaccttccacttcaacgtgcccgccctgcacttcggcgacgtgagcttcggcttcccccacaccctgatctgcagcctgaacaacaccagcctgatccccatgacctacaagctgagaatccccggcgacggcctgggccacaagagcatcagctactgcgagcagcacgtggactacaagagacccagctggaccaaggaggagatcagcagcatgaagcccaaggagttcaccatcagccccgactgcggcaccatcagaccccagggcttcgccgccatcagagtgaccctgtgcagcaacaccgtgcagaagtacgagctggccctggtggtggacgtggagggcatcggcgaggaggtgctggccctgctgatcaccgccagatgcgtggtgcccgccctgcacctggtgaacaccgaggtggacttcggccactgcttcctgaagtacccctacgagaagaccctgcagctggccaaccaggacgacctgcccggcttctacgaggtgcagccccaggtgtgcgaggaggtgcccaccgtgctgttcagcagccccacccccagcggcgtgatcagccccagcagcaccatccacatccccctggtgctggagacccaggtgaccggcgagcacagaagcaccgtgtacatcagcatcttcggcagccaggacccccccctggtgtgccacctgaagagcgccggcgagggccccgtgatctacgtgcaccccaaccaggtggacttcggcaacatctacgtgctgaaggacagcagcagaatcctgaacctgtgcaaccagagcttcatccccgccttcttccaggcccacatggcccacaagaagagcctgtggaccatcgagcccaacgagggcatggtgccccccgagaccgacgtgcagctggccctgaccgccaacctgaacgacaccctgaccttcaaggactgcgtgatcctggacatcgagaacagcagcacctacagaatccccgtgcaggccagcggcaccggcagcaccatcgtgagcgacaagcccttcgcccccgagctgaacctgggcgcccacttcagcctggacacccactactaccacttcaagctgatcaacaagggcagaagaatccagcagctgttctggatgaacgacagcttcagaccccaggccaagctgagcaagaagggcagagtgaagaagggccacgcccacgtgcagccccagcccagcggcagccaggagcccagagacccccagagccccgtgttccacctgcaccccgccagcatggagctgtaccccggccaggccatcgacgtgatcctggagggctacagcgccacccccagaaagcccaacagcatcctgaagcccgactaccagcccctggccatcaagaacatcagcaccctgcccgtgaacctgctgctgagcaccagcggccccttcttcatctgcgagaccgacaagagcctgctgcccgccacccccgagcccatcaagctggagatcgacgaggagaagaacctgctgatcaagttcgaccccagctacagaaacgacctgaacaactgggtggccgaggagatcctggccatcaagtacgtggagcacccccagatcgacagcctggacctgagaggcgaggtgcactaccccaacctgagcttcgagaccaaggagctggacttcggctgcatcctgaacgacaccgagctgatcagatacgtgaccatcaccaactgcagccccctggtggtgaagttcagatggttcttcctggtgaacgacgaggagaaccagatcagattcgtgaccctgcccaagaagccctacagcgcccccgtgagccagatggagagcatccccgccaccagcgaggccgccagcccccccgccatcctggtgaccgtggagagccccgagatggacctgaacgacttcgtgaagtag

SEQ ID NO: 95769 - DNA, 1101 bp, Artificial Sequence
  derived and/or modified sequence
atgctgggcagcggcttcaaggccgagagactgagagtgaacctgagactggtgatcaacagactgaagctgctggagaagaagaagaccgagctggcccagaaggccagaaaggagatcgccgactacctggccgccggcaaggacgagagagccagaatcagagtggagcacatcatcagagaggactacctggtggaggccatggagatcctggagctgtactgcgacctgctgctggccagattcggcctgatccagagcatgaaggagctggacagcggcctggccgagagcgtgagcaccctgatctgggccgcccccagactgcagagcgaggtggccgagctgaagatcgtggccgaccagctgtgcgccaagtacagcaaggagtacggcaagctgtgcagaaccaaccagatcggcaccgtgaacgacagactgatgcacaagctgagcgtggaggccccccccaagatcctggtggagagatacctgatcgagatcgccaagaactacaacgtgccctacgagcccgacagcgtggtgatggccgaggccccccccggcgtggagaccgacctgatcgacgtgggcttcaccgacgacgtgaagaagggcggccccggcagaggcggcagcggcggcttcaccgcccccgtgggcggccccgacggcaccgtgcccatgcccatgcccatgcccatgcccatgcccagcgccaacacccccttcagctaccccctgcccaagggccccagcgacttcaacggcctgcccatgggcacctaccaggccttccccaacatccaccccccccagatccccgccaccccccccagctacgagagcgtggacgacatcaacgccgacaagaacatcagcagcgcccagatcgtgggccccggccccaagcccgaggccagcgccaagctgcccagcagacccgccgacaactacgacaacttcgtgctgcccgagctgcccagcgtgcccgacaccctgcccaccgccagcgccggcgccagcaccagcgccagcgaggacatcgacttcgacgacctgagcagaagattcgaggagctgaagaagaagacctag

SEQ ID NO: 95770 - DNA, 1068 bp, Artificial Sequence
  derived and/or modified sequence
atgctgggcagcggcttcaaggccgagagactgagagtgaacctgagactggtgatcaacagactgaagctgctggagaagaagaagaccgagctggcccagaaggccagaaaggagatcgccgactacctggccgccggcaaggacgagagagccagaatcagagtggagcacatcatcagagaggactacctggtggaggccatggagatcctggagctgtactgcgacctgctgctggccagattcggcctgatccagagcatgaaggagctggacagcggcctggccgagagcgtgagcaccctggccgagctgaagatcgtggccgaccagctgtgcgccaagtacagcaaggagtacggcaagctgtgcagaaccaaccagatcggcaccgtgaacgacagactgatgcacaagctgagcgtggaggccccccccaagatcctggtggagagatacctgatcgagatcgccaagaactacaacgtgccctacgagcccgacagcgtggtgatggccgaggccccccccggcgtggagaccgacctgatcgacgtgggcttcaccgacgacgtgaagaagggcggccccggcagaggcggcagcggcggcttcaccgcccccgtgggcggccccgacggcaccgtgcccatgcccatgcccatgcccatgcccatgcccagcgccaacacccccttcagctaccccctgcccaagggccccagcgacttcaacggcctgcccatgggcacctaccaggccttccccaacatccaccccccccagatccccgccaccccccccagctacgagagcgtggacgacatcaacgccgacaagaacatcagcagcgcccagatcgtgggccccggccccaagcccgaggccagcgccaagctgcccagcagacccgccgacaactacgacaacttcgtgctgcccgagctgcccagcgtgcccgacaccctgcccaccgccagcgccggcgccagcaccagcgccagcgaggacatcgacttcgacgacctgagcagaagattcgaggagctgaagaagaagacctag

SEQ ID NO: 95771 - DNA, 1101 bp, Artificial Sequence
  derived and/or modified sequence
atgctcggatccggcttcaaagcagaacgactgcgggtgaatcttaggttagtcatcaataggctgaagctcctcgagaagaagaagactgagctggcacaaaaagcccggaaggagatagccgactatctggccgctggaaaggacgagagagcccgaatcagggtcgagcacatcattcgtgaggactatctcgttgaagcgatggaaattctcgagttgtattgtgacttactcctggctagatttggacttatccagtctatgaaggagctcgatagcggtctggcagagagtgtgtcaacactgatctgggctgctccgaggctccagtcagaggtagcagaactgaaaatcgtggctgaccaactatgtgccaagtactcaaaagaatacggaaagctttgtcggacgaatcagattggtacagtgaatgatagacttatgcacaaattatctgtggaggccccccccaaaatcctcgttgagcggtatttaatagaaatcgccaagaactataatgtgccctacgagcccgattcggtcgtcatggcagaggcccccccaggcgtggagaccgacctgatcgacgtgggattcacagacgatgtgaagaaaggaggaccagggagaggcggatctggcggattcacagctccggtgggcggcccagacggaaccgtgccaatgccaatgcctatgccaatgcccatgccttccgctaacacccctttcagctacccactcccaaagggcccgtcagacttcaacggcctgcccatggggacgtaccaagctttccctaatattcacccccctcagatcccagcaaccccaccttcttatgaaagcgtggacgacattaacgctgacaaaaacattagctcagctcagatcgtgggcccaggaccaaaacccgaggcctcagccaaactcccaagtcggcccgccgacaattacgataattttgtgttacctgagctcccatcagtacccgacactctccctaccgcgtccgccggagcaagcacgtcagcatcagaggacattgatttcgatgatctgagccggcgtttcgaggaactgaagaagaaaacatag

SEQ ID NO: 95772 - DNA, 1068 bp, Artificial Sequence
  derived and/or modified sequence
atgctggggagtgggtttaaggctgaacgactcagggtgaacctaaggttggtcatcaatcgcctgaaactactggaaaagaagaagaccgagctggcccagaaagctcggaaggaaattgcagattatttagctgccggtaaggacgagagagcccgtatccgtgtggagcacatcattcgtgaggactatcttgtggaggctatggagattttggagctctactgtgacctgctgttagcccgattcggactgattcaatcgatgaaggagttggattctggtctggccgagagcgtgtcaacattggcagaactgaaaatcgtcgcagaccaactgtgtgcaaagtactcaaaggagtatgggaaactgtgtcggaccaaccagatcggtaccgtgaatgatcgactgatgcacaagctgtcagtggaagcccccccaaagatccttgtcgagaggtacttgatagagattgcaaagaactacaatgtgccatacgagcccgattcagtcgttatggcggaagctcccccaggcgtggaaaccgatctgatcgatgtaggcttcaccgacgacgtgaagaagggcggccccggtcgcggcggttctgggggctttacagcgcctgtgggaggaccggatggtaccgttcctatgcctatgcctatgcccatgcccatgccatcggctaacactccttttagctatccactgcccaaaggaccttcagacttcaacgggttgccaatggggacttaccaggcgttcccaaatatccatccaccgcagattcctgccacaccaccctcttatgagagtgtggacgacattaatgccgataagaatatcagctctgcccaaatagtagggccaggccccaaacccgaggccagcgcaaaattgccttccaggcccgctgacaattatgataactttgtgctgccagagctgccctctgtgccagacaccctgccgacagcttccgctggggcttctacctcagccagcgaggacattgatttcgatgatctgagccggcggtttgaagagctcaagaaaaagacctag

SEQ ID NO: 95773 - DNA, 1101 bp, Artificial Sequence
  derived and/or modified sequence
atgctgggcagcggcttcaaggccgagcggctgcgggtgaacctgcggctggtgatcaaccggctgaagctgctggagaagaagaagacagagctggcccagaaggccaggaaggagattgctgactacctggccgccggcaaggatgagcgggcccgcatccgggtggagcacatcatccgggaggactacctggtggaggccatggagatcctggagctgtactgtgacctgctgctggccaggtttggcctcatccagagcatgaaggagctggacagcggcctggccgagagcgtgtccaccctcatctgggccgccccccggctgcagagcgaggtggccgagctgaagatcgtggccgaccagctgtgtgccaagtacagcaaggagtatggcaagctgtgcaggaccaaccagattggaacagtgaatgaccggctgatgcacaagctgtctgtggaggccccacccaagatcctggtggagcgctacctgattgaaattgccaagaactacaacgtgccctatgagccagattctgtggtgatggccgaggcccctcctggggtggagacagacctgattgatgtgggcttcacagatgatgtgaagaagggcggccctggccggggcggcagcggcggcttcaccgcccctgtgggcggcccagatggcaccgtgcccatgcccatgcccatgcccatgcccatgcccagcgccaacacccccttctcctaccccctgcccaagggccccagcgacttcaacggcctgcccatgggcacctaccaggccttccccaacatccaccccccccagatcccagccaccccacccagctatgagagcgtggatgacatcaatgctgacaagaacatcagcagcgcccagatcgtgggccctggccccaagccagaggccagcgccaagctgcccagcaggcctgctgacaactatgacaactttgtgctgcctgagctgcccagcgtgcctgacaccctgcccacagccagcgctggggccagcaccagcgccagcgaggacatcgactttgatgacctgagcagaagatttgaggagctgaagaagaagacctag

SEQ ID NO: 95774 - DNA, 1068 bp, Artificial Sequence
  derived and/or modified sequence
atgctgggcagcggcttcaaggccgagcggctgcgggtgaacctgcggctggtgatcaaccggctgaagctgctggagaagaagaagacagagctggcccagaaggccaggaaggagattgctgactacctggccgccggcaaggatgagcgggcccgcatccgggtggagcacatcatccgggaggactacctggtggaggccatggagatcctggagctgtactgtgacctgctgctggccaggtttggcctcatccagagcatgaaggagctggacagcggcctggccgagagcgtgtccaccctggccgagctgaagatcgtggccgaccagctgtgtgccaagtacagcaaggagtatggcaagctgtgcaggaccaaccagatcggcaccgtgaatgaccggctgatgcacaagctgtctgtggaggccccacccaagatcctggtggagcgctacctgattgagatcgccaagaactacaacgtgccctatgagccagacagcgtggtgatggccgaggcccctcctggggtggagacagacctgattgatgtgggcttcacagatgatgtgaagaagggcggccctggccggggcggcagcggcggcttcaccgcccctgtgggcggcccagatggcaccgtgcccatgcccatgcccatgcccatgcccatgcccagcgccaacacccccttctcctaccccctgcccaagggccccagcgacttcaacggcctgcccatgggcacctaccaggccttccccaacatccaccccccccagatcccagccaccccacccagctatgaatctgtggatgacatcaatgctgacaagaacatcagcagcgcccagatcgtgggccctggccccaagccagaggccagcgccaagctgcccagcaggcctgctgacaactatgacaactttgtgctgcctgagctgcccagcgtgcctgacaccctgcccacagccagcgctggggccagcaccagcgcctctgaagatattgactttgatgacctgagccgccgctttgaggagctgaagaagaagacctag

SEQ ID NO: 95775 - DNA, 1101 bp, Artificial Sequence
  derived and/or modified sequence
atgctgggcagcggcttcaaggccgagcggctgcgggtgaacctgagactcgtgatcaatcgactgaaattactagagaagaaaaagactgagttggctcaaaaagcccgcaaggaaattgccgactaccttgctgccggcaaggacgagcgggcacgcatacgggtggaacacatcatcagggaagactacctcgttgaggcaatggagattctagagctatactgcgatttgctgttggctcgttttgggctgatccaatccatgaaggaactcgattccggcctcgcagaatctgtgagtaccctaatttgggccgcaccaaggctccagtccgaggtagccgagctgaagattgtagctgaccagctatgtgcgaagtactctaaggaatacggtaaactctgtcggaccaatcagatcggaacggttaatgaccgcttgatgcataagctctcggtcgaggccccaccgaagatcctcgttgagcggtacttaattgaaatagcgaagaactataacgttccatacgagccggatagtgtcgtgatggccgaggccccaccaggggtggaaaccgacctgattgatgtgggctttaccgatgacgtgaagaaaggcgggcccgggcggggcggatctggaggattcaccgcgcccgtaggagggcccgacgggactgtgcctatgccaatgcctatgcctatgccaatgccctcagctaacacccctttctcctacccgctcccaaaggggccatcagactttaacggactgcccatggggacttatcaggctttccctaatatacaccccccacaaatccctgctactcctccctcatacgagtcggtggatgacattaatgctgataagaacatctcctccgcccagatcgtgggtcctggtcccaaacccgaggccagcgctaaattgccatcccggcccgcagacaattacgacaacttcgttctacccgaattgcctagtgtgccggacacccttccgacggcctccgcgggggcctccacttccgcatcagaggatatcgactttgatgacctaagtcgtcggtttgaagaactgaaaaaaaagacgtag

SEQ ID NO: 95776 - DNA, 1068 bp, Artificial Sequence
  derived and/or modified sequence
atgctgggcagcggcttcaaggccgagcggctgcgggtgaacctgcggcttgtcatcaacagactgaaattgctagaaaaaaaaaagactgagctggctcagaaggcgcgcaaggaaattgccgactaccttgccgcagggaaagacgagagagcacgcatccgcgtggaacatattataagagaggactaccttgtggaggccatggagatcctcgaactttactgtgatctacttctcgccaggttcggcctgattcagtctatgaaggaactcgacagcggcttggctgagtccgtctctacactggccgagctgaagatagttgccgatcagttgtgcgcgaagtattctaaagagtatggcaagctgtgtcgcacaaaccagattgggactgtcaacgacaggttaatgcacaagctatccgtggaggcgccaccaaaaatcttggtggaacgctatctgatagagatagcaaagaattacaatgttccttacgagcccgatagcgtggtgatggctgaggcaccccccggggtcgagacagacctgatcgacgtgggtttcaccgacgacgtgaaaaagggcggccccggtagaggcgggtcgggaggcttcacagcacctgtgggcgggccggacggaacagtccccatgccaatgccaatgcccatgcctatgccgtcagctaatacccctttttcataccccctgcccaaagggccgagtgacttcaacggactgcccatgggcacttaccaagcatttccaaatattcacccgccacagatcccagccacaccccccagctatgaatccgtggacgacatcaatgctgataagaatataagcagcgcccagatcgttggccctgggccaaagcctgaggccagcgccaagttaccatccaggcccgcagacaattacgataattttgtactgccagaactccccagcgtgcccgatactcttccaacagcgtctgccggcgctagtactagtgccagcgaagatatcgactttgacgacctgtccaggagatttgaggaattgaagaagaaaacatag

SEQ ID NO: 95777 - DNA, 1101 bp, Artificial Sequence
  derived and/or modified sequence
atgctcggctctggttttaaagcagagagacttcgagtgaacctgcggctggtgataaacagacttaagctgttggagaagaagaagacagagttagcccaaaaagcacggaaagaaatcgccgattacctggctgccggtaaagacgagagggcaaggatacgcgtggagcacataatacgcgaggattacctggtcgaagccatggagatccttgagctctactgtgatttgcttctcgcccgattcggcttgatccagtccatgaaagaactggattcaggtctcgcagagtctgtgtctactctaatatgggccgctcctagactgcaaagcgaggttgccgagctgaaaattgtggccgatcaactctgtgccaagtacagcaaagaatacggtaaactctgcaggacaaatcagatcggaacggtaaacgacaggctgatgcacaagttgtcagtcgaagctcccccaaaaatactggtcgagaggtacttaatcgaaattgcaaagaactacaacgttccctacgagccggacagcgtcgtgatggccgaggccccaccaggggttgaaactgacctcattgatgtgggcttcaccgatgacgttaagaaggggggacccggacggggaggctcgggaggtttcaccgcccctgtgggcggacctgacggaacagtgcctatgcccatgcccatgcctatgccgatgccatcagccaacaccccattttcataccccctgcccaaaggcccaagtgactttaatggcctcccaatgggtacctaccaagcatttccaaacatccacccaccacaaatacccgctacgccaccgagttatgagagcgtggacgacataaatgccgataaaaacatcagtagtgcccagatcgtcggccctggccctaagcccgaggcttcggccaagctccctagccggccagcagataactacgataatttcgtcctcccggagttgccgtcagttcctgacacccttcctacagccagcgccggtgcctctacaagcgcttccgaggacattgattttgacgacttgtcaaggaggttcgaagagctcaaaaagaaaacctag

SEQ ID NO: 95778 - DNA, 1068 bp, Artificial Sequence
  derived and/or modified sequence
atgctgggctcagggtttaaggccgaaagactcagggtgaaccttcggttggtcatcaacagactgaaactcctcgagaagaagaagacagagctggctcaaaaagccaggaaggagatagccgattacctagccgctggaaaagatgagcgtgcacgcatcagggtcgaacatatcatcagagaggactacttagtggaagccatggagatcctggagctttattgtgatctactccttgccaggttcggactaattcagagtatgaaagaacttgactcagggttggccgaaagcgttagtaccctggctgaactgaaaatagtagcagaccaattgtgcgctaagtactctaaagagtatggcaaactctgtaggactaatcagatcggcactgtcaatgacaggctcatgcataagttaagcgtggaggcccctcctaagattcttgtggagcggtacctgatcgaaattgctaagaattacaatgtgccgtatgaacccgactctgtggttatggccgaggctccaccgggagttgagacagacctaatcgacgttgggttcacggacgatgtgaagaaagggggacctggacggggaggctccggaggtttcacagcgccagttggcggaccagatggaaccgtgcccatgcccatgccgatgcccatgcccatgccctctgctaatacacctttcagctaccccctacctaagggacccagcgatttcaacggtctgcccatgggcacgtatcaggccttccctaacattcatcctcctcagatccccgctacccccccatcctatgagtctgtggatgacattaatgctgacaagaatatttcgtcagcccaaatagtggggccaggcccaaagcccgaagcaagcgccaagctcccaagcaggccggctgacaactacgacaattttgtgctgcctgagctcccatccgtgcccgataccctgcccactgcctctgctggggcaagcactagcgcttctgaagacatcgatttcgatgacctctccagacgcttcgaagaactgaaaaagaaaacatag

SEQ ID NO: 95779 - protein, 366 aa, Artificial Sequence
  derived and/or modified sequence
MLGSGFKAERLRVNLRLVINRLKLLEKKKTELAQKARKEIADYLAAGKDERARIRVEHIIREDYLVEAMEILELYCDLLLARFGLIQSMKELDSGLAESVSTLIWAAPRLQSEVAELKIVADQLCAKYSKEYGKLCRTNQIGTVNDRLMHKLSVEAPPKILVERYLIEIAKNYNVPYEPDSVVMAEAPPGVETDLIDVGFTDDVKKGGPGRGGSGGFTAPVGGPDGTVPMPMPMPMPMPSANTPFSYPLPKGPSDFNGLPMGTYQAFPNIHPPQIPATPPSYESVDDINADKNISSAQIVGPGPKPEASAKLPSRPADNYDNFVLPELPSVPDTLPTASAGASTSASEDIDFDDLSRRFEELKKKT

SEQ ID NO: 95780 - protein, 379 aa, Artificial Sequence
  derived and/or modified sequence
MVFKLKTKEEQHSMLGSGFKAERLRVNLRLVINRLKLLEKKKTELAQKARKEIADYLAAGKDERARIRVEHIIREDYLVEAMEILELYCDLLLARFGLIQSMKELDSGLAESVSTLIWAAPRLQSEVAELKIVADQLCAKYSKEYGKLCRTNQIGTVNDRLMHKLSVEAPPKILVERYLIEIAKNYNVPYEPDSVVMAEAPPGVETDLIDVGFTDDVKKGGPGRGGSGGFTAPVGGPDGTVPMPMPMPMPMPSANTPFSYPLPKGPSDFNGLPMGTYQAFPNIHPPQIPATPPSYESVDDINADKNISSAQIVGPGPKPEASAKLPSRPADNYDNFVLPELPSVPDTLPTASAGASTSASEDIDFDDLSRRFEELKKKT

SEQ ID NO: 95781 - protein, 355 aa, Artificial Sequence
  derived and/or modified sequence
MLGSGFKAERLRVNLRLVINRLKLLEKKKTELAQKARKEIADYLAAGKDERARIRVEHIIREDYLVEAMEILELYCDLLLARFGLIQSMKELDSGLAESVSTLAELKIVADQLCAKYSKEYGKLCRTNQIGTVNDRLMHKLSVEAPPKILVERYLIEIAKNYNVPYEPDSVVMAEAPPGVETDLIDVGFTDDVKKGGPGRGGSGGFTAPVGGPDGTVPMPMPMPMPMPSANTPFSYPLPKGPSDFNGLPMGTYQAFPNIHPPQIPATPPSYESVDDINADKNISSAQIVGPGPKPEASAKLPSRPADNYDNFVLPELPSVPDTLPTASAGASTSASEDIDFDDLSRRFEELKKKT

SEQ ID NO: 95782 - DNA, 1140 bp, Artificial Sequence
  derived and/or modified sequence
atggtgttcaagctgaagaccaaggaggagcagcacagcatgctgggcagcggcttcaaggccgagagactgagagtgaacctgagactggtgatcaacagactgaagctgctggagaagaagaagaccgagctggcccagaaggccagaaaggagatcgccgactacctggccgccggcaaggacgagagagccagaatcagagtggagcacatcatcagagaggactacctggtggaggccatggagatcctggagctgtactgcgacctgctgctggccagattcggcctgatccagagcatgaaggagctggacagcggcctggccgagagcgtgagcaccctgatctgggccgcccccagactgcagagcgaggtggccgagctgaagatcgtggccgaccagctgtgcgccaagtacagcaaggagtacggcaagctgtgcagaaccaaccagatcggcaccgtgaacgacagactgatgcacaagctgagcgtggaggccccccccaagatcctggtggagagatacctgatcgagatcgccaagaactacaacgtgccctacgagcccgacagcgtggtgatggccgaggccccccccggcgtggagaccgacctgatcgacgtgggcttcaccgacgacgtgaagaagggcggccccggcagaggcggcagcggcggcttcaccgcccccgtgggcggccccgacggcaccgtgcccatgcccatgcccatgcccatgcccatgcccagcgccaacacccccttcagctaccccctgcccaagggccccagcgacttcaacggcctgcccatgggcacctaccaggccttccccaacatccaccccccccagatccccgccaccccccccagctacgagagcgtggacgacatcaacgccgacaagaacatcagcagcgcccagatcgtgggccccggccccaagcccgaggccagcgccaagctgcccagcagacccgccgacaactacgacaacttcgtgctgcccgagctgcccagcgtgcccgacaccctgcccaccgccagcgccggcgccagcaccagcgccagcgaggacatcgacttcgacgacctgagcagaagattcgaggagctgaagaagaagacctag

SEQ ID NO: 95783 - DNA, 1140 bp, Artificial Sequence
  derived and/or modified sequence
atggtgtttaagctgaagaccaaagaggagcagcatagcatgctaggcagtgggttcaaagctgagagactgagggtcaatctgcgcctcgtgattaatcggcttaaactcttggaaaagaaaaagacagagttagctcagaaagctcgcaaggagatcgcagattatctcgcagcaggaaaggatgagcgagcacgaatcagggtggaacacatcatacgggaggactatcttgttgaggcaatggagattctggagctctactgcgatctgctgctggctcgctttggactcatacaatcaatgaaagagctggattctggattagccgagagcgtgtcaacgcttatctgggccgccccacgattacaaagcgaggtggccgagctgaagatagtggctgaccagctatgcgcaaagtatagtaaggaatatggaaaactctgccgcacaaaccagataggtaccgtgaatgaccgactcatgcataaactcagcgtggaagcccctcccaaaattctggtggaacgatatctcattgagatcgctaaaaactacaatgtcccatacgaaccggactccgtggtcatggccgaggccccacccggtgttgagaccgatctgattgacgttgggtttaccgacgatgtcaagaagggaggaccaggccggggcggttcgggaggctttaccgctccggtcggagggcctgatggtactgtgcctatgccaatgcccatgcccatgcctatgccgagtgccaacacgcccttcagctatccgctgcctaaggggccctcagatttcaacggactgccaatgggcacgtaccaggcatttcccaatatccacccacctcagatcccagccactccccctagctatgagagcgttgacgacatcaatgctgataagaatatatccagcgctcagatcgtgggacctggcccgaaaccggaggcttctgctaaacttccttcaagaccagctgataactacgataactttgtcctgcccgaactgcccagcgtgcctgacaccctgcccacagcgagcgcgggcgcttccaccagtgcaagcgaggacatcgactttgacgacctgtccagaagatttgaggaactcaaaaagaagacgtag

SEQ ID NO: 95784 - DNA, 2654 bp, Artificial Sequence
  derived and/or modified sequence
ctgtggctggcctccccgcgcccagagcgaaattaagggcatgcccccagcagctgactcagtcggcgtggcgcttcccccaacgtctgccgtgcccccgccgcgggaagtagtccccggccgcgccgactccaaaggaaaccgagggagggtgccccgagtcagcgcgtgggtcccggcagcggcgatcgcgcagccaatccctggaaaggagggcgtggctatatcggccccgtggatccctccgcccgcgcttgttgtgctgaggccgagggagtcgccattttggatggtgaaccctgaagtcggtgtctgctgcgttcacggcaggattcggttaggaggaacagcacagcatgctgggctctggatttaaagctgagcgcttaagagtgaatttgagattagtcataaatcgccttaaactattggagaaaaagaaaacggaactggcccagaaagcaaggaaggagattgctgactatctggctgctgggaaagatgaacgagctcggatccgtgtggagcacattatccgggaagactacctcgtggaggccatggagatcctggagctgtactgtgacctgctgctggctcggtttggccttatccagtctatgaaggaactagattctggtctggctgaatctgtgtctacattgatctgggctgctcctcgactccagtcagaagtggctgagttgaaaatagttgctgatcagctctgtgccaagtatagcaaggaatatggcaagctatgtaggaccaaccagattggaactgtgaatgacaggctaatgcacaagctgagtgtggaagccccacccaaaatcctggtggagagatacctgattgaaattgcaaagaattacaacgtaccctatgaacctgactctgtggtcatggcagaagctcctcctggggtagagacagatcttattgatgttggattcacagatgatgtgaagaaaggaggccctggaagaggagggagtggtggcttcacagcaccagttggtggacctgatggaacggtgccaatgcccatgcccatgcccatgcctatgccatctgcaaatacgcctttctcatatccactgccaaagggaccatcagatttcaatggactgccaatggggacttatcaggcctttcccaatattcatccacctcagataccagcaactcccccatcgtatgaatctgtagatgacattaatgctgataagaatatctcttctgcacagattgttggtcctggacccaagccagaagcctctgcaaagcttccttccagacctgcagataactatgacaactttgtcctaccagagttgccatctgtgccagacacactaccaactgcatctgctggtgccagcacctcagcatctgaagacattgactttgatgatctttcccggaggtttgaagagctgaaaaagaaaacataggtctcttaaaccaggcaactttcacgttttgggagttgagactgagcaatttctccttgtaacaaagaatctccatgaaattctgtttcatctgttaaccgtcactcagcacaacactccctctgggctctcttcctgctcctccagattctgctgctttccagttctctgttgatcctgagactaacaattggagactgaggccagagcaactggctcctggcagctgtgcttgtccgtttcctgtcagagtgatcccaggtttcctcctggcccgtcccatggtccctccacaggagtgtgagaggatgggggaagcactgtgggaagaccaccaaagatggctggacagtgggagagagcacgttgtgaagcatcccagcctcgtgttgaggttccagacttagaaacagacccctctgtacagggggattgtggtgagtgagaatcaaggccaccttgtgtgttttctcactctcgaatgcaagtgggagagggaaaatgactcgggacgccattgtaacggttcctggaagctgggccctctcattggcatatacagtactcctcgctgcagggcactgtcccaccgggatccagttgcaaagtttgtcttgacagttgaaggcctcgcttagttgtactggattctcagggagccctctgtggccttttgctttgcgtgctgtttcccttgtaccagagggcggcaccgtggaaattctgttttccctgtagcatattgtgttggattgcattactggcagagaaaggacaaggtgccattcaagtcctagggtgggcttccagctgccttaatagaagtactcaagtcttttgggtagtgagctggaaagcctacaggaaaagaggggtacctgttttcatttgaaaactttgattcatggaacctttaaaactaatctcagaaaaatttttggtgcccatgcagctgtagttgttcactgctttcctggatggatgggactcttatgtcataacttctgttactcctttggcccatagctaaggtcatccttccccacaggggtggctttgggattggatgatacagcttttgcttctgtgtagtatacctgtacatacttgtttcaggcagcctttctttaatgttttcagttggtttgtattctgtagctcagtagctgctaataaagttaaagatcctgtgtcctg

SEQ ID NO: 95785 - DNA, 1140 bp, Artificial Sequence
  derived and/or modified sequence
atggtgttcaagctgaagaccaaggaggagcagcacagcatgctgggcagcggcttcaaggccgagcggctgcgggtgaacctgcggctggtgatcaaccggctgaagctgctggagaagaagaagacagagctggcccagaaggccaggaaggagattgctgactacctggccgccggcaaggatgagcgggcccgcatccgggtggagcacatcatccgggaggactacctggtggaggccatggagatcctggagctgtactgtgacctgctgctggcccgcttcggcctcatccagagcatgaaggagctggacagcggcctggccgagagcgtgtccaccctcatctgggccgccccccggctgcagagcgaggtggccgagctgaagatcgtggccgaccagctgtgtgccaagtacagcaaggagtatggcaagctgtgcaggaccaaccagatcggcaccgtgaatgaccggctgatgcacaagctgtctgtggaggccccacccaagatcctggtggagcgctacctgattgagatcgccaagaactacaacgtgccctatgagccagacagcgtggtgatggccgaggcccctcctggggtggagacagacctgattgatgtgggcttcacagatgatgtgaagaagggcggccctggccggggcggcagcggcggcttcaccgcccctgtgggcggcccagatggcaccgtgcccatgcccatgcccatgcccatgcccatgcccagcgccaacacccccttctcctaccccctgcccaagggccccagcgacttcaacggcctgcccatgggcacctaccaggccttccccaacatccaccccccccagatcccagccaccccacccagctatgaatctgtggatgacatcaatgctgacaagaacatcagcagcgcccagatcgtgggccctggccccaagccagaggccagcgccaagctgcccagcaggcctgctgacaactatgacaactttgtgctgcctgagctgcccagcgtgcctgacaccctgcccacagccagcgctggggccagcaccagcgcctctgaagatattgactttgatgacctgagccgccgctttgaggagctgaagaagaagacctag

SEQ ID NO: 95786 - DNA, 1140 bp, Artificial Sequence
  derived and/or modified sequence
atggtgttcaagctgaagaccaaggaggagcagcacagcatgctggggtctggcttcaaagccgagcggctacgcgtgaaccttcggcttgtgattaatagattgaaattgttggaaaaaaagaaaactgagctcgctcaaaaagccagaaaagagattgctgattatctggctgccggcaaagatgaacgggcacggattcgcgtggaacatatcatcagagaggactatcttgttgaagctatggagatcctcgagctgtattgtgatctattgctcgctcgattcggcctcattcagtccatgaaggagttagactcaggtcttgccgagagtgtcagcacactgatttgggccgccccacgcctgcaatccgaagttgcagaactcaagatcgtagcagaccagttatgtgcaaagtatagcaaagagtacgggaaactgtgtcgcaccaaccagatcggcacagtgaacgatcgcctcatgcataagctgagcgttgaagccccaccaaagattctggtggaacggtaccttatcgaaatcgccaaaaactataacgtgccttacgagcccgacagtgtcgtcatggcagaagcccccccgggcgtcgaaaccgacttgatcgacgtcgggttcaccgatgatgtcaaaaagggaggacccggaagaggtggctccggcggcttcacggccccagttgggggccccgacggcacagtacccatgcctatgcccatgccgatgcccatgccaagcgctaacactccctttagctatcccctaccaaaaggccccagcgactttaacgggctgcccatgggcacctaccaggctttcccaaatattcacccaccacagattcctgccactcccccatcttatgaatctgtggatgatatcaatgctgataaaaacataagttccgcccaaattgtcggtcccgggccaaagcccgaggcctccgctaagttgccctccagacccgctgacaattacgacaacttcgttctgccggagctgccttccgtcccagacaccttgcctacagcttctgcaggcgctagcaccagcgcatccgaggacatcgattttgacgatcttagtagaagattcgaggagctgaaaaaaaaaacctag

SEQ ID NO: 95787 - DNA, 1140 bp, Artificial Sequence
  derived and/or modified sequence
atggtttttaagctgaagacaaaagaggagcagcactcgatgctgggatcaggctttaaggcagagaggctccgcgttaacttgcgactggtgatcaatcggcttaagctgttggaaaaaaaaaagacagagctggctcaaaaagccagaaaagaaatcgccgattacctcgccgctgggaaagatgagagagctaggattcgggtcgagcatatcatacgcgaggactatcttgtggaggcaatggaaattttagaactgtactgtgacctgctcctagctcggttcggactcatccaaagtatgaaggaactcgacagtggactggcagagtctgtaagtacactgatctgggcagccccacgcctgcaaagtgaggtggcagagctgaagatcgtggcagaccagctgtgcgctaaatacagtaaggaatatgggaaactgtgtcgcacaaaccaaatcgggactgttaacgatcgactcatgcataaactgagtgtcgaggccccacccaaaatattagtggaaaggtatctcatagaaatcgccaaaaattacaatgtgccttacgaaccagattccgtggttatggccgaggccccacccggagtcgaaacagacctcattgacgtgggatttaccgacgatgtcaaaaaggggggtcctggcaggggtggttcagggggattcactgccccagtggggggaccagacggcactgtgcccatgcccatgcccatgccgatgccgatgccaagtgctaatacaccgttcagttatcctctgcccaagggtccatcggacttcaatgggctgccaatgggcacctaccaggcctttcctaacattcacccaccccagattccggctactcccccatcctatgagtctgtcgacgacattaatgcagataaaaacatatcttcagctcagatcgtgggtccaggtcctaagcctgaggcctcggccaaattaccctcaaggccagccgacaactatgacaacttcgtactgccagagctgcctagcgtgcctgatactcttccaaccgcttcggcaggggcaagtaccagcgcatccgaagacatagatttcgatgatctgtctcgcagattcgaggaactgaaaaagaagacctag

SEQ ID NO: 95788 - DNA, 1416 bp, Artificial Sequence
  derived and/or modified sequence
agcgatgcggtttcactatggtgtccaggctggtctgcaactcccgggctcaagcgatcctcccgccccgcctctcaaagtgctgggaaggtcccttccaggcttaagcagcgataatggttttcaagttaaaaacaaaggaggaacagcacagcatgctgggctctggatttaaagctgagcgcttaagagtgaatttgagattagtcataaatcgccttaaactattggagaaaaagaaaacggaactggcccagaaagcaaggaaggagattgctgactatctggctgctgggaaagatgaacgagctcggatccgtgtggagcacattatccgggaagactacctcgtggaggccatggagatcctggagctgtactgtgacctgctgctggctcggtttggccttatccagtctatgaaggaactagattctggtctggctgaatctgtgtctacattgatctgggctgctcctcgactccagtcagaagtggctgagttgaaaatagttgctgatcagctctgtgccaagtatagcaaggaatatggcaagctatgtaggaccaaccagattggaactgtgaatgacaggctaatgcacaagctgagtgtggaagccccacccaaaatcctggtggagagatacctgattgaaattgcaaagaattacaacgtaccctatgaacctgactctgtggtcatggcagaagctcctcctggggtagagacagatcttattgatgttggattcacagatgatgtgaagaaaggaggccctggaagaggagggagtggtggcttcacagcaccagttggtggacctgatggaacggtgccaatgcccatgcccatgcccatgcctatgccatctgcaaatacgcctttctcatatccactgccaaagggaccatcagatttcaatggactgccaatggggacttatcaggcctttcccaatattcatccacctcagataccagcaactcccccatcgtatgaatctgtagatgacattaatgctgataagaatatctcttctgcacagattgttggtcctggacccaagccagaagcctctgcaaagcttccttccagacctgcagataactatgacaactttgtcctaccagagttgccatctgtgccagacacactaccaactgcatctgctggtgccagcacctcagcatctgaagacattgactttgatgatctttcccggaggtttgaagagctgaaaaagaaaacataggtctcttaaaccaggcaactttcacgttttgggagttgagactgagcaatttctccttgtaacaaagaatctccatgaaattctgtttcatctgttaaccgtcactcagcacaacactccctctgggctctcttcctgctcctccagattctgctgcttt

SEQ ID NO: 95789 - DNA, 1317 bp, Artificial Sequence
  derived and/or modified sequence
ggatggtgaaccctgaagtcggtgtctgctgcgttcacggcaggattcggttaggaggaacagcacagcatgctgggctctggatttaaagctgagcgcttaagagtgaatttgagattagtcataaatcgccttaaactattggagaaaaagaaaacggaactggcccagaaagcaaggaaggagattgctgactatctggctgctgggaaagatgaacgagctcggatccgtgtggagcacattatccgggaagactacctcgtggaggccatggagatcctggagctgtactgtgacctgctgctggctcggtttggccttatccagtctatgaaggaactagattctggtctggctgaatctgtgtctacattggctgagttgaaaatagttgctgatcagctctgtgccaagtatagcaaggaatatggcaagctatgtaggaccaaccagattggaactgtgaatgacaggctaatgcacaagctgagtgtggaagccccacccaaaatcctggtggagagatacctgattgaaattgcaaagaattacaacgtaccctatgaacctgactctgtggtcatggcagaagctcctcctggggtagagacagatcttattgatgttggattcacagatgatgtgaagaaaggaggccctggaagaggagggagtggtggcttcacagcaccagttggtggacctgatggaacggtgccaatgcccatgcccatgcccatgcctatgccatctgcaaatacgcctttctcatatccactgccaaagggaccatcagatttcaatggactgccaatggggacttatcaggcctttcccaatattcatccacctcagataccagcaactcccccatcgtatgaatctgtagatgacattaatgctgataagaatatctcttctgcacagattgttggtcctggacccaagccagaagcctctgcaaagcttccttccagacctgcagataactatgacaactttgtcctaccagagttgccatctgtgccagacacactaccaactgcatctgctggtgccagcacctcagcatctgaagacattgactttgatgatctttcccggaggtttgaagagctgaaaaagaaaacataggtctcttaaaccaggcaactttcacgttttgggagttgagactgagcaatttctccttgtaacaaagaatctccatgaaattctgtttcatctgttaaccgtcactcagcacaacactccctctgggctctcttcctgctcctccagattctgctgctttccagttctctgttgatcctg

SEQ ID NO: 95790 - protein, 335 aa, Artificial Sequence
  derived and/or modified sequence
MLGSGFKAERLRVNLRLVINRLKLLEKKKTELAQKARKEIADYLAAGKDERARIRVEHIIREDYLVEAMEILELYCDLLLARFGLIQSMKELDSGLAESVSTLIWAAPRLQSEVAELKIVADQLCAKYSKEYGKLCRTNQIGTVNDRLMHKLSVEAPPKILVERYLIEIAKNYNVPYEPDSVVMAEAPPGVETDLIDVGFTDDVKKGGPGRGGSGGFTAPVGGPDGTVPMPMPMPMPMPSANTPFSYPLPKGPVDDINADKNISSAQIVGPGPKPEASAKLPSRPADNYDNFVLPELPSVPDTLPTASAGASTSASEDIDFDDLSRRFEELKKKT

SEQ ID NO: 95791 - DNA, 1008 bp, Artificial Sequence
  derived and/or modified sequence
atgctgggcagcggcttcaaggccgagagactgagagtgaacctgagactggtgatcaacagactgaagctgctggagaagaagaagaccgagctggcccagaaggccagaaaggagatcgccgactacctggccgccggcaaggacgagagagccagaatcagagtggagcacatcatcagagaggactacctggtggaggccatggagatcctggagctgtactgcgacctgctgctggccagattcggcctgatccagagcatgaaggagctggacagcggcctggccgagagcgtgagcaccctgatctgggccgcccccagactgcagagcgaggtggccgagctgaagatcgtggccgaccagctgtgcgccaagtacagcaaggagtacggcaagctgtgcagaaccaaccagatcggcaccgtgaacgacagactgatgcacaagctgagcgtggaggccccccccaagatcctggtggagagatacctgatcgagatcgccaagaactacaacgtgccctacgagcccgacagcgtggtgatggccgaggccccccccggcgtggagaccgacctgatcgacgtgggcttcaccgacgacgtgaagaagggcggccccggcagaggcggcagcggcggcttcaccgcccccgtgggcggccccgacggcaccgtgcccatgcccatgcccatgcccatgcccatgcccagcgccaacacccccttcagctaccccctgcccaagggccccgtggacgacatcaacgccgacaagaacatcagcagcgcccagatcgtgggccccggccccaagcccgaggccagcgccaagctgcccagcagacccgccgacaactacgacaacttcgtgctgcccgagctgcccagcgtgcccgacaccctgcccaccgccagcgccggcgccagcaccagcgccagcgaggacatcgacttcgacgacctgagcagaagattcgaggagctgaagaagaagacctag

SEQ ID NO: 95792 - DNA, 1008 bp, Artificial Sequence
  derived and/or modified sequence
atgctgggaagtggatttaaagctgagaggctgagggtaaaccttaggctggttatcaataggttgaaactgctcgaaaagaaaaaaaccgagttagcacagaaagcaagaaaggagattgccgactacttggcagctggcaaagacgaacgagcccgcatacgcgtagagcatatcatacgcgaagactatctggtcgaagccatggagatcctggagctctactgcgatctcttactagcacgtttcggtctcatacagtccatgaaagagttggattcgggcttggccgagtccgtgtccacgctcatttgggccgcgccgaggctgcaatctgaagtggccgagttaaaaattgtggcggaccagctgtgtgccaaatactcaaaagagtacggtaagttatgccgaactaatcagatcggaacagtgaacgatcgtctgatgcataaactgagcgtggaagcccccccaaaaatcctcgtcgagagatacctcattgagatcgccaagaactacaatgtcccatacgaacctgactcagtagtgatggcagaggcaccaccgggcgtggagacagacctaatcgatgtcggcttcacagacgacgtcaaaaaaggcggaccgggtagggggggctccggcggcttcaccgctcccgttggagggcccgacggcacagtaccgatgccaatgcctatgccaatgcccatgccctctgcaaatactcccttcagctaccccctgcctaaagggcctgttgacgatattaatgctgacaaaaacatctcttctgcccagatcgttggcccaggaccgaaacctgaggcgagtgccaagcttccaagtcgtcctgctgacaactatgataattttgtgctgccagagctcccttctgtgccggatacacttcctacagcctccgcaggtgcttccacgtccgcttctgaggacattgactttgatgacctgagcaggagatttgaagagttaaagaaaaagacgtag

SEQ ID NO: 95793 - DNA, 1008 bp, Artificial Sequence
  derived and/or modified sequence
atgctgggcagcggcttcaaggccgagcggctgcgggtgaacctgcggctggtgatcaaccggctgaagctgctggagaagaagaagacagagctggcccagaaggccaggaaggagattgctgactacctggccgccggcaaggatgagcgggcccgcatccgggtggagcacatcatccgggaggactacctggtggaggccatggagatcctggagctgtactgtgacctgctgctggccaggtttggcctcatccagagcatgaaggagctggacagcggcctggccgagagcgtgtccaccctcatctgggccgccccccggctgcagagcgaggtggccgagctgaagatcgtggccgaccagctgtgtgccaagtacagcaaggagtatggcaagctgtgcaggaccaaccagattggaacagtgaatgaccggctgatgcacaagctgtctgtggaggccccacccaagatcctggtggagcgctacctgattgaaattgccaagaactacaacgtgccctatgagccagattctgtggtgatggccgaggcccctcctggggtggagacagacctgattgatgtgggcttcacagatgatgtgaagaagggcggccctggccggggcggcagcggcggcttcaccgcccctgtgggcggcccagatggcaccgtgcccatgcccatgcccatgcccatgcccatgcccagcgccaacacccccttctcctaccccctgcccaagggccctgtggatgacatcaatgctgacaagaacatcagcagcgcccagatcgtgggccctggccccaagccagaggccagcgccaagctgcccagcaggcctgctgacaactatgacaactttgtgctgcctgagctgcccagcgtgcctgacaccctgcccacagccagcgctggggccagcaccagcgcctctgaagatattgactttgatgacctgagccgccgctttgaggagctgaagaagaagacctag

SEQ ID NO: 95794 - DNA, 2255 bp, Artificial Sequence
  derived and/or modified sequence
gtcggtgtctgctgcgttcacggcaggattcggttaggaggaacagcacagcatgctgggctctggatttaaagctgagcgcttaagagtgaatttgagattagtcataaatcgccttaaactattggagaaaaagaaaacggaactggcccagaaagcaaggaaggagattgctgactatctggctgctgggaaagatgaacgagctcggatccgtgtggagcacattatccgggaagactacctcgtggaggccatggagatcctggagctgtactgtgacctgctgctggctcggtttggccttatccagtctatgaaggaactagattctggtctggctgaatctgtgtctacattgatctgggctgctcctcgactccagtcagaagtggctgagttgaaaatagttgctgatcagctctgtgccaagtatagcaaggaatatggcaagctatgtaggaccaaccagattggaactgtgaatgacaggctaatgcacaagctgagtgtggaagccccacccaaaatcctggtggagagatacctgattgaaattgcaaagaattacaacgtaccctatgaacctgactctgtggtcatggcagaagctcctcctggggtagagacagatcttattgatgttggattcacagatgatgtgaagaaaggaggccctggaagaggagggagtggtggcttcacagcaccagttggtggacctgatggaacggtgccaatgcccatgcccatgcccatgcctatgccatctgcaaatacgcctttctcatatccactgccaaagggaccagtagatgacattaatgctgataagaatatctcttctgcacagattgttggtcctggacccaagccagaagcctctgcaaagcttccttccagacctgcagataactatgacaactttgtcctaccagagttgccatctgtgccagacacactaccaactgcatctgctggtgccagcacctcagcatctgaagacattgactttgatgatctttcccggaggtttgaagagctgaaaaagaaaacataggtctcttaaaccaggcaactttcacgttttgggagttgagactgagcaatttctccttgtaacaaagaatctccatgaaattctgtttcatctgttaaccgtcactcagcacaacactccctctgggctctcttcctgctcctccagattctgctgctttccagttctctgttgatcctgagactaacaattggagactgaggccagagcaactggctcctggcagctgtgcttgtccgtttcctgtcagagtgatcccaggtttcctcctggcccgtcccatggtccctccacaggagtgtgagaggatgggggaagcactgtgggaagaccaccaaagatggctggacagtgggagagagcacgttgtgaagcatcccagcctcgtgttgaggttccagacttagaaacagacccctctgtacagggggattgtggtgagtgagaatcaaggccaccttgtgtgttttctcactctcgaatgcaagtgggagagggaaaatgactcgggacgccattgtaacggttcctggaagctgggccctctcattggcatatacagtactcctcgctgcagggcactgtcccaccgggatccagttgcaaagtttgtcttgacagttgaaggcctcgcttagttgtactggattctcagggagccctctgtggccttttgctttgcgtgctgtttcccttgtaccagagggcggcaccgtggaaattctgttttccctgtagcatattgtgttggattgcattactggcagagaaaggacaaggtgccattcaagtcctagggtgggcttccagctgccttaatagaagtactcaagtcttttgggtagtgagctggaaagcctacaggaaaagaggggtacctgttttcatttgaaaactttgattcatggaacctttaaaactaatctcagaaaaatttttggtgcccatgcagctgtagttgttcactgctttcctggatggatgggactcttatgtcataacttctgttactcctttggcccatagctaaggtcatccttccccacaggggtggctttgggattggatgatacagcttttgcttctgtgtagtatacctgtacatacttgtttcaggcagcctttctttaatgttttcagttggtttgtattctgtagctcagtagctgctaataaagttaaagatcctgtgtcc

SEQ ID NO: 95795 - DNA, 1008 bp, Artificial Sequence
  derived and/or modified sequence
atgctgggcagcggcttcaaggccgagcggctgcgggtgaacctgcggctggttatcaacagacttaagctgctcgaaaaaaagaaaactgagctggcccaaaaggcccgcaaggaaatcgctgattatctggccgccggcaaagacgaaagagcccggataagagtggagcatattattagagaagactacctggtggaagctatggaaatcttggaactgtactgtgatctcctgctggctcgttttggcctaattcagtcaatgaaagaacttgactcaggcttagccgagtctgttagcacactgatttgggctgcaccaagactgcagtctgaagtggctgagctcaagattgtggctgaccagctgtgcgcgaaatactcgaaggagtacggaaagctgtgcagaacaaatcagattggcaccgttaatgaccgcctgatgcataagttgtcagtggaggctcccccaaagatccttgttgagcgatacctcatagagattgctaagaattacaacgttccctacgaaccagatagtgtggtgatggcggaagcaccacccggagtggagactgatctgatcgacgttggcttcacagacgatgttaagaaaggtggaccaggacgaggcggatcgggcgggttcactgcccctgtgggaggtcctgatggtactgtgcctatgcccatgcccatgcccatgcccatgcccagtgccaatacaccattctcgtatcctctgccaaaaggaccggtggatgacatcaacgcagataagaacatcagctccgcgcagatcgtcggtccaggacctaagcccgaagcctctgccaagctccccagcagacctgcggacaattacgataactttgtcttgcccgagctcccctccgttccggatacactaccaactgcctccgctggagcatccacaagtgcctcagaagatattgattttgatgatctctccaggaggtttgaagagctgaaaaagaaaacatag

SEQ ID NO: 95796 - DNA, 1008 bp, Artificial Sequence
  derived and/or modified sequence
atgcttggcagtgggttcaaagccgagcgactgcgagtcaacctccgattggtcatcaatagattgaagctcttagaaaaaaaaaagaccgaactggcccagaaagcacgaaaggagatcgcggactaccttgcggctgggaaggatgagcgggctaggatccgggtcgagcatatcatacgtgaggactaccttgtggaggccatggaaatcctggagctgtactgtgacctgttactggccagattcggtctaattcagagcatgaaggagctcgattctgggctcgcagaaagcgtttccaccctgatctgggccgctcctaggctgcagtcagaggtggccgagctgaaaattgtcgcagaccagctgtgtgccaagtattccaaagagtacggaaagttatgtcggaccaatcagatcgggacagtcaatgaccgcctgatgcataagctgtctgtggaagccccaccaaagattcttgtggagagataccttattgagattgctaaaaattataatgtgccctacgagcccgactcggtggttatggccgaggctccgcctggagtggagaccgacctgatcgatgttggctttactgacgatgtcaaaaaaggtggtcccggacgtggcggatccggcggattcacagctcctgtcggcggtcctgatggaacagtacccatgccaatgcccatgcccatgcctatgccttcagctaatacccccttctcataccctcttccgaagggcccagtcgatgacatcaatgctgataaaaacatctcttctgcccagattgtcgggcctgggccaaaacctgaggcctccgcaaaactgcctagccgacccgcagataactatgacaattttgtgctgccagagctgcctagcgtgccagacactctgccaaccgcttcggcaggcgctagcacatctgccagcgaagatattgattttgacgatctgagtaggagatttgaggaactcaaaaagaaaacctag

SEQ ID NO: 95797 - protein, 328 aa, Artificial Sequence
  derived and/or modified sequence
MGLEEIAPCTSKRKTQCRCQPGMFCAAWALECTHCELLSDCPPGTEAELKDEVGKGNNHCVPCKAGHFQNTSSPSARCQPHTRCENQGLVEAAPGTAQSDTTCKNPLEPLPPEMSGTMLMLAVLLPLAFFLLLATVFSCIWKSHPSLCRKLGSLLKRRPQGEGPNPVAGSWEPPKAHPYFPDLVQPLLPISGDVSPVSTGLPAAPVLEAGVPQQQSPLDLTREPQLEPGEQSQVAHGTNGIHVTGGSMTITGNIYIYNGPVLGGPPGPGDLPATPEPPYPIPEEGDPGPPGLSTPHQEDGKAWHLAETEHCGATPSNRGPRNQFITHD

SEQ ID NO: 95798 - DNA, 987 bp, Artificial Sequence
  derived and/or modified sequence
atgggcctggaggagatcgccccctgcaccagcaagagaaagacccagtgcagatgccagcccggcatgttctgcgccgcctgggccctggagtgcacccactgcgagctgctgagcgactgcccccccggcaccgaggccgagctgaaggacgaggtgggcaagggcaacaaccactgcgtgccctgcaaggccggccacttccagaacaccagcagccccagcgccagatgccagccccacaccagatgcgagaaccagggcctggtggaggccgcccccggcaccgcccagagcgacaccacctgcaagaaccccctggagcccctgccccccgagatgagcggcaccatgctgatgctggccgtgctgctgcccctggccttcttcctgctgctggccaccgtgttcagctgcatctggaagagccaccccagcctgtgcagaaagctgggcagcctgctgaagagaagaccccagggcgagggccccaaccccgtggccggcagctgggagccccccaaggcccacccctacttccccgacctggtgcagcccctgctgcccatcagcggcgacgtgagccccgtgagcaccggcctgcccgccgcccccgtgctggaggccggcgtgccccagcagcagagccccctggacctgaccagagagccccagctggagcccggcgagcagagccaggtggcccacggcaccaacggcatccacgtgaccggcggcagcatgaccatcaccggcaacatctacatctacaacggccccgtgctgggcggcccccccggccccggcgacctgcccgccacccccgagcccccctaccccatccccgaggagggcgaccccggcccccccggcctgagcaccccccaccaggaggacggcaaggcctggcacctggccgagaccgagcactgcggcgccacccccagcaacagaggccccagaaaccagttcatcacccacgactag

SEQ ID NO: 95799 - DNA, 987 bp, Artificial Sequence
  derived and/or modified sequence
atgggccttgaggagatagcaccttgtacttccaaacgcaaaacgcagtgtagatgtcagcctgggatgttctgcgccgcgtgggcgctggagtgtacccattgcgagcttctatccgattgtcctcctgggacagaagccgaattgaaggacgaggtgggcaagggaaataatcattgcgtcccctgcaaggccggccacttccaaaacacatcctcccctagtgctcgttgccaacctcataccagatgtgagaatcaggggcttgtcgaggcagcccctggaacagcacaatcggacaccacctgcaaaaatccgctcgagccccttccacccgagatgtcagggactatgctgatgctcgcagtgcttctgcctctagcgttcttcctcctgctggcaacggtgttttcatgtatctggaaatcacacccctctttatgcaggaagcttggaagtctgctgaaaagaaggccccaaggggaggggcctaacccagtggccgggagctgggagccccccaaagcccacccttatttccctgacctagtgcagccactgctgcccatctccggcgacgtgagtcctgtcagcaccggtcttccggccgcaccggtcctggaagctggggtgccccagcaacaaagccctctcgacttaacgcgagaacctcagcttgaacccggggaacaatctcaagtggcccatgggaccaatgggatccacgtcacaggcgggtcgatgacaattaccggcaacatatacatatacaacggaccagtgctgggtgggccgcctggtcccggagacctccccgccacaccggaaccaccgtaccctataccggaagagggcgacccagggccaccagggctctccacgccccatcaggaagacggcaaggcctggcacctggccgaaactgaacactgtggggcgactcccagcaatcgcggacctcgcaatcaattcattacacatgactag

SEQ ID NO: 95800 - DNA, 987 bp, Artificial Sequence
  derived and/or modified sequence
atgggcctggaggagatcgccccctgcaccagcaagaggaagacccagtgccgctgccagcccggcatgttctgtgccgcctgggccctggagtgcacccactgtgagctgctgagtgactgccccccaggcacagaagctgagctgaaggatgaggtgggcaaaggaaacaaccactgtgtgccctgcaaggccggccacttccagaacaccagcagccccagcgcccgctgccagccccacacccgctgtgagaaccagggcctggtggaggccgcccctggaacagcccagagcgacaccacctgcaagaaccccctggagcccctgcccccagagatgagcggcaccatgctgatgctggccgtgctgctgcccctggccttcttcctgctgctggccaccgtcttcagctgcatctggaagagccaccccagcctgtgcaggaagctgggcagcctgctgaagagaagaccccagggcgagggccccaaccctgtggccggctcctgggagccccccaaggcccacccctacttcccagacctggtgcagcccctgctgcccatctctggagatgtgtcccctgtgtccacaggcctgcctgctgcccctgtgctggaggccggcgtgccccagcagcagagccccctggacctgacccgggagccccagctggagcccggggagcagagccaggtggcccacggcaccaacggcatccacgtgactggaggctccatgaccatcactggaaacatctacatctacaacggccctgtgctgggcggccccccaggccctggggacctgcctgccaccccagagcccccctaccccatccctgaggagggggaccccggccccccaggcctgagcaccccccaccaggaggatggcaaggcctggcacctggccgagacagagcactgtggggccacccccagcaacagaggccccaggaaccagttcatcacccatgactag

SEQ ID NO: 95801 - DNA, 987 bp, Artificial Sequence
  derived and/or modified sequence
atgggcctggaggagatcgccccctgcaccagcaagcggaagacccagtgccgttgccagccagggatgttctgcgccgcctgggccctggagtgtactcactgtgagttactcagtgactgccctccgggcaccgaggccgaactaaaggacgaggttggaaaaggaaataaccactgcgtgccttgtaaggcaggtcactttcagaacacgtcgagcccgagtgcccgttgccagccccacacaagatgtgaaaatcaggggctcgtggaagcagctcctggcacagcgcagtccgatacaacgtgcaagaaccctctggaacctctgccgccagagatgtcaggtacaatgctgatgctcgctgtcttgctgccactggcctttttcttattgctcgctacggtgttctcctgtatctggaagagtcaccctagcctgtgtagaaagctgggcagtctccttaagcgcagacctcaaggcgaaggacctaaccctgtggcagggagttgggagccccctaaggcccacccatactttcctgacctcgtgcagccattactccctatcagcggtgacgtctctcccgtcagcacggggttgcccgctgcccccgtcctggaggccggtgtaccccagcagcagtctcccctcgatcttactagagaaccacaattagagcctggagaacagagccaagtggctcatgggacgaacgggattcacgtcacaggcggctccatgaccatcaccgggaatatctacatctataacggcccagtcttgggcggcccccccggtccaggtgatcttccagcgaccccagagcctccctaccccattcctgaagagggggaccccgggccaccaggcctttctacccctcatcaggaggatggtaaagcttggcacctggccgagacagaacattgtggcgctacgccaagcaataggggacccaggaaccaattcatcacacatgactag

SEQ ID NO: 95802 - DNA, 987 bp, Artificial Sequence
  derived and/or modified sequence
atggggctcgaagaaatcgccccttgtaccagtaaaagaaagactcagtgtcggtgccagccaggcatgttctgcgcagcttgggcgctggaatgtacacactgtgagcttctctcggattgcccaccagggaccgaggcggaactgaaggatgaagtgggcaaagggaataaccactgtgtgccgtgcaaagcaggacactttcagaacacatctagccccagtgctcgatgtcagccacacaccaggtgcgagaatcagggactggttgaagccgcaccaggtaccgcacaatcagataccacctgtaaaaatccactcgaacctctaccaccagagatgtctggcacaatgctgatgctggcggtgctactgcctcttgcattcttcctcctcctggcaaccgtgttttcctgtatctggaaatcacatccttcactctgtcggaagctgggctctctcctgaaacgtaggcctcagggggaggggcctaatcccgtagcaggctcttgggagcctcccaaggcccacccctacttccctgacctcgtgcaacccctgctgccgatcagtggagatgttagcccggtgagtacaggtcttcccgcagctcctgtcctggaggccggagtgccacagcagcagagtcccctcgacctcacccgagagcctcaactggaacctggcgagcagtctcaggtcgcccatggaaccaatggcatccacgttacagggggatcaatgaccatcacggggaacatctatatatataacggtcccgtgctggggggtccccctggccctggcgatcttccagcaacgccagaacctccatatccaatacctgaagagggagaccctggaccgccaggtttgagcactccacaccaggaggacggtaaagcctggcatttggcggaaaccgagcattgtggagccacccctagtaaccgtggaccgaggaatcaattcattacacacgactag

SEQ ID NO: 95803 - protein, 154 aa, Artificial Sequence
  derived and/or modified sequence
MALGVPISVYLLFNAMTALTEEAAVTVTPPITAQQGNWTVNKTEADNIEGPIALKFSHLCLEDHNSYCINGACAFHHELEKAICRCFTGYTGERCEHLTLTSYAVDSYEKYIAIGIGVGLLLSGFLVIFYCYIRKRCLKLKSPYNVCSGERRPL

SEQ ID NO: 95804 - DNA, 465 bp, Artificial Sequence
  derived and/or modified sequence
atggctttaggtgtgcccatctctgtatacctcctttttaacgccatgactgcattaacagaagaggcagctgtcacggtcacgccaccgatcactgcccaacaggggaattggacagtcaacaaaacagaggccgacaacatcgagggtccaattgccctgaagttctcccatctatgcctggaagatcataatagctactgcatcaatggcgcttgcgccttccaccacgaattggaaaaggccatttgtagatgttttacagggtacaccggcgagcgttgtgaacacttgaccttaaccagctacgccgtggactcctacgaaaaatacattgccattggtattggcgtgggccttttacttagcggcttcctggtgatattttactgttatatacgtaagaggtgtttaaagctgaaatccccttataatgtgtgctctggcgaaagacgccctctctag

SEQ ID NO: 95805 - DNA, 1196 bp, Artificial Sequence
  derived and/or modified sequence
aaaaaccttccacccgtcagtctagaaggataagagaaagaaagttaagcaactacaggaaatggctttgggagttccaatatcagtctatcttttattcaacgcaatgacagcactgaccgaagaggcagccgtgactgtaacacctccaatcacagcccagcaaggtaactggacagttaacaaaacagaagctgacaacatagaaggacccatagccttgaagttctcacacctttgcctggaagatcataacagttactgcatcaacggtgcttgtgcattccaccatgagctagagaaagccatctgcaggtgttttactggttatactggagaaaggtgtgagcacttgactttaacttcatatgctgtggattcttatgaaaaatacattgcaattgggattggtgttggattactattaagtggttttcttgttattttttactgctatataagaaagaggtgtctaaaattgaaatcgccttacaatgtctgttctggagaaagacgaccactgtgaggcctttgtgaagaattttcatcaaggcatctgtagagatcagtgagcccaaaattaaagttttcagatgaaacaacaaaacttgtcaagctgactagactcgaaaataatgaaagttgggatcacaatgaaatgagaagataaaattcagcgttggcctttagactttgccatccttaaggagtgatggaagccaagtgaacaagcctcagtgacacaagtcaaattcatagtttcactctgggttttttgttgttgtgtggttattattctcactacagaaagactgagtttcatgctcctggctatgtcagatgtgaattttcatgggaataataatcaaccttgcagcaagccaaagcaatgcctcgcttgggttcttcatgttcttactacccagcgttttttaccacctagatgggcctctctaagtctatttgctcaatgaaccttatcccaaacttgttgttttcatggtgtctgaaagaatgtgatgtcagcttttagaatgaaatcagtgttaaggtacctccagtgaaccaaacatgtgtcttaaatctaagccactgaaaacagaagggaatgtccaaggcaaatacaaatcatacacagcttgtaacaacatacagcctttctatgtgaaataatggaataaactaaagagtttctg

SEQ ID NO: 95806 - DNA, 465 bp, Artificial Sequence
  derived and/or modified sequence
atggccttgggagtacctatctccgtctacctcctgtttaacgccatgactgccctgaccgaagaagccgcagtcacagtcactccaccgattacggctcagcaaggcaattggacagtgaataagaccgaagcggacaatatagaaggcccgatcgccctgaaattctcacacctgtgcctggaagaccataactcctattgcatcaatggagcctgtgcctttcaccatgaactggaaaaggcgatatgccgctgcttcacaggttacacaggagagcgatgtgagcatctcacgctaacatcttacgcagttgactcctacgagaaatacattgctatcggtataggtgtgggcttgttgttatctggattccttgtcatattttactgctatatcaggaaacgctgcctaaaactgaaatccccttacaatgtctgctctggagaacgccgccctctttag

SEQ ID NO: 95807 - DNA, 465 bp, Artificial Sequence
  derived and/or modified sequence
atggcactgggggtacccatttccgtgtacctgcttttcaacgccatgacagctctgactgaggaggccgcggtcaccgtcactcccccgatcactgctcagcagggaaactggacggttaacaaaacagaggcggacaacatcgaaggtccaatcgccttaaaattttcccatctttgcctggaggatcataactcatattgtattaatggcgcttgtgcatttcaccatgaactcgaaaaggcgatttgcagatgtttcaccggctacacaggagaaagatgtgagcaccttaccctaacatcttacgcagttgactcctacgagaaatacattgctatcggtataggtgtgggcttgttgttatctggattccttgtcatattttactgctatatcaggaaacgctgcctaaaactgaaatccccttacaatgtctgctctggagaacgccgccctctttag

SEQ ID NO: 95808 - DNA, 465 bp, Artificial Sequence
  derived and/or modified sequence
atggccctgggcgtgcccatcagcgtgtacctgctgttcaacgccatgaccgccctgaccgaggaggccgccgtgaccgtgaccccccccatcaccgcccagcagggcaactggaccgtgaacaagaccgaggccgacaacatcgagggccccatcgccctgaagttcagccacctgtgcctggaggaccacaacagctactgcatcaacggcgcctgcgccttccaccacgagctggagaaggccatctgcagatgcttcaccggctacaccggcgagagatgcgagcacctgaccctgaccagctacgccgtggacagctacgagaagtacatcgccatcggcatcggcgtgggcctgctgctgagcggcttcctggtgatcttctactgctacatcagaaagagatgcctgaagctgaagagcccctacaacgtgtgcagcggcgagagaagacccctgtag

SEQ ID NO: 95809 - DNA, 465 bp, Artificial Sequence
  derived and/or modified sequence
atggcattaggagttcccatcagcgtgtatctgctttttaatgccatgacggcactgaccgaggaagctgccgtgaccgtgactcctccaattacagcacagcagggaaattggaccgtgaacaagaccgaggcagataacattgaggggcccattgcgcttaaattcagtcatctgtgccttgaggatcacaacagctattgtattaacggagcttgtgccttccatcacgaactggagaaagcaatctgccgatgttttactggttataccggggaaagatgtgagcacttaaccctgacgagttacgctgtggactcgtacgagaaatatattgctatcggcattggcgtaggcctcttattatccggctttctggtgatattctattgttacatcaggaagcggtgtctaaaactaaaaagtccctacaatgtctgctctggcgagcggagaccgctgtag

SEQ ID NO: 95810 - DNA, 465 bp, Artificial Sequence
  derived and/or modified sequence
atggccctgggcgtgcccatctctgtgtacctgctcttcaatgccatgacagccctgacagaggaggccgctgtgacagtgaccccacccatcacagcccagcagggcaactggacagtgaacaagacagaagctgacaacatcgagggccccatcgccctgaagttcagccacctgtgcctggaggaccacaacagctactgcatcaacggggcctgtgccttccaccacgagctggagaaggccatctgccgctgcttcaccggctacacaggagagcgctgtgagcacctgaccctgaccagctatgctgtggacagctatgagaagtacatcgccatcggcatcggcgtgggcctgctgctgagcggcttcctggtgatcttctactgctacatcaggaagcgctgcctgaagctgaagagcccctacaacgtgtgcagcggggagcggcggcccctgtag

SEQ ID NO: 95811 - DNA, 465 bp, Artificial Sequence
  derived and/or modified sequence
atggccctgggcgtgcccatcagcgtgtacctgctgttcaacgccatgaccgccctgacagaagaggccgctgtaacagtcactcctcccataactgctcaacagggcaactggacagtaaataaaaccgaagccgacaacatcgagggtcctatcgctcttaagttttcacacttatgcctggaagaccataactcttactgcattaacggggcttgcgcctttcaccatgagcttgaaaaggcaatttgcagatgcttcactggatacactggagaaagatgtgagcacctgacccttacttcctacgctgtggacagctacgagaagtatatcgctatcggcattggcgttggactgctgctgagcggatttctggtcattttttactgttatattagaaagaggtgtctgaagttgaagagtccctacaatgtgtgtagcggagaacgccggccgctgtag

SEQ ID NO: 95812 - RNA, 465 nt, Artificial Sequence
  derived and/or modified sequence
auggccuugggaguaccuaucuccgucuaccuccuguuuaacgccaugacugcccugaccgaagaagccgcagucacagucacuccaccgauuacggcucagcaaggcaauuggacagugaauaagaccgaagcggacaauauagaaggcccgaucgcccugaaauucucacaccugugccuggaagaccauaacuccuauugcaucaauggagccugugccuuucaccaugaacuggaaaaggcgauaugccgcugcuucacagguuacacaggagagcgaugugagcaucucacgcuaacaucuuacgcaguugacuccuacgagaaauacauugcuaucgguauaggugugggcuuguuguuaucuggauuccuugucauauuuuacugcuauaucaggaaacgcugccuaaaacugaaauccccuuacaaugucugcucuggagaacgccgcccucuuuag

SEQ ID NO: 95813 - RNA, 465 nt, Artificial Sequence
  derived and/or modified sequence
auggcacuggggguacccauuuccguguaccugcuuuucaacgccaugacagcucugacugaggaggccgcggucaccgucacucccccgaucacugcucagcagggaaacuggacgguuaacaaaacagaggcggacaacaucgaagguccaaucgccuuaaaauuuucccaucuuugccuggaggaucauaacucauauuguauuaauggcgcuugugcauuucaccaugaacucgaaaaggcgauuugcagauguuucaccggcuacacaggagaaagaugugagcaccuuacccuaacaucuuacgcaguugacuccuacgagaaauacauugcuaucgguauaggugugggcuuguuguuaucuggauuccuugucauauuuuacugcuauaucaggaaacgcugccuaaaacugaaauccccuuacaaugucugcucuggagaacgccgcccucuuuag

SEQ ID NO: 95814 - protein, 124 aa, Artificial Sequence
  derived and/or modified sequence
MDPARPLGLSILLLFLTEAALGDAAQEPTGNNAEICLLPLDYGPCRALLLRYYYDRYTQSCRQFLYGGCEGNANNFYTWEACDDACWRIEKVPKLSSMTSLKKKKKMPKLRFASRIRKIRKKQF

SEQ ID NO: 95815 - DNA, 375 bp, Artificial Sequence
  derived and/or modified sequence
atggaccccgccagacccctgggcctgagcatcctgctgctgttcctgaccgaggccgccctgggcgacgccgcccaggagcccaccggcaacaacgccgagatctgcctgctgcccctggactacggcccctgcagagccctgctgctgagatactactacgacagatacacccagagctgcagacagttcctgtacggcggctgcgagggcaacgccaacaacttctacacctgggaggcctgcgacgacgcctgctggagaatcgagaaggtgcccaagctgagcagcatgaccagcctgaagaagaagaagaagatgcccaagctgagattcgccagcagaatcagaaagatcagaaagaagcagttctag

SEQ ID NO: 95816 - DNA, 375 bp, Artificial Sequence
  derived and/or modified sequence
atggatcctgctagaccacttgggctgtccatcctcctgctctttctgaccgaggcggcgcttggggacgcagcccaggagcctacaggcaataacgctgagatatgtctcctgcccctggactacggtccctgccgagctctgctgctgaggtactactacgatcgctacacacagagctgtcgacaatttctgtacggcgggtgcgaaggaaatgccaacaatttttatacctgggaagcatgtgatgacgcttgctggcggatcgagaaagtgcccaaattgagctcaatgacttctctgaagaagaaaaaaaaaatgcccaagctgcgtttcgcttccaggatccggaagatcaggaagaaacagttctag

SEQ ID NO: 95817 - DNA, 375 bp, Artificial Sequence
  derived and/or modified sequence
atggaccctgcccggcccctgggcctgagcatcctgctgctcttcctgacagaagctgccctgggagatgctgcccaggagcccactggaaataatgctgagatctgcctgctgcccctggactatggcccctgccgggccctgctgctgcgctactactatgaccgctacacccagagctgccggcagttcctgtatggaggctgtgagggcaatgccaacaacttctacacctgggaggcctgtgatgatgcctgctggagaattgagaaggtgcccaagctgagctccatgaccagcctgaagaagaagaagaagatgcccaagctgcgctttgccagccgcatcaggaagatcaggaagaagcagttctag

SEQ ID NO: 95818 - DNA, 375 bp, Artificial Sequence
  derived and/or modified sequence
atggaccccgcccggcccctgggcctgagcatcctgctgctgttccttacagaggccgccttgggtgatgccgcacaagagccaaccggtaacaacgccgagatctgcttgctgccattggactatggaccatgtagggcattgctactgcgctattattatgatcgttatacccagtcctgccgtcaattcttatatggtggctgcgagggtaatgctaacaacttctatacttgggaagcctgtgacgacgcttgctggcgcatcgaaaaggtccccaaactctcaagtatgacaagtctgaagaaaaagaagaagatgcctaagctgcgattcgcatctcgtatcaggaaaatacgcaagaagcagttttag

SEQ ID NO: 95819 - DNA, 375 bp, Artificial Sequence
  derived and/or modified sequence
atggaccctgcccgacccctcggcctttcaattctcctgttatttcttacagaagcagctctgggtgacgctgcccaggaaccaacaggcaacaatgcggagatctgcctgctacccctggactatggcccatgtcgtgctctcctgctacgttactattatgaccgctacacccagagttgccggcagttcctatacggcggttgtgaaggaaatgccaataacttctacacctgggaagcctgcgacgatgcctgctggcggatcgagaaggtgcctaagctgagctctatgactagcttaaaaaagaagaagaaaatgcctaagttgcggttcgcttcgcgcattcgcaaaatacgtaaaaagcaattctag

SEQ ID NO: 95820 - DNA, 1426 bp, Artificial Sequence
  derived and/or modified sequence
gggaattcctctccctcttacacagtttgcagcgcgggggcggcggggtgacagtccccgtgcatgaatcagccacccctcaggctccgccccggcgggggtcggccggacgctcgccccgcataaagcgggcacccgggccgcctggagcagaaagccgcgcacctcctcccgccaggcgctttctcggacgccttgcccagcgggccgcccgaccccctgcaccatggaccccgctcgccccctggggctgtcgattctgctgcttttcctgacggaggctgcactgggcgatgctgctcaggagccaacaggaaataacgcggagatctgtctcctgcccctagactacggaccctgccgggccctacttctccgttactactacgacaggtacacgcagagctgccgccagttcctgtacgggggctgcgagggcaacgccaacaatttctacacctgggaggcttgcgacgatgcttgctggaggatagaaaaagttcccaaactaagttccatgacatctttgaaaaagaaaaagaagatgccaaagcttcgctttgccagtagaatccggaaaattcggaagaagcaattttaaacattcttaatatgtcatcttgtttgtctttatggcttatttgcctttatggttgtatctgaagaataatatgacagcatgaggaaacaaatcattggtgatttattcaccagtttttattaatacaagtcactttttaaaaaatttggatttttttatatataactagctgctattcaaatgtgagtctaccatttttaatttatggttcaactgtttgtgagactgaattcttgcaatgcataagatataaaagcaaatatgactcactcatttcttggggtcgtattcctgatttcagaagaggatcataactgaaacaacataagacaatataatcatgtgcttttaacatatttgagaataaaaaggactagcaaataaaactcattttgcatttaaaagttggattatattttagtcccaagaagacaaagtcgcagattaacaacactttaaaaatattactcccattttattgtgttagattgcagtacaatgaatgaataaggggatttatttaaaagatcttaactttcttgactgatttaaaaagctaatcaatttattaaagccagaaatgttctcctctgggaaagcaatttctatctatttatctaccaatccccactcacatgtatatgtttgtgtttacatagagatagatggttttaagggttttcctattgttaaattatttcctaagacattgtgggttggagaccactaaacttataaaaaaccaaggaaagtaaagtttttcaaatgtttatactgtttaaggtgtttatttatataaaccatgcatgagaaaccatgcataaa

SEQ ID NO: 95821 - protein, 81 aa, Artificial Sequence
  derived and/or modified sequence
MEGAGAGSGFRKELVSRLLHLHFKDDKTKVSGDALQLMVELLKVFVVEAAVRGVRQAQAEDALRVDVDQLEKVLPQLLLDF

SEQ ID NO: 95822 - DNA, 246 bp, Artificial Sequence
  derived and/or modified sequence
atggagggcgccggcgccggcagcggcttcagaaaggagctggtgagcagactgctgcacctgcacttcaaggacgacaagaccaaggtgagcggcgacgccctgcagctgatggtggagctgctgaaggtgttcgtggtggaggccgccgtgagaggcgtgagacaggcccaggccgaggacgccctgagagtggacgtggaccagctggagaaggtgctgccccagctgctgctggacttctag

SEQ ID NO: 95823 - DNA, 246 bp, Artificial Sequence
  derived and/or modified sequence
atggagggcgcgggagcgggatctggattccgcaaggagctggtttcccgtctgttacacctgcattttaaagatgataaaactaaggtctcgggggacgccctgcagctcatggttgagctgctgaaagtcttcgttgtggaagcagccgttcgaggggtgcgccaggcacaggccgaggacgccctccgggttgacgttgaccagctcgaaaaagtcctcccccagctcttactagacttctag

SEQ ID NO: 95824 - DNA, 246 bp, Artificial Sequence
  derived and/or modified sequence
atggagggcgctggggccggcagcggcttcaggaaggagctggtgtcccggctgctgcacctgcacttcaaggatgacaagaccaaggtgtctggagatgccctgcagctgatggtggagctgctgaaggtgtttgtggtggaggccgctgtgcggggcgtgcggcaggcccaggccgaggatgccctgcgggtggatgtggaccagctggagaaggtgctgccccagctgctgctggacttctag

SEQ ID NO: 95825 - DNA, 246 bp, Artificial Sequence
  derived and/or modified sequence
atggagggcgccggcgccggcagcggcttccggaaggagctggtgtcacgcctgctccacctacatttcaaagatgataaaacaaaagttagcggtgatgccctacagctgatggtggaattactaaaggtcttcgtcgtagaagccgcagtaaggggagtccgccaggctcaggccgaagacgctcttcgcgtcgatgtggaccagctggaaaaagtgttgccacagctcctcctggatttctag

SEQ ID NO: 95826 - DNA, 246 bp, Artificial Sequence
  derived and/or modified sequence
atggagggcgctggcgctggctccggttttagaaaagagctcgtgtcccgactccttcacttgcacttcaaggacgacaagactaaagtgtccggcgacgctctgcagttaatggtcgaattacttaaggtgttcgtggtggaggccgcagtgagaggcgttcgccaggcccaggcagaggatgccttacgcgtggatgtcgatcagttagagaaggtgctgccccagttgctcctcgatttttag

SEQ ID NO: 95827 - DNA, 805 bp, Artificial Sequence
  derived and/or modified sequence
ctcattggctggaggcgcggggcggggttccggtgggcgcgcgttgaggctgcggtcatggagggagcaggagctggatccggcttccggaaggagctggtgagcaggctgctgcacctgcacttcaaggatgacaagaccaaagtgagcggggacgcgctgcagctcatggtggagttgctgaaggtcttcgttgtggaagcagcagtccgcggcgtgcggcaggcccaggcagaagacgcgctccgtgtggacgtggaccagctggagaaggtgcttccgcagctgctcctggacttctagggatctcagccgtggctgaggccacccccagaggagcccctggtccacagaagcaggccttgtgtttccagcggcctctgataagaggcagggaaggacctgaaggatttggagttgattcaaacaagatctctgggagtctccagcctgtgcagaaggggcaggactgcagtgcactgcgggccttggagtgtccagtggggacactggtgtgggaaggggcagcacctggggagtccctgcctctcctccctgggacaatagtgtgcatgccacccggggtcctacaggcaggtgctgggaaaggcctggccagcaggtagcctgtgtgtttgacaaacagcagctggcagcgctgcctcctgcccacattcctgccacccgacatcaaagctggcgtgtgacctttccagccatgcgatattccccttggaagatgcttccccaggctataaatttgttctcacaaagcaacatcaataaatcaaaactgtctctccca

SEQ ID NO: 95828 - protein, 386 aa, Artificial Sequence
  derived and/or modified sequence
MEGGLAGERARESPVDCSVSKCSKLVGGGESNPMNYNSYMDEKNGPPPPNMTTNERRVIVPADPTLWTQEHVRQWLEWAIKEYSLMEIDTSFFQNMDGKELCKMNKEDFLRATTLYNTEVLLSHLSYLRESSLLAYNTTSHTDQSSRLSVKEDPSYDSVRRGAWGNNMNSGLNKSPPLGGAQTISKNTEQRPQPDPYQILGPTSSRLANPGSGQIQLWQFLLELLSDSANASCITWEGTNGEFKMTDPDEVARRWGERKSKPNMNYDKLSRALRYYYDKNIMTKVHGKRYAYKFDFHGIAQALQPHPTESSMYKYPSDISYMPSYHAHQQKVNFVPPHPSSMPVTSSSFFGAASQYWTSPTGGIYPNPNVPRHPNTHVPSHLGSYY

SEQ ID NO: 95829 - DNA, 3439 bp, Artificial Sequence
  derived and/or modified sequence
atggagggaggactggcaggcgagcgggcgagggagtctccggtggactgcagcgttagcaaatgcagcaagctggtgggcggaggcgagtccaaccccatgaactacaacagctatatggacgagaagaatggcccccctcctcccaacatgaccaccaacgagaggagagtcatcgtccccgcagaccccacactgtggacacaggagcatgtgaggcaatggctggagtgggccataaaggagtacagcttgatggagatcgacacatcctttttccagaacatggatggcaaggaactgtgtaaaatgaacaaggaggacttcctccgcgccaccaccctctacaacacggaagtgctgttgtcacacctcagttacctcagggaaagttcactgctggcctataatacaacctcccacaccgaccaatcctcacgattgagtgtcaaagaagacccttcttatgactcagtcagaagaggagcttggggcaataacatgaattctggcctcaacaaaagtcctccccttggaggggcacaaacgatcagtaagaatacagagcaacggccccagccagatccgtatcagatcctgggcccgaccagcagtcgcctagccaaccctggaagcgggcagatccagctgtggcaattcctcctggagctgctctccgacagcgccaacgccagctgtatcacctgggaggggaccaacggggagttcaaaatgacggaccccgatgaggtggccaggcgctggggcgagcggaaaagcaagcccaacatgaattacgacaagctgagccgggccctccgttattactatgataaaaacattatgaccaaagtgcacggcaaaagatatgcttacaaatttgacttccacggcattgcccaggctctgcagccacatccgaccgagtcgtccatgtacaagtacccttctgacatctcctacatgccttcctaccatgcccaccagcagaaggtgaactttgtccctccccatccatcctccatgcctgtcacttcctccagcttctttggagccgcatcacaatactggacctcccccacggggggaatctaccccaaccccaacgtcccccgccatcctaacacccacgtgccttcacacttaggcagctactactagaagcttactcatcagtggccttctagctgaagcccatcctgcacacttactggatgctttggactcaacaggacatatgtggccttgaagggaagacaaaactggatgttctttcttgttggatagaacctttgtatttgttctttaaaaacattttttttaatgttggtaacttttgcttcctctacctgaacaaagagatgaataattccatgggccagtatgccagtttgaattctcagtctcctagcatcttgtgagttgcatattaagattactggaatggttaagtcatggttctgagaaagaagctgtacgttttctttatgtttttatgaccaaagcagtttcttgtcaatacacggggttcagtatgacacagaatcatggacttaacccgtcatgttctggtttgagatttagtgacaaatagaggtgggaagcttataatctaattttaggaggaccaaattcagtggatggcaactggaacattgattgtaaggccagtgaagttttcacccaactggaatttgatggaaagaaggtttgtgtgtttaagacgccaagggcattgcagaatccctctcagtggacagtatgcactcagctgaccactctctctagaaatagtcaagatatgaactaagaaattttaatgcaaatacatacattcctgaaagacggggaattaaattactaatttttttttttttttaaatgatgacagtggtcccagaacttggaaaagttgtagggatttctaaactcaagcagattcgcaagtgctgtgcgcttgtcagaccatcagaccagggccaaccaatcagaaggcaacttactgtataaattatgcagagttattttcctatatctcacagtattaaaaataaataattaaaaattaagaataaataaacgagttgacctcggtcacaaaagcagttttactatcgaatcaatcgctgttattttttttaatgtaatttgtacatcttttttcaatctgtacatttgggctgtctgtatgtttttatagctggtttttaaaaagcataatatgcctatagctgaaaaggaaacagggctgtttaagtcactgacttatgagaaagcaaagcactggtacagttatttaacaggcatacacaagcagggaaaagataatccatttagatctttaatgctttggaaatgcgtgtaacagtactgcaataatcacagctctgggaaaaacaacgaaactttcccttgtggagaggagggattttcctgctctatataagcaacatatttttagacattaaaatatatataattttgcaggtaattgttgacttttttaactatattaagtgttaagctgacaactgtcaaagaagaccatgttgtaaaataatttgactaaataaatggttccttctctcagtgctgaggacagttttcttatttaccgcccccgttaggtcaaagggttttccctggggaactttcctatttacttcttgcactatcaagaatttttcgaatgtacctactgcagtacagcagaaggtaaaaaatcagtgtggtttttcattgttgttgatgatgtttgtagtgtttttgtgtgtgttatttaaatcttcctccagcctaaaagggttttataaaacagcagctaaggccatggataaacctgtatgtaaggactggagcaaagcgagctggtctatccagactggtctgtgagatttaactctgcagcctcccctgggcacttcagacccagacggccaccttctgccactccagcaaagaataagcgccctgcttccttcaggtctcagaccaggactttatggctcatgcagatttttaaggtcatttttcttcccaaggaagaaacttgcctccagttccttcactgttaggtagcttattttcattttctctattttacaatgaaaagagtgagacctgggaagtccttgatttgcaaggaattagactcacagcattggtaaccctagaaccttcttagggtaacactaagtaccttctagacaacatgtctacctaaatgaaatgggatgtgtttcggaacatttgtctccagtttttttttaatcttgcaccctgccatttaaaaagatgtgtaaagcacatattctcaacatatgcacattgatttataaatcatatatacaaactgttacattattcttcatattagaaaacaaatacaaaatagaacattttaaatggtgatataaaaataaattgaaactgaaattct

SEQ ID NO: 95830 - DNA, 1161 bp, Artificial Sequence
  derived and/or modified sequence
atggagggcggactggccggcgagagggcccgcgagtctcccgtggactgcagcgtgagtaagtgttctaaacttgttggagggggggagtctaaccccatgaattacaattcttatatggatgaaaaaaacggccctcctccgccaaatatgactaccaatgagcgcagagtgatagttcccgccgacccgacactgtggactcaggagcatgtcaggcagtggctggagtgggccataaaagaatactctcttatggaaatagacacatcatttttccaaaatatggacggaaaagaactgtgtaaaatgaacaaggaagattttttacgggcaaccactctttacaataccgaggttttactttcacacttgagctacctgcgcgaatcatctttgctggcttacaatactacctcccacacggaccagtcttctcgtctttcggtgaaagaggacccaagttacgactccgtgagacgaggagcctgggggaataacatgaatagcggcttgaataagtcacccccactggggggagctcagactattagtaagaataccgaacaacggccacagccagacccgtaccagatcctgggcccaacatcgtcccgactcgccaacccaggcagcggacagatccaactgtggcagttccttctagagctgcttagcgatagcgccaacgcaagctgtatcacctgggaagggacgaacggcgaatttaagatgacggacccagatgaggtggcgcgaaggtggggagagaggaagtcgaagcctaatatgaactacgataaactgagtcgagcactccggtattattacgataagaatattatgacaaaggtccacggaaaaagatacgcatacaagttcgattttcatggcattgcacaggcccttcagccacaccctacggagtcttccatgtacaagtaccctagtgacatctcctatatgccgtcataccacgctcaccagcagaaggtgaattttgtgcccccccatccgagctccatgcctgtgacttcatcctccttttttggtgctgccagtcagtactggacctcacctaccggcggaatctacccaaatcctaatgtccccaggcacccaaacacccacgttccttcacacctcggttcatattactag

SEQ ID NO: 95831 - DNA, 1161 bp, Artificial Sequence
  derived and/or modified sequence
atggagggcggcctggccggggagcgggcccgggagagccctgtggactgcagcgtgtccaagtgcagcaagctggtgggcggcggggagagcaaccccatgaactacaacagctacatggatgagaagaatggccccccaccacccaacatgaccaccaatgaaagaagagtgattgtgcctgctgaccccaccctgtggacccaggagcacgtgcggcagtggctggagtgggccatcaaggagtacagcctgatggagattgacaccagcttcttccagaacatggatggcaaggagctgtgcaagatgaacaaggaggacttcctgcgggccaccaccctgtacaacacagaggtgctgctgagccacctgagctacctgcgggagagcagcctgctggcctacaacaccaccagccacacagaccagagcagccggctgtctgtgaaggaggaccccagctatgacagcgtgcggcggggggcctggggcaacaacatgaacagcggcctgaacaagagcccccccctgggcggggcccagaccatcagcaagaacacagagcagaggccccagcctgacccctaccagatcctgggccccaccagcagccggctggccaaccctggcagcggccagatccagctgtggcagttcctgctggagctgctgagtgacagcgccaatgccagctgcatcacctgggagggcaccaacggggagttcaagatgacagatcctgatgaggtggcccggcgctggggcgagaggaagagcaagcccaacatgaactatgacaagctgagccgggccctgcgctactactatgacaagaacatcatgaccaaggtgcacggcaagagatatgcctacaagtttgacttccatggaattgcccaggccctgcagccccaccccacagagagctccatgtacaagtaccccagcgacatctcctacatgcccagctaccacgcccaccagcagaaggtgaactttgtgcccccccaccccagctccatgcctgtgaccagcagcagcttcttcggggccgccagccagtactggaccagccccactggaggcatctaccccaaccccaacgtgcccaggcaccccaacacccacgtgcccagccacctgggcagctactactag

SEQ ID NO: 95832 - DNA, 1161 bp, Artificial Sequence
  derived and/or modified sequence
atggagggcggcctggccggcgagcgggcccgggagagccccgtggattgctcagtgtctaaatgttcaaagctcgtggggggcggcgagagtaacccgatgaactacaattcttatatggatgagaaaaacgggcctccacccccaaatatgacaaccaatgagagacgcgtgattgtgcccgccgaccccaccctgtggacacaggagcatgtaaggcagtggttagagtgggctatcaaggaatacagtttaatggagattgacacaagcttctttcagaatatggatggcaaggaactttgtaagatgaacaaggaggactttctacgggccaccactctttacaatactgaggtgttgctgtctcatctgtcctaccttagagaatcatcattgctcgcatataatactaccagccacactgaccagagctccagactctcggtcaaagaggaccccagctatgattccgtgagacgaggggcatggggcaataacatgaattcaggactgaataaatctccccccttaggtggggctcagacgataagcaagaatactgagcaacggccgcagccagatccatatcagatactcggccctaccagctcacgactagctaaccctggcagtggccagatccagctgtggcaatttctgcttgaactgctatccgacagcgcaaatgccagttgcatcacctgggaggggacaaatggcgagttcaagatgacagatcctgatgaagttgcacgtaggtggggggagaggaagtctaaaccaaatatgaactatgataaacttagcagggcactaagatactattatgataaaaacattatgaccaaagtgcacggaaagaggtacgcatacaaattcgactttcatggcattgctcaggcactccagccacaccccacagagtccagtatgtataagtacccttcagacatttcctatatgccttcttatcacgcacaccagcagaaggtcaattttgtgcctccccacccctccagtatgcccgtgactagttcttccttcttcggcgctgcctctcagtattggacgagtccaacagggggtatttaccctaatcccaacgtgccacgccatcccaacactcatgtgccttcccatttgggctcttactattag

SEQ ID NO: 95833 - DNA, 1161 bp, Artificial Sequence
  derived and/or modified sequence
atggaggggggtctcgccggtgaaagagccagagaaagcccagtggactgcagtgtcagcaaatgctcaaaactggtgggtggcggagaatccaaccccatgaactacaattcttacatggacgagaaaaatggacctccaccacccaacatgaccaccaacgagcgcagagttatagttccggctgatcctactctttggacacaagaacatgtcaggcagtggctcgagtgggccataaaggaatatagtctgatggaaatagacacatccttcttccagaatatggatgggaaggagctgtgcaagatgaacaaagaggacttcttaagagccactaccctctataacacagaagtgctcttgagccacctgtcttacctgcgggaaagctccctgttggcttacaataccacctctcatacagaccagagctctcgactgagcgtcaaggaagatccctcctacgatagcgtaagaagaggggcttggggaaataatatgaattctggactaaataagtccccccctctcggaggtgcacaaactatttcaaagaacacagagcagcggccacagccggatccctaccagattttggggccaacttcgtcacgattggccaatcctggaagcggccagatacaactgtggcaattcctcctggagctcttgtctgattcggcgaatgctagctgtattacctgggaaggcaccaacggggagtttaaaatgacagaccccgatgaggtcgcacgcaggtggggcgaacgcaagagtaagcccaacatgaactacgacaagctgtccagggcactgagatattattacgataaaaatatcatgacaaaggtgcatggaaaaagatatgcatataaatttgactttcacggcatagcccaagcattgcagccccacccgacagagtcttctatgtacaagtatcctagtgatatctcctacatgccttcctaccacgcacaccagcagaaggtcaattttgtgccaccacacccaagctctatgcctgtcacctccagcagcttctttggcgctgcatcacagtactggacttcccccacaggagggatatacccaaaccccaacgtacctcggcatccaaatacccacgtacctagccacctgggtagttattactag

SEQ ID NO: 95834 - DNA, 1161 bp, Artificial Sequence
  derived and/or modified sequence
atggagggcggcctggccggcgagagagccagagagagccccgtggactgcagcgtgagcaagtgcagcaagctggtgggcggcggcgagagcaaccccatgaactacaacagctacatggacgagaagaacggcccccccccccccaacatgaccaccaacgagagaagagtgatcgtgcccgccgaccccaccctgtggacccaggagcacgtgagacagtggctggagtgggccatcaaggagtacagcctgatggagatcgacaccagcttcttccagaacatggacggcaaggagctgtgcaagatgaacaaggaggacttcctgagagccaccaccctgtacaacaccgaggtgctgctgagccacctgagctacctgagagagagcagcctgctggcctacaacaccaccagccacaccgaccagagcagcagactgagcgtgaaggaggaccccagctacgacagcgtgagaagaggcgcctggggcaacaacatgaacagcggcctgaacaagagcccccccctgggcggcgcccagaccatcagcaagaacaccgagcagagaccccagcccgacccctaccagatcctgggccccaccagcagcagactggccaaccccggcagcggccagatccagctgtggcagttcctgctggagctgctgagcgacagcgccaacgccagctgcatcacctgggagggcaccaacggcgagttcaagatgaccgaccccgacgaggtggccagaagatggggcgagagaaagagcaagcccaacatgaactacgacaagctgagcagagccctgagatactactacgacaagaacatcatgaccaaggtgcacggcaagagatacgcctacaagttcgacttccacggcatcgcccaggccctgcagccccaccccaccgagagcagcatgtacaagtaccccagcgacatcagctacatgcccagctaccacgcccaccagcagaaggtgaacttcgtgcccccccaccccagcagcatgcccgtgaccagcagcagcttcttcggcgccgccagccagtactggaccagccccaccggcggcatctaccccaaccccaacgtgcccagacaccccaacacccacgtgcccagccacctgggcagctactactag

SEQ ID NO: 95835 - protein, 259 aa, Artificial Sequence
  derived and/or modified sequence
MDPGSLLAYNTTSHTDQSSRLSVKEDPSYDSVRRGAWGNNMNSGLNKSPPLGGAQTISKNTEQRPQPDPYQILGPTSSRLANPGSGQIQLWQFLLELLSDSANASCITWEGTNGEFKMTDPDEVARRWGERKSKPNMNYDKLSRALRYYYDKNIMTKVHGKRYAYKFDFHGIAQALQPHPTESSMYKYPSDISYMPSYHAHQQKVNFVPPHPSSMPVTSSSFFGAASQYWTSPTGGIYPNPNVPRHPNTHVPSHLGSYY

SEQ ID NO: 95836 - DNA, 1557 bp, Artificial Sequence
  derived and/or modified sequence
acagtctctccatctgcatccccacttcatcaccatcccaccgtctctccctcgctccactcgcgggtaaccgaggcttctccctcccaggctggttcttgggcgttcccgacccttagctacccacgatgtttcagacagtccccgacacgtcgtcttacatcaaggaggctctgtcggtggtgagcgacgaccagtccctctttgactcagcgtacggagcggcagcccatctccccaaggccgacatgactgcctcggggagtcctgactacgggcagccccacaagatcaaccccctcccaccacagcaggagtggatcaatcagccagtgagggtcaacgtcaagcgggagtatgaccacatgaatggatccaggttcactgctggcctataatacaacctcccacaccgaccaatcctcacgattgagtgtcaaagaagacccttcttatgactcagtcagaagaggagcttggggcaataacatgaattctggcctcaacaaaagtcctccccttggaggggcacaaacgatcagtaagaatacagagcaacggccccagccagatccgtatcagatcctgggcccgaccagcagtcgcctagccaaccctggaagcgggcagatccagctgtggcaattcctcctggagctgctctccgacagcgccaacgccagctgtatcacctgggaggggaccaacggggagttcaaaatgacggaccccgatgaggtggccaggcgctggggcgagcggaaaagcaagcccaacatgaattacgacaagctgagccgggccctccgttattactatgataaaaacattatgaccaaagtgcacggcaaaagatatgcttacaaatttgacttccacggcattgcccaggctctgcagccacatccgaccgagtcgtccatgtacaagtacccttctgacatctcctacatgccttcctaccatgcccaccagcagaaggtgaactttgtccctccccatccatcctccatgcctgtcacttcctccagcttctttggagccgcatcacaatactggacctcccccacggggggaatctaccccaaccccaacgtcccccgccatcctaacacccacgtgccttcacacttaggcagctactactagaagcttactcatcagtggccttctagctgaagcccatcctgcacacttactggatgctttggactcaacaggacatatgtggccttgaagggaagacaaaactggatgttctttcttgttggatagaacctttgtatttgttctttaaaaacattttttttaatgttggtaacttttgcttcctctacctgaacaaagagatgaataattccatgggccagtatgccagtttgaattctcagtctcctagcatcttgtgagttgcatattaagattactggaatggttaagtcatggttctgagaaagaagctgtacgttttctttatgtttttatgaccaaagcagtttcttgtcaatacacggggttcagtatgacacagaatcatggacttaacccgtcatgttc

SEQ ID NO: 95837 - DNA, 780 bp, Artificial Sequence
  derived and/or modified sequence
atggatcctgggtctctcctggcgtacaacactacatcacataccgaccaaagctctaggctcagcgttaaggaggatccttcatatgactccgtgaggcgtggtgcgtggggcaataacatgaattccggattgaacaagtctccaccgctgggcggcgcccagacaataagcaagaacactgaacaacgtccacagcccgatccctaccaaattctgggcccaaccagcagtcgactcgcgaatcctggcagcggccagattcagctgtggcaattcctgctcgaattgttgtcagacagcgctaacgcaagttgtattacctgggaaggcaccaatggggagttcaagatgacagaccccgatgaggtggcacgtcggtggggtgagcggaagtctaagccaaatatgaactacgacaagcttagcagagccctgcgctattactacgataagaatatcatgactaaagtgcacggtaaacgatatgcctacaaattcgattttcatggcatcgcgcaggcacttcagccccatccaactgagtccagcatgtacaaatacccctcagatattagctatatgccaagctaccatgctcaccagcagaaggtaaattttgtccccccacatcctagctcaatgcccgtaacttccagctccttctttggcgccgctagtcagtattggacctcccccaccgggggcatctaccctaatcctaatgtgcctcgtcacccaaacacccacgtcccaagccatctcggctcctactactag

SEQ ID NO: 95838 - DNA, 780 bp, Artificial Sequence
  derived and/or modified sequence
atggaccccggcagcctgctggcctacaacaccaccagccacacagaccagagcagccggctgtctgtgaaggaggaccccagctatgattctgtgagaagaggagcctggggcaacaacatgaacagcggcctgaacaagagcccccccctgggcggggcccagaccatcagcaagaacacagagcagaggccccagcctgacccctaccagatcctgggccccaccagcagccggctggccaaccctggcagcggccagatccagctgtggcagttcctgctggagctgctgagtgacagcgccaatgccagctgcatcacctgggagggcaccaatggagagttcaagatgacagatcctgatgaggtggcccggcgctggggcgagaggaagagcaagcccaacatgaactatgacaagctgagccgggccctgcgctactactatgacaagaacatcatgaccaaggtgcacggcaagagatatgcctacaagtttgacttccacggcatcgcccaggccctgcagccccaccccacagagagctccatgtacaagtaccccagcgacatctcctacatgcccagctaccacgcccaccagcagaaggtgaactttgtgcccccccaccccagctccatgcctgtgaccagcagcagcttctttggagctgccagccagtactggaccagccccaccggcggcatctaccccaaccccaacgtgcccaggcaccccaacacccacgtgcccagccacctgggcagctactactag

SEQ ID NO: 95839 - DNA, 780 bp, Artificial Sequence
  derived and/or modified sequence
atggaccccggcagcctgctggcctacaacaccaccagccacaccgaccagtcatcgagactatccgtgaaggaggacccatcatacgactctgtgcgtaggggcgcctggggaaataacatgaactctgggctgaacaagagccctcctctagggggtgcacagaccatctccaagaacactgagcagcggccacagcccgatccataccagatcctgggcccaacctcaagtaggttagccaatccaggctccggtcagattcagctgtggcagtttctcctcgagctactgtctgattcagcgaacgctagctgcattacatgggaaggcactaacggggagttcaaaatgacagatccagatgaggtcgctaggaggtggggggaacggaaatctaaaccaaatatgaactatgacaaattgtccagagccctgcggtactattatgacaagaacattatgactaaggtgcatgggaaacgatacgcttataagtttgatttccatgggatcgcccaagctctgcagccacatccaaccgagtcgagcatgtataagtacccctcagacatatcatacatgccatcttaccacgctcaccaacagaaagtaaattttgttcccccacacccctccagtatgcccgttacctcatcttccttcttcggcgctgcctcacagtattggacgagccctaccggcggcatttatcccaatcctaatgtgcctagacaccccaatactcacgttccatctcaccttggctcatactactag

SEQ ID NO: 95840 - DNA, 780 bp, Artificial Sequence
  derived and/or modified sequence
atggacccagggtccctgctggcatacaacacaacaagccatacagatcagtcatctcgtctgagcgtgaaggaggacccttcatatgactcggtgcgcaggggcgcttggggtaacaacatgaattctggtctcaacaaatcccctccacttgggggagcgcagacaattagtaaaaacacggaacaacgccctcagcctgatccctatcagatactgggccctaccagcagccgcttggctaacccaggatctggacaaatccagctgtggcagttcttgctggagctcctctctgatagcgctaacgcctcctgtattacatgggagggcaccaacggcgaattcaaaatgaccgatcccgatgaagtggccagacgttggggggaacgtaaatccaagcccaatatgaattacgataagttgtcccgtgctttgagatactactacgacaagaacatcatgacgaaggtccacggaaaaaggtacgcctacaaatttgactttcacggcatcgcccaggcattgcagcctcaccccacggagtccagtatgtataagtacccctcggacatttcttatatgccgtcctaccatgctcatcagcagaaggtaaattttgtgccaccacatccttcaagtatgccagtgacatctagctctttcttcggggcagctagtcaatattggacctccccgacagggggaatttaccctaatcctaatgttccccgtcatccaaatacccatgtaccgagccatctggggagttattattag

SEQ ID NO: 95841 - DNA, 780 bp, Artificial Sequence
  derived and/or modified sequence
atggaccccggcagcctgctggcctacaacaccaccagccacaccgaccagagcagcagactgagcgtgaaggaggaccccagctacgacagcgtgagaagaggcgcctggggcaacaacatgaacagcggcctgaacaagagcccccccctgggcggcgcccagaccatcagcaagaacaccgagcagagaccccagcccgacccctaccagatcctgggccccaccagcagcagactggccaaccccggcagcggccagatccagctgtggcagttcctgctggagctgctgagcgacagcgccaacgccagctgcatcacctgggagggcaccaacggcgagttcaagatgaccgaccccgacgaggtggccagaagatggggcgagagaaagagcaagcccaacatgaactacgacaagctgagcagagccctgagatactactacgacaagaacatcatgaccaaggtgcacggcaagagatacgcctacaagttcgacttccacggcatcgcccaggccctgcagccccaccccaccgagagcagcatgtacaagtaccccagcgacatcagctacatgcccagctaccacgcccaccagcagaaggtgaacttcgtgcccccccaccccagcagcatgcccgtgaccagcagcagcttcttcggcgccgccagccagtactggaccagccccaccggcggcatctaccccaaccccaacgtgcccagacaccccaacacccacgtgcccagccacctgggcagctactactag

SEQ ID NO: 95842 - protein, 60 aa, Artificial Sequence
  derived and/or modified sequence
MEFYESAYFIVLIPSIVITVIFLFFWLFMKETLYDEVLAKQKREQKLIPTKTDKKKAEKK

SEQ ID NO: 95843 - protein, 263 aa, Artificial Sequence
  derived and/or modified sequence
MGDIPAVGLSSWKASPGKVTEAVKEAIDAGYRHFDCAYFYHNEREVGAGIRCKIKEGAVRREDLFIATKLWCTCHKKSLVETACRKSLKALKLNYLDLYLIHWPMGFKPPHPEWIMSCSELSFCLSHPRVQDLPLDESNMVIPSDTDFLDTWEAMEDLVITGLVKNIGVSNFNHEQLERLLNKPGLRFKPLTNQILIRFQIQRNVIVIPGSITPSHIKENIQVFDFELTQHDMDNILSLNRNLRLAMFPITKNHKDYPFHIEY

SEQ ID NO: 95844 - protein, 250 aa, Artificial Sequence
  derived and/or modified sequence
MGDIPAVGLSSWKASPGKVTEAVKEAIDAGYRHFDCAYFYHNEREVGAGIRCKIKEGAVRREDLFIATKLWCTCHKKSLVETACRKSLKALKLNYLDLYLIHWPMGFKPPHPEWIMSCSELSFCLSHPRVQDLPLDESNMVIPSDTDFLDTWEAMEDLVITGLVKNIGVSNFNHEQLERLLNKPGLRFKPLTNQILIRFQIQRNVIVIPGSITPSHIKENIQVFDFELTQHDMDNILSLNRNLRLAMFPM

SEQ ID NO: 95845 - DNA, 792 bp, Artificial Sequence
  derived and/or modified sequence
atgggcgacatccccgccgtgggcctgagcagctggaaggccagccccggcaaggtgaccgaggccgtgaaggaggccatcgacgccggctacagacacttcgactgcgcctacttctaccacaacgagagagaggtgggcgccggcatcagatgcaagatcaaggagggcgccgtgagaagagaggacctgttcatcgccaccaagctgtggtgcacctgccacaagaagagcctggtggagaccgcctgcagaaagagcctgaaggccctgaagctgaactacctggacctgtacctgatccactggcccatgggcttcaagcccccccaccccgagtggatcatgagctgcagcgagctgagcttctgcctgagccaccccagagtgcaggacctgcccctggacgagagcaacatggtgatccccagcgacaccgacttcctggacacctgggaggccatggaggacctggtgatcaccggcctggtgaagaacatcggcgtgagcaacttcaaccacgagcagctggagagactgctgaacaagcccggcctgagattcaagcccctgaccaaccagatcctgatcagattccagatccagagaaacgtgatcgtgatccccggcagcatcacccccagccacatcaaggagaacatccaggtgttcgacttcgagctgacccagcacgacatggacaacatcctgagcctgaacagaaacctgagactggccatgttccccatcaccaagaaccacaaggactaccccttccacatcgagtactag

SEQ ID NO: 95846 - DNA, 1036 bp, Artificial Sequence
  derived and/or modified sequence
gcggggcggcggggcggccggcggcggccatgggagatatcccagccgtgggcctcagctcctggaaggcttctccagggaaagtgaccgaggcagtgaaagaggccattgacgcagggtaccggcacttcgactgtgcttacttttaccacaatgagagggaggttggagcagggatccgttgcaagatcaaggaaggcgctgtaagacgggaggatctgttcattgccactaagctgtggtgcacctgccataagaagtccttggtggaaacagcatgcagaaagagtctcaaggccttgaagctgaactatttggacctctacctcatacactggcccatgggtttcaagcctcctcatccagaatggatcatgagctgcagtgaactttccttctgcctctcacatcctcgagtgcaggacttgcctctggacgagagcaacatggttattcccagtgacacggacttcctggacacgtgggaggccatggaggacctggtgatcaccgggctggtgaagaacatcggggtgtcaaacttcaaccatgaacagcttgagaggcttttgaataagcctgggttgaggttcaagccactaaccaaccagattttgatccgatttcaaatccagaggaatgtgatagtgatccccggatctatcaccccaagtcacattaaagagaatatccaggtgtttgattttgaattaacacagcacgatatggataacatcctcagcctaaacaggaatctccgactggccatgttccccataactaaaaatcacaaagactatcctttccacatagaatactgaggacgcttccccttccttgtttctgctcagcccagatgcacagacactattggcaatgttgaccctcctctgtcatcacagcgccagggcagctgtgcctgggacaggagccacacagtcagagggggatgtaagagccaccttctctgacaaatctggagaattgagtgtgttctaagtgaaggcaatggggtttctccaagacagcctgtgtg

SEQ ID NO: 95847 - DNA, 753 bp, Artificial Sequence
  derived and/or modified sequence
atgggcgacatccccgccgtgggcctgagcagctggaaggccagccccggcaaggtgaccgaggccgtgaaggaggccatcgacgccggctacagacacttcgactgcgcctacttctaccacaacgagagagaggtgggcgccggcatcagatgcaagatcaaggagggcgccgtgagaagagaggacctgttcatcgccaccaagctgtggtgcacctgccacaagaagagcctggtggagaccgcctgcagaaagagcctgaaggccctgaagctgaactacctggacctgtacctgatccactggcccatgggcttcaagcccccccaccccgagtggatcatgagctgcagcgagctgagcttctgcctgagccaccccagagtgcaggacctgcccctggacgagagcaacatggtgatccccagcgacaccgacttcctggacacctgggaggccatggaggacctggtgatcaccggcctggtgaagaacatcggcgtgagcaacttcaaccacgagcagctggagagactgctgaacaagcccggcctgagattcaagcccctgaccaaccagatcctgatcagattccagatccagagaaacgtgatcgtgatccccggcagcatcacccccagccacatcaaggagaacatccaggtgttcgacttcgagctgacccagcacgacatggacaacatcctgagcctgaacagaaacctgagactggccatgttccccatgtag

SEQ ID NO: 95848 - DNA, 792 bp, Artificial Sequence
  derived and/or modified sequence
atgggggacattcctgccgttgggctgagctcctggaaggcgtctcccgggaaagtgacagaagccgtgaaagaggccattgatgcgggttaccggcattttgactgtgcctatttttatcataatgaaagagaagtgggggctggcatccgatgcaagataaaagagggagcagtgagaagggaagacctttttatcgcgacaaagctgtggtgcacctgccacaagaagtcactggtcgagactgcctgtcgcaagtccttgaaggccttgaaactcaattatttggacctctatctgattcattggcccatggggttcaagcccccacaccctgagtggataatgtcttgctccgagctctccttttgtctgtctcatccaagagtgcaggatctgcccctggatgaaagcaacatggtgatacccagcgatacagattttctggacacttgggaggctatggaggatcttgtcatcacgggactggtgaagaatattggtgtcagtaatttcaaccatgagcagctggagagactattgaataagcccggcctccgatttaaaccgctgactaatcagattttaatcagattccagatccaaaggaatgtgatagtgatccccggctctattacgcctagccacattaaagaaaatatccaggtgtttgattttgaactaacccaacatgacatggacaacatcctatccttgaatcgcaacctgcgcctggcaatgtttcctatcaccaagaaccacaaagattacccatttcatatcgaatactag

SEQ ID NO: 95849 - DNA, 753 bp, Artificial Sequence
  derived and/or modified sequence
atgggagatatccccgccgtgggtctgtctagctggaaagcctcccctggcaaagtcaccgaagctgtgaaggaggcgattgacgccggttacaggcatttcgattgtgcgtacttttatcataatgagcgagaggtgggcgcggggatccgatgcaaaataaaagagggcgccgtccggcgcgaagacctattcatcgctacaaaattgtggtgtacctgccacaagaaatctctcgtcgagactgcgtgtagaaagtccctgaaagctctcaagctcaactacctagatctttacctcatacattggcctatgggatttaagcctccccatcccgagtggatcatgagttgctccgagctctctttttgcctgagccacccgcgagtccaggacttgccactggacgagagcaatatggtaattccttccgacaccgatttcctcgacacctgggaggctatggaggacttagtgatcaccgggttagttaaaaacatcggagttagtaacttcaatcacgagcagctcgaaaggcttctgaacaagcctggcttgcggtttaagcctttgaccaaccagattctaataaggttccaaatccaaaggaatgtgatcgttattcccggaagcatcaccccaagccacataaaagagaatatacaagtctttgactttgaactaacgcagcacgatatggacaacatcctttcactcaacagaaacctcagactcgctatgttcccgatgtag

SEQ ID NO: 95850 - DNA, 792 bp, Artificial Sequence
  derived and/or modified sequence
atgggagacatcccagctgtgggcctgagctcctggaaggccagccctgggaaggtgacagaggccgtgaaggaggccattgatgctggctaccgccactttgactgtgcctacttctaccacaatgaaagagaggtgggcgccggcatccgctgcaagatcaaggagggcgctgtgcggcgggaggacctcttcatcgccaccaagctgtggtgcacctgccacaagaagagcctggtggagacagcctgcaggaagagcctgaaggccctgaagctgaactacctggacctgtacctgatccactggcccatgggcttcaagccaccccaccctgagtggatcatgagctgcagcgagctgtccttctgcctgagccacccccgggtgcaggacctgcccctggatgagagcaacatggtgatccccagcgacacagacttcctggacacctgggaggccatggaggacctggtgatcaccggcctggtgaagaacattggagtgagcaacttcaaccacgagcagctggagcggctgctgaacaagccaggcctgcgcttcaagcccctgaccaaccagatcctgatccgcttccagatccagagaaatgtcatcgtcatccctggcagcatcacccccagccacatcaaggagaacatccaggtgtttgattttgagctgacccagcacgacatggacaacatcctgagcctgaacagaaacctgcggctggccatgttccccatcaccaagaaccacaaggactaccccttccacatcgagtactag

SEQ ID NO: 95851 - DNA, 753 bp, Artificial Sequence
  derived and/or modified sequence
atgggagacatcccagctgtgggcctgagctcctggaaggccagccctgggaaggtgacagaggccgtgaaggaggccattgatgctggctaccgccactttgactgtgcctacttctaccacaatgaaagagaggtgggcgccggcatccgctgcaagatcaaggagggcgctgtgcggcgggaggacctcttcatcgccaccaagctgtggtgcacctgccacaagaagagcctggtggagacagcctgcaggaagagcctgaaggccctgaagctgaactacctggacctgtacctgatccactggcccatgggcttcaagccaccccaccctgagtggatcatgagctgcagcgagctgtccttctgcctgagccacccccgggtgcaggacctgcccctggatgagagcaacatggtgatccccagcgacacagacttcctggacacctgggaggccatggaggacctggtgatcaccggcctggtgaagaacattggagtgagcaacttcaaccacgagcagctggagcggctgctgaacaagccaggcctgcgcttcaagcccctgaccaaccagatcctgatccgcttccagatccagagaaatgtcatcgtcatccctggcagcatcacccccagccacatcaaggagaacatccaggtgtttgattttgagctgacccagcacgacatggacaacatcctgagcctgaacagaaacctgcggctggccatgttccccatgtag

SEQ ID NO: 95852 - DNA, 792 bp, Artificial Sequence
  derived and/or modified sequence
atgggcgacatccccgccgtgggcctgagcagctggaaggccagccctggcaaagtcaccgaggcggttaaagaggctatcgatgcagggtaccgccactttgattgcgcctatttctaccataatgagagagaagtgggtgcgggcattcgttgcaagatcaaagagggggcagtgcggcgagaggatctttttatagcaaccaagctgtggtgcacatgtcataagaagtctctagtggaaacagcgtgccgcaaatctctcaaagccctgaagcttaactacttggacctctacctgattcactggcctatgggctttaagccaccgcaccccgagtggattatgtcctgcagtgagctatctttctgcctctctcacccgagagtccaggatctcccccttgatgagagcaacatggtgattccctccgacaccgacttcttggacacctgggaagccatggaggacttggtgatcaccggcctggtaaaaaacattggtgtgagcaactttaatcacgagcagctcgaacgtctgcttaataaacccggactgcggttcaagccccttaccaaccagatcctcattagatttcagatccaacgaaacgttattgtgattcctggttcgattactccttctcatatcaaggaaaacatacaggtgttcgattttgagctgactcagcacgacatggataatatcctttctctgaataggaacctccgtctggctatgttcccaatcacaaagaaccataaggattacccatttcatatcgagtactag

SEQ ID NO: 95853 - DNA, 753 bp, Artificial Sequence
  derived and/or modified sequence
atgggcgacatccccgccgtgggcctgagcagctggaaggccagccccggcaaggtgacagaggcggtgaaagaagcaattgacgcagggtatcgacactttgactgtgcctacttttaccacaacgagagggaggtcggcgcggggattaggtgcaaaattaaagagggagctgttcgccgggaagatctgttcatcgccactaagctgtggtgtacctgtcacaagaagtctctggtcgagacagcgtgtaggaaaagccttaaagcactaaaactgaactatctggacctttatttaattcattggccaatggggttcaaaccaccgcacccagagtggataatgtcctgctcggagctctcattctgtctgtcccatccgcgggtgcaggatcttccactagacgaatcaaatatggtcatcccctccgatactgacttccttgacacctgggaagccatggaggacttagtcatcaccggattggtgaagaatataggagtgtccaactttaaccacgagcagttggagcggctgctaaacaagccaggcttaaggtttaagcctctcactaatcaaatccttatacgcttccagatccagaggaatgtgatcgtgataccggggagcataactccttctcacattaaggagaatatccaggtgttcgactttgagctgacccagcatgacatggataacattctctccctgaatagaaacctgcggctggccatgttccccatgtag

SEQ ID NO: 95854 - DNA, 792 bp, Artificial Sequence
  derived and/or modified sequence
atgggggatattcctgctgtggggctgagctcatggaaggccagccctggcaaggtcacagaggccgtgaaggaggccatcgacgctgggtatcgtcacttcgattgcgcgtatttttatcataacgagcgagaagtgggggctggaattcggtgcaagatcaaggaaggagctgtgcggcgagaggacctctttatcgctaccaagctctggtgcacctgtcacaaaaaatcactggtggagactgcctgtagaaagagcctaaaggccctgaagcttaattatctggacttgtatctgatacactggcctatggggttcaaaccccctcaccccgagtggattatgagctgctccgaactcagtttttgtctctctcatccacgcgtgcaagaccttcccctggatgagtcaaacatggttattccttccgacactgatttccttgacacctgggaggcgatggaggatttagtcatcaccggactcgtgaagaatatcggcgtgtcaaactttaatcatgaacagctggaaaggctcctcaacaagcccggtttacggttcaaacccctgacgaaccaaattctgatccgctttcagattcagcgaaacgtcatagtaatccctgggtccatcaccccttcccatattaaggagaacatccaggtgtttgatttcgagctcacacagcacgatatggataacatcctcagccttaatagaaatcttagattggcaatgtttcctataactaaaaatcataaagattatccattccacattgaatactag

SEQ ID NO: 95855 - DNA, 753 bp, Artificial Sequence
  derived and/or modified sequence
atgggggatatcccagcggttggactctcctcatggaaggctagccctggaaaggtcaccgaggcagtgaaagaagcgatagatgctgggtatcgccactttgactgtgcttatttttatcataacgagagggaggtaggggctgggatccggtgcaagatcaaggagggcgctgtgagaagggaagacttgtttatagccacaaaactgtggtgtacctgccacaagaaaagcttggttgagacagcttgtcggaagagcttgaaggccttaaagctgaactacctggatctgtacctcatccattggccaatggggtttaagcctccccacccagagtggataatgtcctgttctgagctgtctttctgtctgtcacaccccagagtacaagacttacccctggacgaatctaatatggtcatcccttctgataccgattttctggacacttgggaagccatggaggatttggtgattacaggactggtgaaaaatatcggggttagcaatttcaatcatgagcaactcgaaagactcttgaacaaaccagggctcagatttaaaccgctcactaaccagattcttattaggttccagatccaaaggaacgtcattgttatacccggaagtatcactccttcgcacataaaggagaacattcaggtcttcgactttgagttgacccaacacgatatggacaacattctgtctttaaataggaatctgagactggctatgtttcctatgtag

SEQ ID NO: 95856 - DNA, 844 bp, Artificial Sequence
  derived and/or modified sequence
gcggggcggcggggcggccggcggcggccatgggagatatcccagccgtgggcctcagctcctggaaggcttctccagggaaagtgaccgaggcagtgaaagaggccattgacgcagggtaccggcacttcgactgtgcttacttttaccacaatgagagggaggttggagcagggatccgttgcaagatcaaggaaggcgctgtaagacgggaggatctgttcattgccactaagctgtggtgcacctgccataagaagtccttggtggaaacagcatgcagaaagagtctcaaggccttgaagctgaactatttggacctctacctcatacactggcccatgggtttcaagcctcctcatccagaatggatcatgagctgcagtgaactttccttctgcctctcacatcctcgagtgcaggacttgcctctggacgagagcaacatggttattcccagtgacacggacttcctggacacgtgggaggccatggaggacctggtgatcaccgggctggtgaagaacatcggggtgtcaaacttcaaccatgaacagcttgagaggcttttgaataagcctgggttgaggttcaagccactaaccaaccagattttgatccgatttcaaatccagaggaatgtgatagtgatccccggatctatcaccccaagtcacattaaagagaatatccaggtgtttgattttgaattaacacagcacgatatggataacatcctcagcctaaacaggaatctccgactggccatgttccccatgtaaatatggctccttctttttaaaacagagggaagaatatacagattgaatgattggtgtctgaa

SEQ ID NO: 95857 - protein, 664 aa, Artificial Sequence
  derived and/or modified sequence
MKVMEEEVLIKNGEIKILRDSLHQTESVLEEQRRSHFLLEQEKTQALSDKEKEFSKKLQSLQSELQFKDAEMNELRTKLQTSERANKLAAPSVSHVSPRKNPSVVIKPEACSPQFGKTSFPTKESFSANMSLPHPCQTESGYKPLVGREDSKPHSLRGDSIKQEEAQKSFVDSWRQRSNTQGSILINLLLKQPLIPGSSLSLCHLLSSSSESPAGTPLQPPGFGSTLAGMSGLRTTGSYDGSFSLSALREAQNLAFTGLNLVARNECSRDGDPAEGGRRAFPLCQLPGAVHFLPLVQFFIGLHCQALQDLAAAKRSGAPGDSPTHSSCVSSGVETNPEDSVCILEGFSVTALSILQHLVCHSGAVVSLLLSGVGADSAAGEGNRSLVHRLSDGDMTSALRGVADDQGQHPLLKMLLHLLAFSSAATGHLQASVLTQCLKVLVKLAENTSCDFLPRFQCVFQVLPKCLSPETPLPSVLLAVELLSLLADHDQLAPQLCSHSEGCLLLLLYMYITSRPDRVALETQWLQLEQEVVWLLAKLGVQSPLPPVTGSNCQCNVEVVRALTVMLHRQWLTVRRAGGPPRTDQQRRTVRCLRDTVLLLHGLSQKDKLFMMHCVEVLHQFDQVMPGVSMLIRGLPDVTDCEEAALDDLCAAETDVEDPEVECG

SEQ ID NO: 95858 - protein, 698 aa, Artificial Sequence
  derived and/or modified sequence
MSKNPSGKNRETVPIKDNFELEVLQAQYKELKEKMKVMEEEVLIKNGEIKILRDSLHQTESVLEEQRRSHFLLEQEKTQALSDKEKEFSKKLQSLQSELQFKDAEMNELRTKLQTSERANKLAAPSVSHVSPRKNPSVVIKPEACSPQFGKTSFPTKESFSANMSLPHPCQTESGYKPLVGREDSKPHSLRGDSIKQEEAQKSFVDSWRQRSNTQGSILINLLLKQPLIPGSSLSLCHLLSSSSESPAGTPLQPPGFGSTLAGMSGLRTTGSYDGSFSLSALREAQNLAFTGLNLVARNECSRDGDPAEGGRRAFPLCQLPGAVHFLPLVQFFIGLHCQALQDLAAAKRSGAPGDSPTHSSCVSSGVETNPEDSVCILEGFSVTALSILQHLVCHSGAVVSLLLSGVGADSAAGEGNRSLVHRLSDGDMTSALRGVADDQGQHPLLKMLLHLLAFSSAATGHLQASVLTQCLKVLVKLAENTSCDFLPRFQCVFQVLPKCLSPETPLPSVLLAVELLSLLADHDQLAPQLCSHSEGCLLLLLYMYITSRPDRVALETQWLQLEQEVVWLLAKLGVQSPLPPVTGSNCQCNVEVVRALTVMLHRQWLTVRRAGGPPRTDQQRRTVRCLRDTVLLLHGLSQKDKLFMMHCVEVLHQFDQVMPGVSMLIRGLPDVTDCEEAALDDLCAAETDVEDPEVECG

SEQ ID NO: 95859 - protein, 196 aa, Artificial Sequence
  derived and/or modified sequence
MSKNPSGKNRETVPIKDNFELEVLQAQYKELKEKMKVMEEEVLIKNGEIKILRDSLHQTESVLEEQRRSHFLLEQEKTQALSDKEKEFSKKLQSLQSELQFKDAEMNELRTKLQTSERANKLAAPSVSHVSPRKNPSVVIKPEACSPQFGKTSFPTKESFSANMSLPHPCQTESGYKPLVGREDSKPHSLRGDSIK

SEQ ID NO: 95860 - DNA, 591 bp, Artificial Sequence
  derived and/or modified sequence
atgtcaaagaatccctccggcaaaaacagagaaactgtgccaatcaaagataacttcgagctcgaagtgctccaggcccaatataaagaactcaaggaaaaaatgaaggtaatggaagaagaagtacttattaagaatggcgaaatcaagattctaagggacagtctgcaccagactgaatccgtgcttgaggagcagcgaaggtcccatttcctgttagagcaggagaaaacacaagcgttgtctgataaggagaaggaattttcaaagaagctccagtcattacaatcagagctccagtttaaagatgccgagatgaacgagctccgaaccaagctccaaactagcgagagagcgaataagctggcagcaccctccgtgtctcacgtgagtcctagaaaaaatccttctgtggttatcaaaccagaggcatgcagcccccaattcggcaaaacaagcttccctactaaggaaagcttctcagccaacatgtctctgcctcatccctgccaaaccgagagcgggtataaaccactggtcggacgcgaggattcaaaaccccatagtctgcgaggcgatagtatcaaatag

SEQ ID NO: 95861 - DNA, 591 bp, Artificial Sequence
  derived and/or modified sequence
atgagcaagaaccccagcggcaagaaccgggagaccgtgcccatcaaggacaactttgagctggaggtgctgcaggcccagtacaaggagctgaaggagaagatgaaggtgatggaggaggaggtgctgatcaagaatggagagatcaagatcctgcgggacagcctgcaccagacagaatctgtgctggaggagcagaggaggagccacttcctgctggagcaggagaagacccaggccctgagtgacaaggagaaggagttcagcaagaagctgcagagcctgcagagcgagctgcagttcaaggatgctgagatgaatgagctgcggaccaagctgcagaccagcgagcgggccaacaagctggccgcccccagcgtgagccacgtgagccccaggaagaaccccagcgtggtgatcaagccagaggcctgcagcccccagtttgggaagaccagcttccccaccaaggagagcttcagcgccaacatgagcctgccccacccctgccagacagagagcggctacaagcccctggtgggccgggaggacagcaagccccacagcctgcggggggacagcatcaagtag

SEQ ID NO: 95862 - DNA, 591 bp, Artificial Sequence
  derived and/or modified sequence
atgagcaagaaccccagcggcaagaaccgggagaccgtgcccatcaaggacaatttcgagctagaggtgttgcaggcccagtacaaggaacttaaagaaaagatgaaagtgatggaagaggaagtgctcattaaaaatggggagataaagatattgcgggacagtcttcatcagaccgaatccgtccttgaggagcagagaaggtcacactttctcctcgagcaagagaaaacccaggctctcagcgacaaagagaaggagtttagcaagaagctccagagcctgcaatctgagctacagtttaaggacgctgagatgaatgaactgaggacaaaactccagactagtgagagggccaataagctggccgctcccagcgtctctcacgtgtctccccgaaaaaaccccagtgtggttatcaaacctgaagcctgcagcccacaattcgggaaaacatcattccctactaaggaatcctttagcgcgaatatgtcgttgccacacccctgtcagacggaatccggatataagcccctcgtcggacgggaggactccaagcctcacagtctgcgcggcgattccatcaagtag

SEQ ID NO: 95863 - DNA, 591 bp, Artificial Sequence
  derived and/or modified sequence
atgtcgaagaacccgtcaggtaagaatagggagactgtgcccatcaaggacaattttgaactcgaagtgttgcaggcccaatacaaagagctcaaggaaaaaatgaaagtgatggaagaagaggtattgatcaagaatggcgagatcaagatcctgcgtgactcactccatcagacagaatctgtcctggaggagcagaggcgctcccactttctgctggagcaggagaaaacacaggctcttagcgacaaagagaaagagttctcaaaaaaactgcagagcctacagtcagaattgcagtttaaggatgccgaaatgaatgagctcagaacaaaattgcaaacctccgaacgggcaaacaagctggccgcaccatctgtgagccatgtgagccccaggaagaacccctcagtagtcataaagcctgaagcatgtagtccccaattcgggaagactagttttcccacaaaggagtccttctctgccaatatgtccctgccccatccatgtcagaccgagagtggatataagcctttggtgggaagagaggactcgaaacctcattctttgaggggcgactcaattaagtag

SEQ ID NO: 95864 - DNA, 591 bp, Artificial Sequence
  derived and/or modified sequence
atgagcaagaaccccagcggcaagaacagagagaccgtgcccatcaaggacaacttcgagctggaggtgctgcaggcccagtacaaggagctgaaggagaagatgaaggtgatggaggaggaggtgctgatcaagaacggcgagatcaagatcctgagagacagcctgcaccagaccgagagcgtgctggaggagcagagaagaagccacttcctgctggagcaggagaagacccaggccctgagcgacaaggagaaggagttcagcaagaagctgcagagcctgcagagcgagctgcagttcaaggacgccgagatgaacgagctgagaaccaagctgcagaccagcgagagagccaacaagctggccgcccccagcgtgagccacgtgagccccagaaagaaccccagcgtggtgatcaagcccgaggcctgcagcccccagttcggcaagaccagcttccccaccaaggagagcttcagcgccaacatgagcctgccccacccctgccagaccgagagcggctacaagcccctggtgggcagagaggacagcaagccccacagcctgagaggcgacagcatcaagtag

SEQ ID NO: 95865 - protein, 222 aa, Artificial Sequence
  derived and/or modified sequence
MGDIPAVGLSSWKASPGKVTEAVKEAIDAGYRHFDCAYFYHNEREVGAGIRCKIKEGAVRREDLFIATKLWCTCHKKSLVETACRKSLKALKLNYLDLYLIHWPMGFKPPHPEWIMSCSELSFCLSHPRVQDLPLDESNMVIPSDTDFLDTWEILIRFQIQRNVIVIPGSITPSHIKENIQVFDFELTQHDMDNILSLNRNLRLAMFPITKNHKDYPFHIEY

SEQ ID NO: 95866 - DNA, 669 bp, Artificial Sequence
  derived and/or modified sequence
atgggcgacatccccgccgtgggcctgagcagctggaaggccagccccggcaaggtgaccgaggccgtgaaggaggccatcgacgccggctacagacacttcgactgcgcctacttctaccacaacgagagagaggtgggcgccggcatcagatgcaagatcaaggagggcgccgtgagaagagaggacctgttcatcgccaccaagctgtggtgcacctgccacaagaagagcctggtggagaccgcctgcagaaagagcctgaaggccctgaagctgaactacctggacctgtacctgatccactggcccatgggcttcaagcccccccaccccgagtggatcatgagctgcagcgagctgagcttctgcctgagccaccccagagtgcaggacctgcccctggacgagagcaacatggtgatccccagcgacaccgacttcctggacacctgggagatcctgatcagattccagatccagagaaacgtgatcgtgatccccggcagcatcacccccagccacatcaaggagaacatccaggtgttcgacttcgagctgacccagcacgacatggacaacatcctgagcctgaacagaaacctgagactggccatgttccccatcaccaagaaccacaaggactaccccttccacatcgagtactag

SEQ ID NO: 95867 - DNA, 913 bp, Artificial Sequence
  derived and/or modified sequence
gcggggcggcggggcggccggcggcggccatgggagatatcccagccgtgggcctcagctcctggaaggcttctccagggaaagtgaccgaggcagtgaaagaggccattgacgcagggtaccggcacttcgactgtgcttacttttaccacaatgagagggaggttggagcagggatccgttgcaagatcaaggaaggcgctgtaagacgggaggatctgttcattgccactaagctgtggtgcacctgccataagaagtccttggtggaaacagcatgcagaaagagtctcaaggccttgaagctgaactatttggacctctacctcatacactggcccatgggtttcaagcctcctcatccagaatggatcatgagctgcagtgaactttccttctgcctctcacatcctcgagtgcaggacttgcctctggacgagagcaacatggttattcccagtgacacggacttcctggacacgtgggagattttgatccgatttcaaatccagaggaatgtgatagtgatccccggatctatcaccccaagtcacattaaagagaatatccaggtgtttgattttgaattaacacagcacgatatggataacatcctcagcctaaacaggaatctccgactggccatgttccccataactaaaaatcacaaagactatcctttccacatagaatactgaggacgcttccccttccttgtttctgctcagcccagatgcacagacactattggcaatgttgaccctcctctgtcatcacagcgccagggcagctgtgcctgggacaggagccacacagtcagagggggatgtaagagccaccttctctgacaaatctggagaattgagtgtgttctaagtgaaggcaatggggtttctccaagacagcctgtgtg

SEQ ID NO: 95868 - DNA, 669 bp, Artificial Sequence
  derived and/or modified sequence
atgggagacattcccgctgtgggactgtccagttggaaagcctctcccggtaaggtgacggaggccgtgaaggaggcgatagacgccggatataggcacttcgactgcgcatacttctaccataacgaacgagaggtcggagccggtatacgctgtaaaattaaagaaggtgctgtgcgcagagaagatctgttcatcgccaccaaattatggtgtacatgccacaagaaatctctggtggaaacagcctgtcgcaaatccctcaaggcgctgaagctgaattatttggacctctatctgatccactggcccatggggttcaagcctccccaccctgaatggattatgtcttgcagtgaactgtccttttgtctttcgcaccccagggttcaggacctccctctggatgagagcaacatggtcattcccagcgataccgacttcctggacacctgggaaattctaataagattccagatacagagaaacgtaatagtcatacctggatcgatcactccatctcatatcaaagaaaacattcaggtatttgatttcgagttaacgcaacacgatatggacaatatactttctctcaatcgtaacttgcgcctggcgatgtttccgattactaaaaaccataaagactatccttttcacattgagtattag

SEQ ID NO: 95869 - DNA, 669 bp, Artificial Sequence
  derived and/or modified sequence
atgggagacatcccagctgtgggcctgagctcctggaaggccagccctgggaaggtgacagaggccgtgaaggaggccattgatgctggctaccgccactttgactgtgcctacttctaccacaatgaaagagaggtgggcgccggcatccgctgcaagatcaaggagggcgctgtgcggcgggaggacctcttcatcgccaccaagctgtggtgcacctgccacaagaagagcctggtggagacagcctgcaggaagagcctgaaggccctgaagctgaactacctggacctgtacctgatccactggcccatgggcttcaagccaccccaccctgagtggatcatgagctgcagcgagctgtccttctgcctgagccacccccgggtgcaggacctgcccctggatgagagcaacatggtgatccccagcgacacagacttcctggacacctgggagatcctgatccgcttccagatccagagaaatgtgattgtcatccctggcagcatcacccccagccacatcaaggagaacatccaggtgtttgattttgagctgacccagcacgacatggacaacatcctgagcctgaacagaaacctgcggctggccatgttccccatcaccaagaaccacaaggactaccccttccacatcgagtactag

SEQ ID NO: 95870 - DNA, 669 bp, Artificial Sequence
  derived and/or modified sequence
atgggcgacatccccgccgtgggcctgagcagctggaaggccagcccagggaaggttacagaggcggttaaagaagctattgatgcgggctataggcacttcgattgcgcctatttctatcacaatgagcgcgaggttggggctggcatacgctgcaaaatcaaagagggagctgtccgacgcgaggatctgtttatcgcaacaaagttatggtgcacatgccacaaaaaatcactcgtagaaacagcctgtaggaagtcacttaaagccctgaagttaaattatctcgatttgtacctcattcattggcccatggggtttaaaccccctcaccccgaatggatcatgagttgttccgaactgtcgttctgcctgtcccaccctagagtccaggatctgccccttgatgagtctaacatggtgatacccagcgacactgactttctggatacctgggagattctcattcgcttccagatccagcgaaatgtgatcgtaattcctggatccattacaccctcacacatcaaggaaaatattcaggtgttcgacttcgaactaacccagcatgatatggataacatccttagcctcaacaggaacctccgcctggcgatgtttccaataacaaagaatcataaggactatccctttcacattgagtactag

SEQ ID NO: 95871 - DNA, 669 bp, Artificial Sequence
  derived and/or modified sequence
atgggtgacattcctgccgtgggtctctctagttggaaggcatctccaggcaaagtcactgaagccgttaaggaggctatcgacgcgggttatagacactttgattgtgcgtatttttatcataatgagagggaggtgggcgctggaatcaggtgcaagatcaaagaaggcgcagtgcggagggaagaccttttcatcgccactaaactgtggtgtacctgccacaaaaagagtctggtggaaaccgcatgtaggaagtccctgaaagccctcaaactcaattatctagacctctacctcatccactggccaatggggtttaaaccacctcatccggagtggattatgtcctgcagcgaactctctttctgtctgtcacaccctcgagttcaggacctgcccttggatgaatccaatatggtaattccatccgacactgatttcctggacacttgggagatcctgatcaggtttcagatccaacgcaacgttatagtgattcctgggtcaattaccccctcccatatcaaggagaacatccaggttttcgacttcgagctaacacagcatgatatggacaacatactgtcccttaaccgaaatctaaggctcgctatgtttcccataaccaagaaccataaggactaccctttccacatagaatactag

SEQ ID NO: 95872 - protein, 490 aa, Artificial Sequence
  derived and/or modified sequence
MNCYLLLRFMLGIPLLWPCLGATENSQTKKVKQPVRSHLRVKRGWVWNQFFVPEEMNTTSHHIGQLRSDLDNGNNSFQYKLLGAGAGSTFIIDERTGDIYAIQKLDREERSLYILRAQVIDIATGRAVEPESEFVIKVSDINDNEPKFLDEPYEAIVPEMSPEGTLVIQVTASDADDPSSGNNARLLYSLLQGQPYFSVEPTTGVIRISSKMDRELQDEYWVIIQAKDMIGQPGALSGTTSVLIKLSDVNDNKPIFKESLYRLTVSESAPTGTSIGTIMAYDNDIGENAEMDYSIEEDDSQTFDIITNHETQEGIVILKKKVDFEHQNHYGIRAKVKNHHVPEQLMKYHTEASTTFIKIQVEDVDEPPLFLLPYYVFEVFEETPQGSFVGVVSATDPDNRKSPIRYSITRSKVFNINDNGTITTSNSLDREISAWYNLSITATEKYNIEQISSIPLYVQVLNINDHAPEFSQYYETYVCENAGSGQGLFF

SEQ ID NO: 95873 - DNA, 1473 bp, Artificial Sequence
  derived and/or modified sequence
atgaattgctacctgctgctcagatttatgttaggaattcctctgctctggccatgtcttggcgccactgaaaacagtcagaccaagaaggtgaagcagccagttaggtcacacctgcgggtgaaacggggctgggtgtggaatcaattcttcgtgccagaggaaatgaacaccacaagtcatcatatcggacagttacgctcagacttggacaacgggaataatagctttcagtataagctcctgggcgccggggcggggagcacgttcattatagatgagcgcaccggagacatatatgccatccaaaaactcgatagagaggaacgttcattgtacattttacgcgctcaagtcatcgatatcgccactggaagggctgtggagcccgagtccgaattcgtgataaaggttagtgacatcaacgacaacgaacccaagttccttgatgaaccctacgaggctatcgtgccagagatgtcacccgaaggtactctcgtgatccaggtcacagcaagcgacgccgacgacccctcctcgggcaataacgcacggctgttgtacagtctgctccagggacagccttacttttcggtagagcccactaccggggtgattagaatcagctcaaaaatggaccgggaattacaggatgagtactgggtaatcattcaggccaaagacatgatcggccaaccgggcgccttgtctggcaccacgagcgtactgattaaactatctgacgtgaacgacaacaaaccgatcttcaaagaaagcctgtacaggcttactgtcagcgagtctgcccccaccggtacctccattgggaccattatggcctatgacaatgatataggagagaacgcggaaatggactactcaatcgaggaagacgattctcagaccttcgacataattaccaaccacgaaacacaggagggcattgtcatactgaaaaagaaggtagactttgagcaccagaatcactatggaatcagagccaaggtgaagaaccatcacgtgccggagcaacttatgaaatatcacactgaagctagcactacctttatcaaaattcaggtagaggacgtggatgagccccccctgttcctgctgccttactatgtattcgaggtttttgaagagaccccgcaggggagctttgttggggtggtatctgcaactgaccccgacaatcgcaagagtccaattcggtatagcattacccggtcaaaggtttttaacattaatgacaacgggactatcaccacttccaacagtttggaccgggaaatttccgcatggtataatctgtccataactgctaccgagaagtacaacatcgagcagatctctagcatccccttgtacgtccaggttctgaatattaatgaccatgctcctgagttttcccagtactatgagacgtacgtctgtgaaaatgccgggtccggacagggactgttcttttag

SEQ ID NO: 95874 - DNA, 1473 bp, Artificial Sequence
  derived and/or modified sequence
atgaactgctacctgctgctgcgcttcatgctgggcatccccctgctgtggccctgcctgggcgccacagagaacagccagaccaagaaggtgaagcagcctgtgcgcagccacctgcgggtgaagaggggctgggtgtggaaccagttctttgtgcctgaggagatgaacaccaccagccaccacatcggccagctgcggagtgacctggacaatggaaacaacagcttccagtacaagctgctgggcgctggggccggcagcaccttcatcattgatgagaggactggagacatctatgccatccagaagctggaccgggaggagaggagcctgtacatcctgcgggcccaggtgattgacatcgccaccggccgggctgtggagcctgagagcgagtttgtgatcaaggtgtctgacatcaatgacaatgagcccaagttcctggatgagccctatgaggccatcgtgcctgagatgagccctgagggcaccctggtgatccaggtgacagccagtgatgctgatgaccccagcagcggcaacaatgcccggctgctgtacagcctgctgcagggccagccctacttctctgtggagcccaccactggagtcatccgcatcagcagcaagatggaccgggagctgcaggatgagtactgggtgatcatccaggccaaggacatgattggccagcccggggccctgagcggcaccacctctgtgctgatcaagctgagtgatgtgaatgacaacaagcccatcttcaaggagagcctgtaccgcctgactgtgtctgagagcgcccccaccggcaccagcatcggcaccatcatggcctatgacaatgacattggagaaaatgctgagatggactacagcattgaagaagatgacagccagacctttgacatcatcaccaaccacgagacccaggagggcatcgtcatcctgaagaagaaggtggactttgagcaccagaaccactacggcatccgggccaaggtgaagaaccaccacgtgcctgagcagctgatgaagtaccacacagaggccagcaccaccttcatcaagatccaggtggaggatgtggatgagcccccactcttcctgctgccctactacgtgtttgaggtgtttgaggagaccccccagggcagctttgtgggcgtggtgtctgccacagatcctgacaacaggaagagccccatccgctacagcatcaccaggagcaaggtgttcaacatcaatgacaatggcaccatcaccaccagcaacagcctggaccgggagatcagcgcctggtacaacctgagcatcacagccacagagaagtacaacatcgagcagatcagcagcatccccctgtatgtgcaggtgctgaacatcaatgaccacgcccctgagttcagccagtactatgagacctacgtgtgtgaaaatgccggcagcggccagggcctcttcttctag

SEQ ID NO: 95875 - DNA, 1473 bp, Artificial Sequence
  derived and/or modified sequence
atgaactgctacctgctgctgcggttcatgctgggcatccccctgctgtggccttgtcttggggctaccgagaatagccaaaccaagaaagttaagcaacctgtgcgctcccacctgcgagttaaaagaggctgggtctggaatcagttctttgtgcctgaagagatgaatacaacttcacatcatatcggtcagctcagatccgatttagacaacggtaataattcttttcaatacaaacttctaggagccggagccggatcaacatttattatcgacgaacgaacaggggatatatacgcaatccagaaactggatagagaagagcgcagcctgtacatcctgagggcccaggtgatagacatcgctacagggcgcgcagtagagcctgagtctgaattcgtgatcaaggtgagtgacattaatgataacgaaccaaaatttctggatgagccctatgaggctattgtgcccgagatgagtccagagggaaccctggtgattcaagtgactgccagtgacgcggatgacccctcaagcggcaataacgctaggctactctactcacttttacagggccagccttacttcagtgttgagccgaccaccggtgttattcgtattagcagcaagatggatagggagctccaggatgaatattgggtgatcatccaagccaaggacatgatagggcagcccggtgccctgtccgggaccactagcgtgctcatcaagctgagcgatgttaatgataataaacctatcttcaaggaaagtttatatcgactcaccgtatccgaatcagcccccaccgggacttccattggtacaatcatggcttatgataatgatattggcgaaaacgctgagatggattatagcatagaagaagacgactcccaaacctttgacatcataacaaatcatgagactcaggagggaattgtcatcctcaaaaaaaaagtggattttgagcaccaaaaccattatggcatccgcgctaaggtgaaaaaccaccatgtgcctgaacagctgatgaagtaccacactgaagcttctaccacatttattaaaatccaggtggaagacgttgacgagcctcccctgttcttactgccctactacgtgttcgaggtatttgaggagacaccacagggctctttcgttggggtcgtctctgctactgaccccgacaatcgtaagagtcccatccgttactcaatcacaaggtccaaggtgtttaatataaatgataacggaaccattactacaagtaactccctcgacagagaaatttccgcctggtacaatctgagcattacagccaccgaaaaatacaacatcgaacagatctctagcatcccgctatatgttcaagtcctcaatattaacgaccatgctcccgagttttctcagtactatgaaacctacgtttgtgaaaatgcgggctccggtcagggcttatttttctag

SEQ ID NO: 95876 - DNA, 1473 bp, Artificial Sequence
  derived and/or modified sequence
atgaactgttacttgcttctaaggttcatgctgggtatccccctactgtggccctgtctgggcgcaaccgagaactcccagacaaaaaaggtgaagcaaccggtccgctctcatctgagagttaagcgcggttgggtgtggaaccagttcttcgtcccggaggagatgaatactacttctcaccacatcgggcagctccggagcgacctggataacggcaacaattcctttcagtacaaacttctcggcgcaggagccggatcaacctttattatagacgagcgaaccggtgatatttacgccatccaaaagctggatcgcgaggagcggtctctgtacattctccgcgcacaggtaatcgatattgcaactggtagagctgtcgaaccagaaagtgagtttgtgataaaggtcagcgatattaacgacaacgagcccaagtttctggacgaaccttatgaggccattgtgcccgagatgagccctgagggtaccctggtgattcaggtgacggctagcgatgcagatgatcccagttccggtaacaatgccaggctgctatacagtctgctgcaggggcagccttattttagtgtcgagcccacaacgggtgtgattcgcatttccagcaagatggacagagagttgcaggatgagtactgggtgatcatccaggctaaggacatgatcgggcagcccggtgctctgtcaggcactacctccgttctgatcaagctcagcgacgtgaacgacaacaaaccaattttcaaggaatccctgtataggctgaccgtgagtgaatccgccccaactggcaccagcatcgggactatcatggcctatgacaatgacattggggagaacgccgagatggattattccatcgaggaagacgactcccaaacctttgatatcatcacgaaccacgagacccaggaggggatagtgatacttaaaaagaaggtagactttgagcatcagaatcactacggcatacgggcaaaggtcaagaatcatcatgtgcctgagcagttaatgaagtaccataccgaagcctcaacgacatttatcaagatccaagtagaagacgtggacgaacctcccttgttcctgctgccatattacgtttttgaggtgtttgaagagactcctcaaggttccttcgttggtgtagtctctgcgacagatcccgacaaccgaaaatctcccatccggtactcaatcactcgctccaaggtgttcaatattaatgacaatggcaccattaccacttccaacagcttagatcgagaaattagcgcttggtataacctctccattactgccactgagaagtacaatatagaacaaatttccagcatccccctgtacgtccaagtcctcaatatcaacgatcatgcaccagaattttcccagtattatgaaacctacgtgtgtgaaaacgccggttccggacagggactgttcttttag

SEQ ID NO: 95877 - DNA, 1963 bp, Artificial Sequence
  derived and/or modified sequence
aatggggcacatcgagagtttgctgagaagactgtgaagcaaaaagaagaaagtttttcctactcttccttatgtgtccaacacgaagtttgctgttcagttttcacagaacttctagaagttgaagttacaaaggtatatagaaggtacacagaatcagaaaagattataaaagaaagcaagatttttgttagtgacgtcctgtttcctctgaagagtaatagttggaatcaaaagagtcaacgcaatgaactgttatttactgctgcgttttatgttgggaattcctctcctatggccttgtcttggagcaacagaaaactctcaaacaaagaaagtcaagcagccagtgcgatctcatttgagagtgaagcgtggctgggtgtggaaccaattttttgtaccagaggaaatgaatacgactagtcatcacatcggccagctaagatctgatttagacaatggaaacaattctttccagtacaagcttttgggagctggagctggaagtacttttatcattgatgaaagaacaggtgacatatatgccatacagaagcttgatagagaggagcgatccctctacatcttaagagcccaggtaatagacatcgctactggaagggctgtggaacctgagtctgagtttgtcatcaaagtttcggatatcaatgacaatgaaccaaaattcctagatgaaccttatgaggccattgtaccagagatgtctccagaaggaacattagttatccaggtgacagcaagtgatgctgacgatccctcaagtggtaataatgctcgtctcctctacagcttacttcaaggccagccatatttttctgttgaaccaacaacaggagtcataagaatatcttctaaaatggatagagaactgcaagatgagtattgggtaatcattcaagccaaggacatgattggtcagccaggagcgttgtctggaacaacaagtgtattaattaaactttcagatgttaatgacaataagcctatatttaaagaaagtttataccgcttgactgtctctgaatctgcacccactgggacttctataggaacaatcatggcatatgataatgacataggagagaatgcagaaatggattacagcattgaagaggatgattcgcaaacatttgacattattactaatcatgaaactcaagaaggaatagttatattaaaaaagaaagtggattttgagcaccagaaccactacggtattagagcaaaagttaaaaaccatcatgttcctgagcagctcatgaagtaccacactgaggcttccaccactttcattaagatccaggtggaagatgttgatgagcctcctcttttcctccttccatattatgtatttgaagtttttgaagaaaccccacagggatcatttgtaggcgtggtgtctgccacagacccagacaataggaaatctcctatcaggtattctattactaggagcaaagtgttcaatatcaatgataatggtacaatcactacaagtaactcactggatcgtgaaatcagtgcttggtacaacctaagtattacagccacagaaaaatacaatatagaacagatctcttcgatcccactgtatgtgcaagttcttaacatcaatgatcatgctcctgagttctctcaatactatgagacttatgtttgtgaaaatgcaggctctggtcagggtttatttttttgactttgggtttaaaacaacggagaaaacagattctatttcctgagaaaagtgaagatttcagagagaatatattccaatatgatgatgaagggggtggagaagaagatacagaggcctttgatatagcagagctgaggagtagtaccataatgcgggaacgcaagactcggaaaaccacaagcgctgagatcaggagcctatacaggcagtctttgcaagttggccccgacagtgccatattca

SEQ ID NO: 95878 - DNA, 1473 bp, Artificial Sequence
  derived and/or modified sequence
atgaactgctacctgctgctgagattcatgctgggcatccccctgctgtggccctgcctgggcgccaccgagaacagccagaccaagaaggtgaagcagcccgtgagaagccacctgagagtgaagagaggctgggtgtggaaccagttcttcgtgcccgaggagatgaacaccaccagccaccacatcggccagctgagaagcgacctggacaacggcaacaacagcttccagtacaagctgctgggcgccggcgccggcagcaccttcatcatcgacgagagaaccggcgacatctacgccatccagaagctggacagagaggagagaagcctgtacatcctgagagcccaggtgatcgacatcgccaccggcagagccgtggagcccgagagcgagttcgtgatcaaggtgagcgacatcaacgacaacgagcccaagttcctggacgagccctacgaggccatcgtgcccgagatgagccccgagggcaccctggtgatccaggtgaccgccagcgacgccgacgaccccagcagcggcaacaacgccagactgctgtacagcctgctgcagggccagccctacttcagcgtggagcccaccaccggcgtgatcagaatcagcagcaagatggacagagagctgcaggacgagtactgggtgatcatccaggccaaggacatgatcggccagcccggcgccctgagcggcaccaccagcgtgctgatcaagctgagcgacgtgaacgacaacaagcccatcttcaaggagagcctgtacagactgaccgtgagcgagagcgcccccaccggcaccagcatcggcaccatcatggcctacgacaacgacatcggcgagaacgccgagatggactacagcatcgaggaggacgacagccagaccttcgacatcatcaccaaccacgagacccaggagggcatcgtgatcctgaagaagaaggtggacttcgagcaccagaaccactacggcatcagagccaaggtgaagaaccaccacgtgcccgagcagctgatgaagtaccacaccgaggccagcaccaccttcatcaagatccaggtggaggacgtggacgagccccccctgttcctgctgccctactacgtgttcgaggtgttcgaggagaccccccagggcagcttcgtgggcgtggtgagcgccaccgaccccgacaacagaaagagccccatcagatacagcatcaccagaagcaaggtgttcaacatcaacgacaacggcaccatcaccaccagcaacagcctggacagagagatcagcgcctggtacaacctgagcatcaccgccaccgagaagtacaacatcgagcagatcagcagcatccccctgtacgtgcaggtgctgaacatcaacgaccacgcccccgagttcagccagtactacgagacctacgtgtgcgagaacgccggcagcggccagggcctgttcttctag

SEQ ID NO: 95879 - DNA, 1688 bp, Artificial Sequence
  derived and/or modified sequence
agacggacactgtgccggggcgagctgacaggagttcacggctgcgatagaacatggagatgtcatgggcgcgacagagcctggcggggataccagcagcgtgtgatgagttccacccgttcatcgaggcactgctgcctcacgtccgcgctttctcctacacctggttcaacctgcaggcgcggaagcgcaagtacttcaagaagcatgaaaagcggatgtcgaaggacgaggagcgggcggtgaaggacgagctgctgggcgagaagcccgagatcaagcagaagtgggcatcccggctgctggccaagctgcgcaaggacatccggcccgagttccgcgaggacttcgtgctgaccatcacgggcaagaagcccccctgctgcgtgctctccaaccccgaccagaagggcaagatccggcggattgactgcctgcgccaggctgacaaggtgtggcggctggacctggtcatggtgattttgtttaaggggatccccctggaaagtactgatggggagcggctctacaagtcgcctcagtgctcgaaccccggcctgtgcgtccagccacatcacattggagtcacaatcaaagaactggatctttatctggcttactttgtccacactccggaatccggacaatcagatagttcaaaccagcaaggagatgcggacatcaaaccactgcccaacgggcacttaagtttccaggactgttttgtgacttccggggtctggaatgtgacggagctggtgtatcacagactcctgttgcaacagcatcagggcccaacttctccctggcggacctggagagtcccagctactacaacatcaaccaggtgaccctggggcggcggtccatcacctcccctccttccaccagcaccaccaagcgccccaagtccatcgatgacagtgagatggagagccctgttgatgacgtgttctatcccgggacaggccgttccccagcagctggcagcagccagtccagcgggtggcccaacgatgtggatgcaggcccggcttctctaaagaagtcaggaaagctggacttctgcagtgccctctcctctcagggcagctccccgcgcatggctttcacccaccacccgctgcctgtgcttgctggagtcagaccagggagcccccgggccacagcatcagccctgcacttcccctccacgtccatcatccagcagtcgagcccgtatttcacgcacccgaccatccgctaccaccaccaccacgggcaggactcactgaaggagtttgtgcagtttgtgtgctcggatggctcgggccaggccaccggacagcccaacggtagcggccagggcaaagtcccggggtcatttttgctaccgccgccgcctccagtggccagacctgtgccccttcctatgcctgattccaaatccaccagcactgccccagacggcgccgccttgactcctccatcaccttcattcgcaacgacaggcgcctcctctgccaaccggtttgtcagcatcggaccccgggacggcaactttctgaacatcccacagcagtctcagtcctggttcctctgataagatcgacaaaagaaacaacaaaatgagaagaagaggttcctcgaaaggggggagaagaaattttgagaatggaaaaatcccccagcccagcccagccccaccg

SEQ ID NO: 95880 - protein, 210 aa, Artificial Sequence
  derived and/or modified sequence
MSKDEERAVKDELLGEKPEIKQKWASRLLAKLRKDIRPEFREDFVLTITGKKPPCCVLSNPDQKGKIRRIDCLRQADKVWRLDLVMVILFKGIPLESTDGERLYKSPQCSNPGLCVQPHHIGVTIKELDLYLAYFVHTPESGQSDSSNQQGDADIKPLPNGHLSFQDCFVTSGVWNVTELVYHRLLLQQHQGPTSPWRTWRVPATTTSTR

SEQ ID NO: 95881 - protein, 765 aa, Artificial Sequence
  derived and/or modified sequence
MGGRVFLVFLAFCVWLTLPGAETQDSRGCARWCPQDSSCVNATACRCNPGFSSFSEIITTPMETCDDINECATLSKVSCGKFSDCWNTEGSYDCVCSPGYEPVSGAKTFKNESENTCQDVDECQQNPRLCKSYGTCVNTLGSYTCQCLPGFKLKPEDPKLCTDVNECTSGQNPCHSSTHCLNNVGSYQCRCRPGWQPIPGSPNGPNNTVCEDVDECSSGQHQCDSSTVCFNTVGSYSCRCRPGWKPRHGIPNNQKDTVCEDMTFSTWTPPPGVHSQTLSRFFDKVQDLGRDYKPGLANNTIQSILQALDELLEAPGDLETLPRLQQHCVASHLLDGLEDVLRGLSKNLSNGLLNFSYPAGTELSLEVQKQVDRSVTLRQNQAVMQLDWNQAQKSGDPGPSVVGLVSIPGMGKLLAEAPLVLEPEKQMLLHETHQGLLQDGSPILLSDVISAFLSNNDTQNLSSPVTFTFSHREEDPVLTVITYMGLSVSLLCLLLAALTFLLCKAIQNTSTSLHLQLSLCLFLAHLLFLVAIDQTGHKVLCSIIAGTLHYLYLATLTWMLLEALYLFLTARNLTVVNYSSINRFMKKLMFPVGYGVPAVTVAISAASRPHLYGTPSRCWLQPEKGFIWGFLGPVCAIFSVNLVLFLVTLWILKNRLSSLNSEVSTLRNTRMLAFKATAQLFILGCTWCLGILQVGPAARVMAYLFTIINSLQGVFIFLVYCLLSQQVREQYGKWSKGIRKLKTESEMHTLSSSAKADTSKPSTVN

SEQ ID NO: 95882 - DNA, 720 bp, Artificial Sequence
  derived and/or modified sequence
atgggcggcagagtgttcctggtgttcctggccttctgcgtgtggctgaccctgcccggcgccgagacccaggacagcagaggctgcgccagatggtgcccccaggacagcagctgcgtgaacgccaccgcctgcagatgcaaccccggcttcagcagcttcagcgagatcatcaccacccccatggagacctgcgacgacatcaacgagtgcgccaccctgagcaaggtgagctgcggcaagttcagcgactgctggaacaccgagggcagctacgactgcgtgtgcagccccggctacgagcccgtgagcggcgccaagaccttcaagaacgagagcgagaacacctgccaggacgtggacgagtgccagcagaaccccagactgtgcaagagctacggcacctgcgtgaacaccctgggcagctacacctgccagtgcctgcccggcttcaagctgaagcccgaggaccccaagctgtgcaccgacgtgaacgagtgcaccagcggccagaacccctgccacagcagcacccactgcctgaacaacgtgggcagctaccagtgcagatgcagacccggctggcagcccatccccggcagccccaacggccccaacaacaccgtgtgcgagggcagagagctgagaagccacgtgcccagagacccccagaccagcgaccacatgttcaacggcgcccacaccaaccaggccgagtag

SEQ ID NO: 95883 - DNA, 2298 bp, Artificial Sequence
  derived and/or modified sequence
atgggcggcagagtgttcctggtgttcctggccttctgcgtgtggctgaccctgcccggcgccgagacccaggacagcagaggctgcgccagatggtgcccccaggacagcagctgcgtgaacgccaccgcctgcagatgcaaccccggcttcagcagcttcagcgagatcatcaccacccccatggagacctgcgacgacatcaacgagtgcgccaccctgagcaaggtgagctgcggcaagttcagcgactgctggaacaccgagggcagctacgactgcgtgtgcagccccggctacgagcccgtgagcggcgccaagaccttcaagaacgagagcgagaacacctgccaggacgtggacgagtgccagcagaaccccagactgtgcaagagctacggcacctgcgtgaacaccctgggcagctacacctgccagtgcctgcccggcttcaagctgaagcccgaggaccccaagctgtgcaccgacgtgaacgagtgcaccagcggccagaacccctgccacagcagcacccactgcctgaacaacgtgggcagctaccagtgcagatgcagacccggctggcagcccatccccggcagccccaacggccccaacaacaccgtgtgcgaggacgtggacgagtgcagcagcggccagcaccagtgcgacagcagcaccgtgtgcttcaacaccgtgggcagctacagctgcagatgcagacccggctggaagcccagacacggcatccccaacaaccagaaggacaccgtgtgcgaggacatgaccttcagcacctggacccccccccccggcgtgcacagccagaccctgagcagattcttcgacaaggtgcaggacctgggcagagactacaagcccggcctggccaacaacaccatccagagcatcctgcaggccctggacgagctgctggaggcccccggcgacctggagaccctgcccagactgcagcagcactgcgtggccagccacctgctggacggcctggaggacgtgctgagaggcctgagcaagaacctgagcaacggcctgctgaacttcagctaccccgccggcaccgagctgagcctggaggtgcagaagcaggtggacagaagcgtgaccctgagacagaaccaggccgtgatgcagctggactggaaccaggcccagaagagcggcgaccccggccccagcgtggtgggcctggtgagcatccccggcatgggcaagctgctggccgaggcccccctggtgctggagcccgagaagcagatgctgctgcacgagacccaccagggcctgctgcaggacggcagccccatcctgctgagcgacgtgatcagcgccttcctgagcaacaacgacacccagaacctgagcagccccgtgaccttcaccttcagccacagagaggaggaccccgtgctgaccgtgatcacctacatgggcctgagcgtgagcctgctgtgcctgctgctggccgccctgaccttcctgctgtgcaaggccatccagaacaccagcaccagcctgcacctgcagctgagcctgtgcctgttcctggcccacctgctgttcctggtggccatcgaccagaccggccacaaggtgctgtgcagcatcatcgccggcaccctgcactacctgtacctggccaccctgacctggatgctgctggaggccctgtacctgttcctgaccgccagaaacctgaccgtggtgaactacagcagcatcaacagattcatgaagaagctgatgttccccgtgggctacggcgtgcccgccgtgaccgtggccatcagcgccgccagcagaccccacctgtacggcacccccagcagatgctggctgcagcccgagaagggcttcatctggggcttcctgggccccgtgtgcgccatcttcagcgtgaacctggtgctgttcctggtgaccctgtggatcctgaagaacagactgagcagcctgaacagcgaggtgagcaccctgagaaacaccagaatgctggccttcaaggccaccgcccagctgttcatcctgggctgcacctggtgcctgggcatcctgcaggtgggccccgccgccagagtgatggcctacctgttcaccatcatcaacagcctgcagggcgtgttcatcttcctggtgtactgcctgctgagccagcaggtgagagagcagtacggcaagtggagcaagggcatcagaaagctgaagaccgagagcgagatgcacaccctgagcagcagcgccaaggccgacaccagcaagcccagcaccgtgaactag

SEQ ID NO: 95884 - DNA, 3328 bp, Artificial Sequence
  derived and/or modified sequence
ggggtctgctctgtgcggtgaagcttctcttcttggcacctgcctggcatcggaagagggccccttctccctccctgggcttttatgtggacactgtaatgcctcagttttctttctttctttttgtttttgacacagggtctcactctatcacccaagctggagtgcagtggcaccatcttagctcaccgcagcctcaaactccccagctcgggtgattcttcctgcctcagcctcctgagtagtagcagctgggaccacagacgtctgccaccaagcccagctgcaccgccagttccggggagggccctgggccagcggctgtccgccccccctcctttataaagtcctggcctcgggacagcccgcacagctgcccagcctgcggagacgggacagccctgtcccactcactctttcccctgctgctcctgccggcagctcagctggaaccatgggaggccgcgtctttctcgtctttctcgcattctgtgtctggctgactctgccgggagctgaaacccaggactccaggggctgtgcccggtggtgccctcaggactcctcgtgtgtcaatgccaccgcctgtcgctgcaatccagggttcagctctttttctgagatcatcaccacccccatggagacttgtgacgacatcaacgagtgtgcaacactgtcgaaagtgtcatgcggaaaattctcggactgctggaacacagaggggagctacgactgcgtgtgcagcccaggatatgagcctgtttctggggcaaaaacattcaagaatgagagcgagaacacgtgtcaagatgtggacgaatgtcagcagaacccaaggctctgtaaaagctacggcacctgcgtcaacaccctcggcagctacacgtgccagtgcctgcctggcttcaagctcaaacctgaggacccgaagctctgcacagatgtgaatgaatgcacctccggacaaaacccatgccacagctccacccactgcctcaacaacgtgggcagctatcagtgccgctgccgcccgggctggcaaccgattccggggtcccccaatggcccaaacaataccgtctgtgaaggtcgagagctcagatcccacgttcccagagacccacaaacatctgatcacatgttcaacggcgcccacacaaaccaagcagaatgagcgctggaggcgcccgactgtgtcaggcgttcattcttctgaggctagatgagaaaagagcaagggtcctgcggaaggagctggggtactgaggggggaggctcagggggaccccaggcaacagctgatgactcactgggaggaaggcgtttcaccatattcataacctgctcatctgcacggggcccacctgctgtgcccaggcctctccacgcttccataacccagcgtccacctctccaaggggggcactaatgccgggaggaacgagctgggggcacagacaggagacaggaccctctccaggctgggacaggacctgacccccttcttcctgtcctcagatgtggacgagtgcagctccgggcagcatcagtgtgacagctccaccgtctgcttcaacaccgtgggttcatacagctgccgctgccgcccaggctggaagcccagacacggaatcccgaataaccaaaaggacactgtctgtgaagatatgactttctccacctggaccccgccccctggagtccacagccagacgctttcccgattcttcgacaaagtccaggacctgggcagagactacaagccaggcttggccaataacaccatccagagcatcttacaggcgctggatgagctgctggaggcccctggggacctggagaccctgccccgcttacagcagcactgtgtggccagtcacctgctggatggcctagaggatgtcctcagaggcctgagcaagaacctttccaatgggctgttgaacttcagttatcctgcaggcacagaattgtccctggaggtgcagaagcaagtagacaggagtgtcaccttgagacagaatcaggcagtgatgcagctcgactggaatcaggcacagaaatctggtgacccaggtgctgtgctccatcatcgccggtaccttgcactatctctacctggccaccttgacctggatgctgctggaggccctgtacctcttcctcactgcacggaacctgacggtggtcaactactcaagcatcaacagattcatgaagaagctcatgttccctgtgggctacggagtcccagctgtgacagtggccatttctgcagcctccaggcctcacctttatggaacaccttcccgctgctggctccaaccagaaaagggatttatatggggcttccttggacctgtctgcgccatcttctctgatgctggcatttaaagcgacagctcagctgttcatcctgggctgcacgtggtgtctgggcatcttgcaggtgggtccggctgcccgggtcatggcctacctcttcaccatcatcaacagcctgcagggtgtcttcatcttcctggtgtactgcctcctcagccagcaggtccgggagcaatatgggaaatggtccaaagggatcaggaaattgaaaactgagtctgagatgcacacactctccagcagtgctaaggctgacacctccaaacccagcacggttaactagaaaaatcttctgaataagatcttccctctttgcccgtggaaaatctgaacaatctttgagccatctagaggggaaagaaaagactttgttctgtgtgtttcaagaaattcaccatgtcagcaatatgaaggatgttatggaaggcgtgctaggcattcaattcctgcagaaaccggaaatcttccatgccctgcaatgtgctcatcaaactctcagcatatggacggccagctgtggcccatatcttggtcactctgaagcacaatatttatgaagctatagaacgttaagacctctttcacagcctctccttcctacaaagactcctccaaatcttaaaatgaagcaggaaaacgagcctaagaggactttcataccgacaacatctgaaaggactagaatgttcacaccacgatctggatttcttaattttttgtttttgtttttgttgttctctagttctacgggtttgattatttagtcatgtgaaaaatattgattactcacacatagatcaagagagacacggctcctgccttcatggagcttttaggggaaaatgaagtggctcttgcagctagagttgactcagaagccgaaattcctagaaatcaggtttctactgctaggcaattgaagtataaactattttataaacac

SEQ ID NO: 95885 - DNA, 2513 bp, Artificial Sequence
  derived and/or modified sequence
cacagctgcccagcctgcggagacgggacagccctgtcccactcactctttcccctgctgctcctgccggcagctcagctggaaccatgggaggccgcgtctttctcgtctttctcgcattctgtgtctggctgactctgccgggagctgaaacccaggactccaggggctgtgcccggtggtgccctcaggactcctcgtgtgtcaatgccaccgcctgtcgctgcaatccagggttcagctctttttctgagatcatcaccacccccatggagacttgtgacgacatcaacgagtgtgcaacactgtcgaaagtgtcatgcggaaaattctcggactgctggaacacagaggggagctacgactgcgtgtgcagcccaggatatgagcctgtttctggggcaaaaacattcaagaatgagagcgagaacacgtgtcaagatgtggacgaatgtcagcagaacccaaggctctgtaaaagctacggcacctgcgtcaacaccctcggcagctacacgtgccagtgcctgcctggcttcaagctcaaacctgaggacccgaagctctgcacagatgtgaatgaatgcacctccggacaaaacccatgccacagctccacccactgcctcaacaacgtgggcagctatcagtgccgctgccgcccgggctggcaaccgattccggggtcccccaatggcccaaacaataccgtctgtgaagatgtggacgagtgcagctccgggcagcatcagtgtgacagctccaccgtctgcttcaacaccgtgggttcatacagctgccgctgccgcccaggctggaagcccagacacggaatcccgaataaccaaaaggacactgtctgtgaagatatgactttctccacctggaccccgccccctggagtccacagccagacgctttcccgattcttcgacaaagtccaggacctgggcagagactacaagccaggcttggccaataacaccatccagagcatcttacaggcgctggatgagctgctggaggcccctggggacctggagaccctgccccgcttacagcagcactgtgtggccagtcacctgctggatggcctagaggatgtcctcagaggcctgagcaagaacctttccaatgggctgttgaacttcagttatcctgcaggcacagaattgtccctggaggtgcagaagcaagtagacaggagtgtcaccttgagacagaatcaggcagtgatgcagctcgactggaatcaggcacagaaatctggtgacccaggcccttctgtggtgggccttgtctccattccagggatgggcaagttgctggctgaggcccctctggtcctggaacctgagaagcagatgcttctgcatgagacacaccagggcttgctgcaggacggctcccccatcctgctctcagatgtgatctctgcctttctgagcaacaacgacacccaaaacctcagctccccagttaccttcaccttctcccaccgtgaggaggatcccgtgctgactgtcatcacctacatggggctgagcgtctctctgctgtgcctcctcctggcggccctcacttttctcctgtgtaaagccatccagaacaccagcacctcactgcatctgcagctctcgctctgcctcttcctggcccacctcctcttcctcgtggcaattgatcaaaccggacacaaggtgctgtgctccatcatcgccggtaccttgcactatctctacctggccaccttgacctggatgctgctggaggccctgtacctcttcctcactgcacggaacctgacggtggtcaactactcaagcatcaacagattcatgaagaagctcatgttccctgtgggctacggagtcccagctgtgacagtggccatttctgcagcctccaggcctcacctttatggaacaccttcccgctgctggctccaaccagaaaagggatttatatggggcttccttggacctgtctgcgccatcttctctgtgaatttagttctctttctggtgactctctggattttgaaaaacagactctcctccctcaatagtgaagtgtccaccctccggaacacaaggatgctggcatttaaagcgacagctcagctgttcatcctgggctgcacgtggtgtctgggcatcttgcaggtgggtccggctgcccgggtcatggcctacctcttcaccatcatcaacagcctgcagggtgtcttcatcttcctggtgtactgcctcctcagccagcaggtccgggagcaatatgggaaatggtccaaagggatcaggaaattgaaaactgagtctgagatgcacacactctccagcagtgctaaggctgacacctccaaacccagcacggttaactagaaaaatcttctgaataagatcttccctctttgcccgtggaaaatctgaacaatctttgagccatctagaggggaaagaaaagactttgttctgtgtgtttcaagaaattcaccatgtcagcaatatgaa

SEQ ID NO: 95886 - DNA, 720 bp, Artificial Sequence
  derived and/or modified sequence
atgggaggacgcgtgtttttggtgtttttagccttttgcgtttggttaacactacccggggctgagacccaggactcgcgcggctgcgcgcggtggtgtcctcaagatagctcttgcgtaaatgccaccgcttgtagatgtaatccagggtttagcagctttagtgaaatcatcaccactccaatggagacttgcgatgatatcaacgaatgtgccaccctctcgaaagtgtcctgcggcaaattcagcgattgctggaataccgagggctcctacgactgtgtgtgctcccctggatatgagcccgtttctggggccaaaacgttcaaaaacgagtcagagaatacgtgccaggacgtcgacgagtgtcaacagaacccaaggctgtgcaaaagctacggcacgtgcgtcaacaccctgggatcgtatacctgccaatgcctccccggcttcaagctgaaaccagaggaccccaagctgtgcaccgacgtgaatgagtgtaccagcgggcagaatccttgtcacagcagcactcactgtctgaacaatgttggttcttatcagtgtcgatgccggcccggatggcaaccaatcccggggtcccctaacggaccaaacaacactgtgtgcgagggccgcgaactgcggtcgcatgtacccagggacccgcagacttccgaccacatgtttaatggggcccataccaatcaggctgagtag

SEQ ID NO: 95887 - DNA, 2298 bp, Artificial Sequence
  derived and/or modified sequence
atgggcggtcgggtattcctggtttttctcgccttctgcgtgtggctgactctgccaggcgccgagacacaggacagcagaggttgtgcccggtggtgtccgcaagacagctcttgcgtgaacgcgacagcatgtcggtgcaaccccgggtttagttccttcagcgagataatcactacgcctatggaaacttgtgacgatatcaacgaatgtgccaccctctctaaagtaagttgcgggaagttcagcgactgttggaatacagagggatcatacgactgcgtctgtagtccagggtatgagccagtgtccggcgccaagacatttaaaaacgaatctgaaaatacctgccaagacgttgatgagtgccaacagaacccccgtctgtgtaagtcatacggaacttgtgttaatacactgggcagctacacctgtcagtgcctgcctggcttcaaactcaaacccgaggacccaaagctctgtactgacgtaaacgagtgcacatcaggtcagaatccatgccatagctctacccattgcttgaacaatgtggggtcttaccagtgtaggtgccgtccaggatggcaacctatccccggaagtcccaacggaccaaataataccgtgtgcgaggatgtcgacgagtgctcctcggggcagcaccagtgtgacagctccactgtttgcttcaacactgtcggtagctacagctgtcggtgcaggccagggtggaagcctaggcacggtatacctaataatcagaaggatacggtgtgtgaagatatgacattcagcacatggactccgccgcctggcgtccactctcagaccctttcgcgcttctttgacaaggtccaggacctggggagggattacaaaccaggtctagctaataacactattcagagcatactgcaggcgctcgatgaattattggaagcccctggcgatctcgagacactgcctagacttcagcagcattgtgtcgccagtcacctgctggatggacttgaagatgtgctgcgggggctgagtaaaaacctttcaaatgggcttctgaactttagctatcccgccgggactgaattgagcctggaggtccagaaacaagtagacaggagtgtcactctgaggcagaaccaagctgtcatgcagttagattggaatcaggcacagaaatccggcgaccccgggccatccgtggtgggcctggtgagcatccctggcatgggcaaactccttgccgaggctccattagtcctcgaacccgagaaacagatgctcttgcatgagacacaccaggggctgctgcaggacgggagtcctatcctgctgagtgacgtgatctcagcttttctgtcaaacaatgatactcaaaaccttagcagcccggtcacgtttaccttttcgcatcgggaagaggatcccgtcctgaccgtcattacatatatgggactctctgtgtccctgctgtgcctccttctggccgccctgaccttcctgctctgcaaggccatacaaaatacctctacaagcctccacttgcaattgagcctgtgcctgttcttagcgcatctgctcttcctggtggcaatcgaccagacaggccacaaagtcctctgttcgatcatagcaggaactctccattacctgtatctcgctacactcacatggatgctgctggaggccttgtatttgttcctgaccgccaggaatcttaccgtcgtaaattatagtagcatcaatcgtttcatgaaaaagcttatgttccccgtaggctatggagtgccggcagtgaccgttgctatatcggctgcttcccggccccatctgtacggcacaccctcaagatgctggctccaacctgagaaaggattcatttggggttttctgggcccggtctgtgcgatttttagtgtcaacctggtcttgttcctggtgacactatggatcctgaagaataggctttctagtctcaattctgaagtgtcaacactgcggaacacccgaatgctcgccttcaaggccacagctcagctgttcattctgggctgcacctggtgtctcggaatcctgcaggtggggccagctgcccgagtaatggcttacctgtttacaatcattaatagcttgcagggggtgttcatctttctcgtatattgcctgttgagccaacaggtgagagagcagtatggtaagtggagtaagggcatccgtaagctgaaaactgaatccgagatgcataccttaagtagctcagccaaggcagatacatccaagccgtccacagtaaactag

SEQ ID NO: 95888 - DNA, 720 bp, Artificial Sequence
  derived and/or modified sequence
atgggcggccgggtcttcctggtgttcctggccttctgtgtgtggctgaccctgcctggagctgagacccaggacagccggggctgtgcccgctggtgcccccaggacagcagctgtgtgaatgccacagcctgccgctgcaaccctggcttcagcagcttcagcgagatcatcaccacccccatggagacctgtgatgacatcaatgaatgtgccaccctgagcaaggtgtcctgtgggaagttcagtgactgctggaacacagagggcagctatgactgtgtgtgcagccctggctatgagcctgtgtctggggccaagaccttcaagaatgaaagtgagaacacctgccaggatgtggatgagtgccagcagaacccccggctgtgcaagagctatggcacctgtgtgaacaccctgggcagctacacctgccagtgcctgcccggcttcaagctgaagccagaggaccccaagctgtgcacagatgtgaatgaatgtaccagcggccagaacccctgccacagcagcacccactgcctgaacaacgtgggcagctaccagtgccgctgcaggcctggctggcagcccatccctggcagccccaacggccccaacaacacagtgtgtgagggccgggagctgcggagccacgtgccccgggacccccagaccagtgaccacatgtttaatggagcccacaccaaccaggccgagtag

SEQ ID NO: 95889 - DNA, 2298 bp, Artificial Sequence
  derived and/or modified sequence
atgggcggccgggtcttcctggtgttcctggccttctgtgtgtggctgaccctgcctggagctgagacccaggacagccggggctgtgcccgctggtgcccccaggacagcagctgtgtgaatgccacagcctgccgctgcaaccctggcttcagcagcttcagcgagatcatcaccacccccatggagacctgtgatgacatcaatgaatgtgccaccctgagcaaggtgtcctgtgggaagttcagtgactgctggaacacagagggcagctatgactgtgtgtgcagccctggctatgagcctgtgtctggggccaagaccttcaagaatgaaagtgagaacacctgccaggatgtggatgagtgccagcagaacccccggctgtgcaagagctatggcacctgtgtgaacaccctgggcagctacacctgccagtgcctgcccggcttcaagctgaagccagaggaccccaagctgtgcacagatgtgaatgaatgtaccagcggccagaacccctgccacagcagcacccactgcctgaacaacgtgggcagctaccagtgccgctgcaggcctggctggcagcccatccctggcagccccaacggccccaacaacacagtgtgtgaagatgtggatgaatgtagcagcggccagcaccagtgtgacagcagcacagtgtgcttcaacacagtgggcagctacagctgccgctgccggcccggctggaagcccaggcatggcatccccaacaaccagaaggacacagtgtgtgaggacatgaccttcagcacctggaccccacctcctggggtgcacagccagaccctgagccgcttctttgacaaggtgcaggacctgggccgggactacaagccaggcctggccaacaacaccatccagagcatcctgcaggccctggatgagctgctggaggcccctggggacctggagaccctgccccggctgcagcagcactgtgtggccagccacctgctggatggcctggaggatgtgctgcggggcctgagcaagaacctgagcaatggcctgctgaacttctcctacccagctggaacagagctgagcctggaggtgcagaagcaggtggacagatctgtgaccctgcggcagaaccaggccgtgatgcagctggactggaaccaggcccagaagagcggggaccccggccccagcgtggtgggcctggtgtccatccctggcatgggcaagctgctggccgaggcccccctggtgctggagcctgagaagcagatgctgctgcacgagacccaccagggcctgctgcaggacggcagccccatcctgctgagtgatgtgatcagcgccttcctgagcaacaatgacacccagaacctgagcagccctgtgaccttcaccttcagccaccgggaggaggaccctgtgctgaccgtcatcacctacatgggcctgtctgtgtccctgctgtgcctgctgctggccgccctgaccttcctgctgtgcaaggccatccagaacaccagcaccagcctgcacctgcagctgagcctgtgcctcttcctggcccacctgctcttcctggtggccatcgaccagacaggccacaaggtgctgtgcagcatcatcgccggcaccctgcactacctgtacctggccaccctgacctggatgctgctggaggccctgtacctgttcctgacagccaggaacctgactgtggtgaactacagcagcatcaaccgcttcatgaagaagctgatgtttcctgtgggctacggcgtgcctgctgtgacagtggccatctctgctgccagccggccccacctgtatggcacccccagccgctgctggctgcagcctgagaagggcttcatctggggcttcctgggccctgtgtgtgccatcttctctgtgaacctggtgctcttcctggtgaccctgtggatcctgaagaaccggctgagcagcctgaacagcgaggtgtccaccctgaggaacaccaggatgctggccttcaaggccacagcccagctgttcatcctgggctgcacctggtgcctgggcatcctgcaggtgggccctgctgcccgggtgatggcctacctgttcaccatcatcaacagcctgcagggcgtcttcatcttcctggtgtactgcctgctgagccagcaggtgcgggagcagtatggcaagtggagcaagggcatcaggaagctgaagacagaaagtgagatgcacaccctgagcagcagcgccaaggctgacaccagcaagcccagcacagtgaactag

SEQ ID NO: 95890 - DNA, 720 bp, Artificial Sequence
  derived and/or modified sequence
atgggcggccgggtgttcctggtgttcctggccttctgcgtgtggttaacgctccctggagctgagacccaggatagccgaggatgcgcgcggtggtgcccacaggattcatcctgcgttaacgcaacagcttgccggtgcaatcctggcttcagctctttctcggagatcatcaccaccccaatggaaacctgtgacgacattaacgaatgcgctactctttcaaaagtgagctgtggaaagtttagcgattgttggaataccgagggaagttacgactgcgtatgctcccccggatacgagccggtatctggagctaaaaccttcaagaatgagagtgaaaatacatgtcaggacgtcgatgagtgccagcagaaccctcggctgtgtaagtcatacggtacttgtgtgaatacactagggagttatacttgccagtgtttacccggttttaaactgaagcctgaggatcccaaactttgtaccgatgttaacgagtgcacatctgggcagaacccatgccactctagcactcactgtctcaacaatgtcggctcctaccagtgtcggtgccggcctgggtggcaacccatacccggctctcccaacggacctaacaataccgtgtgtgaggggagggaactgcggagccatgtgccacgcgacccgcaaacctccgatcacatgtttaatggcgctcacaccaaccaggccgagtag

SEQ ID NO: 95891 - DNA, 2298 bp, Artificial Sequence
  derived and/or modified sequence
atgggcggccgggtgttcctggtgttcctggccttctgcgtgtggctgacactccccggagcagaaacacaggatagtcgaggatgcgcaaggtggtgcccgcaggatagctcctgcgtaaatgccaccgcttgccggtgcaaccctgggttttctagcttcagcgagatcattaccacccccatggaaacgtgtgatgacattaatgagtgtgcgactctatctaaggtttcttgcgggaagttctctgattgctggaataccgaagggtcatacgactgcgtgtgttccccgggctatgagccagtgtcaggcgcaaagacctttaagaacgaatccgagaacacctgccaggacgtcgacgaatgccagcagaatccacggctatgcaagtcttatgggacatgcgtaaacacactggggtcatacacctgccaatgtctcccagggttcaagctcaaacccgaggatccaaaactgtgcactgacgtgaatgaatgtacatctggtcagaatccctgccattcttctactcattgcctgaataatgtgggcagttatcagtgtcgatgccggccagggtggcagccaattcccggatccccaaacggtccaaacaacaccgtgtgtgaagacgtggatgaatgctcgtctggccaacaccaatgtgatagcagcaccgtgtgttttaatactgtgggaagctattcttgccgatgtaggcccggttggaagcctcggcacggcatccccaataaccagaaggataccgtgtgcgaggacatgacatttagcacctggactccccctccaggggtacactctcagacgttatccaggttcttcgacaaggtgcaagatctgggccgggattataaacctggtctcgccaacaacaccattcaaagcatcctccaggctctggacgaactgctggaggcacccggggacctggaaaccctccctagacttcaacagcattgtgtggctagccatctccttgatggtcttgaagatgtgctgcgcgggttgtcaaaaaacttaagcaatggtttgctgaatttctcctaccctgctggtaccgagctatccctggaggtgcaaaagcaggtagaccggtcggtgaccctgcggcagaatcaggcagttatgcagctggattggaatcaggcccagaagtctggagatcccggacccagcgtagtggggttggtgagcatccctggcatgggaaagctccttgctgaagcccccctggtgttggaacccgaaaaacagatgctgctgcatgaaactcatcagggtctcctgcaagacggctctcccatcctactgtcagatgtcatctcagcgtttcttagcaataatgacacacagaacctgtcgagcccagtaaccttcacattttctcacagagaagaggacccagtcttgactgtgattacttacatgggcctctctgtctcattgctgtgtctgctgctagccgctctcaccttcttgctgtgtaaggctattcagaacacctccacttccctgcacctacagctgtcattgtgtctgttcctagcccaccttctttttctggtggcaattgaccagactggccacaaagttctgtgctccatcattgccggaacccttcactacttgtacttggctacccttacatggatgcttcttgaggccctctatttgtttctgacagcccgcaacttgacagtagtgaactatagcagtatcaatagatttatgaagaagcttatgtttccagtaggctacggggtacccgccgtgacggtggcaatatccgcagcatcaaggccccatttatacgggacaccgagccgctgctggctccagccagaaaagggcttcatctggggttttctcggtccagtgtgtgctattttctcggtcaacctggtactttttctggttacgctctggatcttgaagaataggctgtcttctctgaattctgaggtgagcactctgcggaacaccaggatgctggccttcaaggcgacagcacagttgtttatattgggatgtacctggtgcctgggaatcctccaggtgggacctgctgctagggtgatggcctacctcttcaccataataaactctctccagggcgtgttcatctttctggtttactgtctcctatctcaacaggttcgagagcagtacggcaaatggtctaagggtatcaggaagctaaaaaccgaaagtgaaatgcacacactctcttcatccgctaaagccgatacttctaagccatcgactgtgaactag

SEQ ID NO: 95892 - DNA, 720 bp, Artificial Sequence
  derived and/or modified sequence
atgggcggtagggttttcttggtcttcctcgccttttgtgtctggctgacactgcctggcgcagagacccaggattcacgcggatgcgccaggtggtgtcctcaggacagctcctgtgtcaatgccactgcctgcaggtgtaaccccggtttcagttcattcagcgagataatcaccaccccaatggagacctgcgacgatattaacgaatgcgccacacttagtaaagtgagctgtggcaaattttctgactgctggaataccgagggcagctatgattgtgtgtgtagccctgggtacgagccagtctccggcgctaagaccttcaaaaacgagagtgagaatacttgtcaggatgtggatgagtgccagcagaacccacgtctgtgtaagagctacggcacatgcgtcaatacactaggctcttacacctgccagtgtttgccaggattcaaactgaaaccagaggaccccaagctatgcaccgacgtcaacgaatgtaccagcggacagaacccttgccacagcagcactcactgtttaaacaacgtaggatcttaccaatgcagatgccggcctggatggcagcccatcccaggaagtccaaacggcccaaacaacactgtgtgcgaaggcagagaactgcgctctcatgtgcctagggatccccagacgtccgatcatatgttcaacggtgctcataccaatcaggctgaatag

SEQ ID NO: 95893 - DNA, 2298 bp, Artificial Sequence
  derived and/or modified sequence
atgggcggtagagttttcctggtgttcctggctttttgcgtgtggctgacactccccggagcagagacccaagattcaagaggctgcgccagatggtgcccccaggattcatcttgtgtgaatgcaaccgcctgtaggtgcaacccaggcttctctagttttagtgagatcattactacacccatggaaacctgtgatgatattaacgaatgtgctacactgtccaaggtgtcatgtggcaagttctcggattgctggaacaccgagggctcgtatgattgtgtgtgttcccccggatatgagcctgtctccggagcgaagacctttaaaaatgagtccgaaaacacttgccaggatgttgacgaatgtcagcagaatcccagactctgcaagtcttatgggacctgtgtgaacaccctgggaagttatacatgccagtgcctgccaggatttaagctgaaacccgaagatcccaaattatgtacagacgttaatgagtgtacctctggccagaacccttgtcattccagtactcattgtctcaacaacgtcgggagttatcagtgtcgctgccgtccaggctggcaaccgatccctggcagccctaacggcccaaacaatacagtttgtgaggatgtggacgaatgctcgagtggccagcaccaatgtgactccagtacagtatgctttaacaccgtgggctcttattcctgtcggtgtcgccctgggtggaaacctagacacggcatcccgaacaaccaaaaggacaccgtgtgtgaggatatgacatttagcacttggacaccaccgccaggggttcatagccagacattaagccgcttctttgacaaggtgcaagacttaggccgagactacaagccgggactggcaaataataccattcagagcattctccaggcactggatgaattgctggaggctcccggtgatctggaaacactgccaaggcttcaacaacattgtgttgctagccacctgctcgatggtctggaggatgtactccgcggtctgtctaagaacttgagcaacggcttgcttaacttctcatacccagcgggaacagagctgtctctggaagtgcagaaacaggtagacagaagcgttaccttaagacaaaatcaggccgtgatgcagttggactggaatcaggcccaaaaaagcggcgacccaggaccttctgtggtgggactagtctcaatccccggaatgggcaaattgctggctgaagctcccctggtgctcgaacctgaaaagcaaatgttactccacgagacccaccagggcctccttcaggatgggagtccgatactgctgagtgatgtgataagtgccttcctgtctaacaacgatactcaaaacctgtcttcccccgtgactttcactttctcccatcgcgaggaggatcctgtcctcactgtaatcacttatatggggctttccgtgtcgctgctatgcctactgctggcagcactgaccttcctcctctgtaaggcgatccagaacacctccactagcctacaccttcaactttccctgtgtctatttttagcacatctgctttttctagttgccattgaccagactggacacaaggtcctctgttctattattgctgggacgctgcactatctgtatctggcgacactgacttggatgctgctggaagccctttacctatttctaacagcccgaaatttaacagtagttaactactcaagcatcaaccgctttatgaaaaaactgatgtttccagtgggatatggtgtccccgcagttaccgttgctatttccgccgcttcccgcccacacttatacggcaccccttctagatgctggctgcagcctgagaagggattcatctggggattcctgggcccagtctgtgcaatattctctgttaatctcgtgctgtttcttgtgaccctatggattcttaagaacaggctcagcagccttaacagcgaagtcagtactcttcggaatacacgtatgctcgcgtttaaagctactgctcagctcttcattctaggatgcacctggtgtttaggcatcctgcaagttggaccagcagcaagggtgatggcctaccttttcacaattattaacagtctacagggggtcttcatattcctggtttattgtttgctgtcccagcaagtgcgcgaacagtatggaaaatggtcaaaggggattcgtaagctgaagactgagtcagagatgcataccttgagctccagtgccaaggccgacacctcaaaacccagtaccgtgaactag

SEQ ID NO: 95894 - protein, 311 aa, Artificial Sequence
  derived and/or modified sequence
MGKLQSKHAAAARKRRESPEGDSFVASAYASGRKGAEEAERRARDKQELPNGDPKEGPFREDQCPLQVALPAEKAEGREHPGQLLSADDGERAANREGPRGPGGQRLNIDALQCDVSVEEDDRQEWTFTLYDFDNCGKVTREDMSSLMHTIYEVVDASVNHSSGSSKTLRVKLTVSPEPSSKRKEGPPAGQDREPTRCRMEGELAEEPRVADRRLSAHVRRPSTDPQPCSERGPYCVDENTERRNHYLDLAGIENYTSRFGPGSQLCEKRSSAPRTHSGDKARGVGLCRELWSQAGHPQWPGPFPSGLVAV

SEQ ID NO: 95895 - DNA, 936 bp, Artificial Sequence
  derived and/or modified sequence
atgggcaagctgcagagcaagcacgccgccgccgccagaaagagaagagagagccccgagggcgacagcttcgtggccagcgcctacgccagcggcagaaagggcgccgaggaggccgagagaagagccagagacaagcaggagctgcccaacggcgaccccaaggagggccccttcagagaggaccagtgccccctgcaggtggccctgcccgccgagaaggccgagggcagagagcaccccggccagctgctgagcgccgacgacggcgagagagccgccaacagagagggccccagaggccccggcggccagagactgaacatcgacgccctgcagtgcgacgtgagcgtggaggaggacgacagacaggagtggaccttcaccctgtacgacttcgacaactgcggcaaggtgaccagagaggacatgagcagcctgatgcacaccatctacgaggtggtggacgccagcgtgaaccacagcagcggcagcagcaagaccctgagagtgaagctgaccgtgagccccgagcccagcagcaagagaaaggagggcccccccgccggccaggacagagagcccaccagatgcagaatggagggcgagctggccgaggagcccagagtggccgacagaagactgagcgcccacgtgagaagacccagcaccgacccccagccctgcagcgagagaggcccctactgcgtggacgagaacaccgagagaagaaaccactacctggacctggccggcatcgagaactacaccagcagattcggccccggcagccagctgtgcgagaagagaagcagcgcccccagaacccacagcggcgacaaggccagaggcgtgggcctgtgcagagagctgtggagccaggccggccacccccagtggcccggccccttccccagcggcctggtggccgtgtag

SEQ ID NO: 95896 - DNA, 936 bp, Artificial Sequence
  derived and/or modified sequence
atgggcaagttgcagtccaagcacgcagcagccgcaagaaagcggcgtgagtcccccgaaggcgacagctttgtcgcctcagcctacgcctccggtagaaagggagccgaggaagcagagcgaagggctagagataaacaagaactccccaacggcgacccaaaagagggcccgtttcgcgaggaccaatgtccactgcaggtcgccttgcccgccgaaaaagccgagggccgcgagcatccaggccagttactttccgctgatgacggcgagagggctgctaaccgagaggggccgcgaggtcctgggggccaaaggctgaacatcgacgccttgcagtgcgacgttagcgtggaagaagacgaccgccaggaatggacttttactctgtacgattttgataactgtggcaaagtgacaagggaggacatgagtagcctcatgcatactatctacgaagtcgtcgacgccagcgtcaatcattcaagcggaagcagcaaaacattgagggtgaaactgacagtgtctcccgaaccctcaagcaaacggaaggagggtcctccagccggtcaggacagggagccaacccgttgccgaatggagggagagctcgcggaggagccacgggtcgcggaccgaaggctaagtgctcacgtgcgaaggcctagtaccgacccacaaccatgttctgagagaggaccctactgcgtggatgagaacaccgaaagaagaaaccactacctggatctagctggcatcgagaattacacatccagatttggccccggcagccagctgtgtgagaaacgaagttctgccccccgcacacattcaggggacaaggccaggggcgtgggactgtgtcgggaactctggagccaggctggccatccgcagtggccagggcctttccccagcgggctggtggcagtttag

SEQ ID NO: 95897 - DNA, 936 bp, Artificial Sequence
  derived and/or modified sequence
atgggtaagctccagtccaagcacgctgccgccgccaggaagcgccgtgaatctccagagggcgatagtttcgtggcatctgcctacgcctccggacgaaagggtgcagaagaagcagagcgaagagccagggataagcaggagctgccaaatggggaccccaaggagggcccttttcgcgaggaccaatgtccactccaggtggctctgccagccgagaaggctgagggaagagaacaccccgggcagcttctttccgctgacgatggagagcgagcggcgaatagggagggaccacgcggtccagggggacagcggctgaatatcgacgcgttgcagtgcgatgtgtccgttgaagaagatgatcgccaggaatggacattcacattatacgacttcgacaactgtgggaaggtcacacgggaagacatgtccagcttgatgcacacaatctatgaagtggtggacgcctccgtgaatcacagctccggtagttcaaagacactgcgggtcaagcttaccgtttctcctgaaccttcctccaaaagaaaggaagggccccctgctggacaggacagggaacccacaagatgtaggatggaaggcgagcttgcagaggagccgcgtgtggctgatcgtcgactatccgcacatgttcgccggccgtctactgatccacagccctgttctgagcgcggaccatactgcgtggacgagaatacagagagaaggaaccactatctggatctggccggtattgaaaactacacgtctcggtttggtcctggctctcagctgtgcgagaagcggtcctcagctccccgaacacattccggcgataaagcacggggcgtgggactatgccgggaactctggagtcaggccggccatccacagtggcctggaccttttcccagtggattggtggccgtttag

SEQ ID NO: 95898 - DNA, 936 bp, Artificial Sequence
  derived and/or modified sequence
atgggcaagctgcagagcaagcatgctgctgctgccaggaagagaagagagagccctgagggggacagctttgtggccagcgcctatgccagcggcaggaaaggagctgaggaggccgagcggcgggcccgggacaagcaggagctgcccaatggagaccccaaggagggccccttccgggaggaccagtgccccctgcaggtggccctgcctgctgagaaggccgagggccgggagcaccctggccagctgctgtctgcagatgatggagagagagctgccaaccgggagggcccccggggccctgggggccagaggctgaacattgatgccctgcagtgtgatgtgtctgtggaggaggatgaccggcaggagtggaccttcaccctgtatgactttgacaactgtgggaaggtgacccgggaggacatgagcagcctgatgcacaccatctatgaggtggtggatgcctctgtgaaccacagcagcggcagcagcaagaccctgcgggtgaagctgactgtgtccccagagcccagcagcaagaggaaggagggccccccagctggccaggaccgggagcccacccgctgcaggatggagggggagctggccgaggagccccgggtggccgaccggcggctgagcgcccacgtgcggcggcccagcacagacccccagccctgcagcgagcggggcccctactgtgtggatgaaaatacagaaagaagaaaccactacctggacctggccggcatcgagaactacaccagccgcttcggccctggcagccagctgtgtgagaagaggagcagcgcccccaggacccacagcggggacaaggcccggggcgtgggcctgtgccgggagctgtggagccaggccggccacccccagtggccaggccccttccccagcggcctggtggccgtgtag

SEQ ID NO: 95899 - DNA, 941 bp, Artificial Sequence
  derived and/or modified sequence
cggcgatggggaaactgcagtcgaagcacgccgccgccgcccgcaagcggagagagagcccggaaggggacagcttcgtggcgtccgcgtacgcgagcggccgcaaaggcgcggaggaagcggagcggcgcgcgcgggacaagcaggagctgcccaatggggaccccaaggaggggcctttccgggaggaccagtgtcccctacaggtggcactccccgctgagaaagctgagggccgcgagcacccgggacaactcctcagcgcagatgacggagagagggcagcaaaccgcgagggcccgcgaggaccgggcgggcagcgcctcaacattgacgcactccagtgcgatgtctcggtggaggaggacgaccgccaggagtggacgttcacgctctatgactttgacaactgcgggaaggtcaccagggaggacatgtccagcctcatgcacaccatctatgaggtcgtggatgcctcggtcaaccactcctcgggcagcagcaagaccctccgtgtgaagctaaccgtcagccctgagccctccagcaagaggaaggagggtcctcctgctggccaggaccgggagcccacccgttgcaggatggagggtgaactggcagaggagccaagggtggctgacaggaggttgtctgcacacgtcaggaggcccagtactgacccccagccctgctcggagcgggggccctactgcgtggacgagaacacggagcgcagaaaccactacctggacctcgccgggattgagaactacacgtccagattcggccctgggtctcagctgtgcgagaagagaagctccgctcccaggacacacagtggggacaaggctagaggagtcggcctttgcagggagctgtggagccaggcaggtcacccacagtggccaggccccttcccttcagggctggtggccgtctga

SEQ ID NO: 95900 - DNA, 1940 bp, Artificial Sequence
  derived and/or modified sequence
gctcccggcccatgcggcccccgcgggctcccggccccggcttcagaactcagccctgcacctgagcgcggggcccggcggggcgtggcggcggcgatggggaaactgcagtcgaagcacgccgccgccgcccgcaagcggagagagagcccggaaggggacagcttcgtggcgtccgcgtacgcgagcggccgcaaaggcgcggaggaagcggagcggcgcgcgcgggacaagcaggagctgcccaatggggaccccaaggaggggcctttccgggaggaccagtgtcccctacaggtggcactccccgctgagaaagctgagggccgcgagcacccgggacaactcctcagcgcagatgacggagagagggcagcaaaccgcgagggcccgcgaggaccgggcgggcagcgcctcaacattgacgcactccagtgcgatgtctcggtggaggaggacgaccgccaggagtggacgttcacgctctatgactttgacaactgcgggaaggtcaccagggaggacatgtccagcctcatgcacaccatctatgaggtcgtggatgcctcggtcaaccactcctcgggcagcagcaagaccctccgtgtgaagctaaccgtcagccctgagccctccagcaagaggaaggagggtcctcctgctggccaggaccgggagcccacccgttgcaggatggagggtgaactggcagaggagccaagggtggctgacaggaggttgtctgcacacgtcaggaggcccagtactgacccccagccctgctcggagcgggggccctactgcgtggacgagaacacggagcgcagaaaccactacctggacctcgccgggattgagaactacacgtccagattcggccctgggtctcagctgtgcgagaagagaagctccgctcccaggacacacagtggggacaaggctagaggagtcggcctttgcagggagctgtggagccaggcaggtcacccacagtggccaggccccttcccttcagggctggtggccgtctgactgcagacttggctaacagactggcctcagggtcccctcctgtgcaagcaaagcaggagccccagggcagggcctcgcacctccaggcccggtcccgctcccaggagccagatacacatgccgtacaccaccgcaggtcacaggtgctggtggaacacgtcgtgccagcctcggagcctgctgcccgggccctggacacgcagccccggccgaaggggccggagaagcagttcctcaagtcccccaagggctccgggaagccgcctggggtgccagccagcagcaagtccgggaaagccttcagctactacctgccggccgtcctgccgccccaggcccctcaggacggccaccacctcccgcagcccccaccgccaccctacggccacaagcggtaccgccaaaagggcagggagggccactcgccactcaaggccccacacgctcagcctgccacagtggagcacgaggtggtgcgggacctgccgcccacgccagcaggagagggctacgcggtgccagtgatccagcggcacgagcaccaccaccaccacgagcaccaccaccaccaccaccaccaccacttccacccgtcctagcgccactgccaagcacacctcgctcccagcacaccacagcccgcgacctcagggcagggagcagagcagctgccggctgtgtgcccatggggagcccagcccccaccccccacctccgacagcaaacagcaactgactgcaggtgctggcatgatggaggtggtgcaccttggacacgtggacaaggcccaggcgccctctgctcttctgccctcgatgccacatggcggtgaacacatctgaagccactatgtttcctggctctaaggctcgtctgtgtaacccataaaacctgctttgattccaaaa

SEQ ID NO: 95901 - DNA, 936 bp, Artificial Sequence
  derived and/or modified sequence
atgggcaagctgcagagcaagcacgccgccgccgcccggaagcggagagaatctccggaaggagactcttttgttgcatccgcctacgcttctggccggaagggtgcagaggaggctgaacggcgggcgcgcgacaagcaagaacttccaaatggagaccccaaagagggtcccttcagagaggaccagtgcccacttcaggtggcactacccgcagagaaagctgaaggcagggagcacccaggccagctcctcagtgccgacgacggagagcgggccgcgaatcgagagggcccaagaggtcctggaggccaaaggttgaatattgatgcattgcagtgtgacgtgtccgtggaagaggatgatagacaggagtggacatttaccttatatgattttgacaattgtggtaaggtcacgcgggaggacatgagttctctcatgcatacaatctatgaggtcgtagacgctagcgtgaatcactccagtggaagctccaagacactccgagtgaaactgacagtgtcacccgagccctcaagcaaacgaaaggaaggaccgccagctggacaggaccgcgagccgacccgatgcaggatggagggtgagctggcagaggagccgcgcgtggcagaccggcggcttagcgctcacgttcgcagaccctcaacagacccgcagccttgttctgaacggggcccttattgtgtggacgaaaacacagagcgacgtaaccattacctggacctggcgggaatcgaaaactacacatctcggtttgggcctggatcacaactgtgcgagaaacggtcttccgcaccgcgcacacactctggtgataaggccagaggggtcggcttgtgccgcgagctatggagccaagccggtcaccctcagtggcctggaccttttccctccggcctggtggctgtgtag

SEQ ID NO: 95902 - DNA, 936 bp, Artificial Sequence
  derived and/or modified sequence
atgggcaagctgcagagcaagcacgccgccgccgcccggaagcggcgggagtcacccgagggggattctttcgtggctagcgcctacgccagtggccgtaaaggtgccgaggaggccgaaaggagggcaagggataagcaggaactcccaaacggtgatcccaaagaggggccttttagagaagaccagtgtcccctgcaggtggccctcccagcagaaaaggccgagggacgcgagcatcctggccagctcctctccgccgatgacggagagcgggccgctaaccgggaggggccacggggacctggcggacaacggctgaacatcgatgccttacagtgcgacgtgtccgttgaagaagatgaccgtcaggagtggactttcactctttacgactttgacaactgtggtaaggtaacacgcgaagatatgagcagtttgatgcatacgatatatgaggtagtggatgcgagcgtaaaccacagttcaggatcttccaaaacactgcgggtgaagttgactgtctccccagagccaagctccaagcgaaaggagggacctcctgccggacaggacagagaacctacgagatgccgcatggagggggaactggccgaagaaccacgggtggccgaccggcgcctgagcgctcacgtccggcggccgtccacagacccgcagccttgcagtgagaggggcccttactgcgtggatgaaaacaccgagcgtaggaatcattacctggacctcgctggcatcgaaaattacacctcccggtttggaccaggctctcagctttgcgaaaagcgaagtagtgctcctcgcactcacagtggcgataaagccagaggggtcggactctgccgtgaattatggtcccaggccggccatcctcagtggcccggcccattcccctctggcctggtggccgtgtag

SEQ ID NO: 95903 - DNA, 936 bp, Artificial Sequence
  derived and/or modified sequence
atggggaagctgcagagcaagcacgccgcagccgctagaaaacgccgagaatcacctgaaggagatagtttcgtggccagcgcctacgcgtccggaaggaagggagccgaggaagccgaaagaagagcacgcgataagcaagagctgcctaacggcgatccgaaggagggacccttccgcgaagatcagtgtccccttcaagttgctttgccggctgagaaggccgaaggccgagagcatccagggcagctgctttccgccgacgacggagagagagctgccaatcgggagggccctcggggacccggaggtcagcgactaaacatcgatgcactccagtgtgacgttagtgtggaggaagatgacagacaggagtggaccttcaccctttacgacttcgataattgcgggaaggttacgcgtgaagatatgagctccctgatgcacaccatttatgaggtcgtggatgcttccgtcaatcatagcagcggatccagtaagactcttagagtcaaattgacagtctcccccgagccctcctctaagcgcaaagagggaccgccagcaggacaagatagggaaccaacacgctgtcggatggaaggtgagttggctgaggagcctagggtggccgaccgccgactgtccgcccatgtccgcagaccttctaccgatccacagccatgctccgaaaggggcccttactgcgttgatgaaaacacggagcggcgaaaccactacctagaccttgctggcatcgaaaattatactagccgattcggaccagggtctcagctgtgtgagaaacgctcaagcgcacccagaactcactcaggagacaaagccagaggggttggactgtgtagagagttgtggtcccaggcgggacacccccagtggcccggaccctttccgagcggcctggtggcagtatag

SEQ ID NO: 95904 - DNA, 936 bp, Artificial Sequence
  derived and/or modified sequence
atgggcaaactgcagagtaagcacgctgccgctgcccgaaaacggagagaaagccctgaaggcgacagtttcgtggcgtctgcatatgcgagcggccgaaaaggcgctgaagaggccgaacgccgagccagggacaaacaggagctgccaaacggcgatccaaaggaggggcctttccgtgaagaccagtgcccgttacaagtggccttgcctgccgagaaggccgaaggcagagagcaccccggacagctgttgtccgctgacgatggagagcgcgcagcaaatagagagggcccacggggtccgggagggcaacgattgaatattgacgctctgcaatgtgacgtgtctgtggaggaagacgaccgccaagagtggacttttacactctacgatttcgacaattgtggtaaagtcacacgggaggacatgagctccttaatgcatactatatatgaggtggttgatgcaagcgtgaaccatagtagtggttcatccaagaccctccgggtcaaactgaccgtgtcccctgaaccctccagtaagaggaaagagggccctcccgctgggcaagatcgagaaccaacccggtgtcggatggagggcgagttggccgaagagccaagggttgccgatcgacgactaagcgcacacgttcggcgaccctccactgaccctcaaccttgctctgagagaggaccttattgcgtggacgaaaacactgagcgtcgaaatcactacctggatctcgcgggtatcgagaattataccagtaggttcgggcctggttcccagttgtgtgagaagcgcagttcggctccaaggactcattctggtgacaaagccaggggcgtgggactatgtagggagctttggagtcaggccggtcacccccaatggcccggaccattcccgtcaggcctggtcgccgtctag

SEQ ID NO: 95905 - protein, 375 aa, Artificial Sequence
  derived and/or modified sequence
MSLAGGRAPRKTAGNRLSGLLEAEEEDEFYQTTYGGFTEESGDDEYQGDQSDTEDEVDSDFDIDEGDEPSSDGEAEEPRRKRRVVTKAYKEPLKSLRPRKVNTPAGSSQKAREEKALLPLELQDDGSDSRKSMRQSTAEHTRQTFLRVQERQGQSRRRKGPHCERPLTQEELLREAKITEELNLRSLETYERLEADKKKQVHKKRKCPGPIITYHSVTVPLVGEPGPKEENVDIEGSLCFSLSFVLRLDPAPSVSALTPHAGTGPVNPPARCSRTFITFSDDATFEEWFPQGRPPKVPVREVCPVTHRPALYRDPVTDIPYATARAFKIIREAYKKYITAHGLPPTASALGPGPPPPEPLPGSGPRALRQKIVIK

SEQ ID NO: 95906 - DNA, 1128 bp, Artificial Sequence
  derived and/or modified sequence
atgagcctggccggcggcagagcccccagaaagaccgccggcaacagactgagcggcctgctggaggccgaggaggaggacgagttctaccagaccacctacggcggcttcaccgaggagagcggcgacgacgagtaccagggcgaccagagcgacaccgaggacgaggtggacagcgacttcgacatcgacgagggcgacgagcccagcagcgacggcgaggccgaggagcccagaagaaagagaagagtggtgaccaaggcctacaaggagcccctgaagagcctgagacccagaaaggtgaacacccccgccggcagcagccagaaggccagagaggagaaggccctgctgcccctggagctgcaggacgacggcagcgacagcagaaagagcatgagacagagcaccgccgagcacaccagacagaccttcctgagagtgcaggagagacagggccagagcagaagaagaaagggcccccactgcgagagacccctgacccaggaggagctgctgagagaggccaagatcaccgaggagctgaacctgagaagcctggagacctacgagagactggaggccgacaagaagaagcaggtgcacaagaagagaaagtgccccggccccatcatcacctaccacagcgtgaccgtgcccctggtgggcgagcccggccccaaggaggagaacgtggacatcgagggcagcctgtgcttcagcctgagcttcgtgctgagactggaccccgcccccagcgtgagcgccctgaccccccacgccggcaccggccccgtgaacccccccgccagatgcagcagaaccttcatcaccttcagcgacgacgccaccttcgaggagtggttcccccagggcagaccccccaaggtgcccgtgagagaggtgtgccccgtgacccacagacccgccctgtacagagaccccgtgaccgacatcccctacgccaccgccagagccttcaagatcatcagagaggcctacaagaagtacatcaccgcccacggcctgccccccaccgccagcgccctgggccccggcccccccccccccgagcccctgcccggcagcggccccagagccctgagacagaagatcgtgatcaagtag

SEQ ID NO: 95907 - DNA, 1128 bp, Artificial Sequence
  derived and/or modified sequence
atgagccttgcggggggaagggctccccggaaaaccgccggaaatcgtctttcaggtctgctggaagcggaggaagaggatgagttctatcaaaccacctatggtggttttacagaagaatcaggtgacgacgagtaccagggggaccagtccgacaccgaggatgaagtcgacagtgactttgacatcgatgaaggagacgagcccagttctgacggagaggcagaagagcccagacggaagaggcgtgtggtgaccaaagcttataaggagccactgaaatctctgaggccccgcaaggtcaataccccagccggcagttctcaaaaggcccgggaggagaaagccctgttaccgctggagctccaagacgacgggagcgactctaggaaatccatgcgccaaagtacagctgagcatacaagacaaacctttctgcgtgtccaggaacgccagggccagtcccgacgccgcaagggcccacattgcgaaagaccgctgacccaagaggaactgctgagagaagccaagataaccgaggagctgaatctcaggtccctcgagacatacgagagactcgaagccgacaaaaagaagcaggtgcacaagaaaagaaagtgtccaggaccgattataacataccactccgtgaccgtacccttagtcggcgagcccggccccaaagaagaaaacgtggatatcgagggtagcttatgcttctccctgtctttcgtgctccggttggacccagccccctctgttagcgctcttacccctcatgctgggaccgggcccgtgaatcccccggccagatgctccaggaccttcatcacatttagcgacgacgctacgtttgaggaatggtttcctcagggtagacccccaaaggttccagtaagggaagtttgccccgtaactcaccggccggccctctaccgagatccagttacagacattccctatgctaccgctcgcgccttcaaaattattcgcgaagcatataagaagtacataactgctcacgggctgccacccactgccagtgctctgggaccgggtcctccaccacccgagcccctgccaggatccggcccccgggccttgcgccagaagatagttattaaatag

SEQ ID NO: 95908 - DNA, 1128 bp, Artificial Sequence
  derived and/or modified sequence
atgagcctggccggcggccgggcccccaggaagacagctggcaaccggctgagcggcctgctggaggccgaggaggaggatgagttctaccagaccacctacggcggcttcacagaggagagcggagatgatgagtaccagggcgaccagagcgacacagaagatgaggtggacagcgactttgatattgatgaaggagatgagcccagcagtgatggagaggccgaggagcccaggaggaagagaagagtggtgaccaaggcctacaaggagcccctgaagagcctgcggcccaggaaggtgaacaccccagctggcagcagccagaaggcccgggaggagaaggccctgctgcccctggagctgcaggatgatggcagtgacagcaggaagtccatgaggcagagcacagctgagcacacccggcagaccttcctgcgggtgcaggagcggcagggccagagcagaagaaggaagggcccccactgtgagcggcccctgacccaggaggagctgctgcgggaggccaagatcacagaggagctgaacctgcggagcctggagacctatgaaaggctggaggccgacaagaagaagcaggtgcacaagaagaggaagtgccccggccccatcatcacctaccacagcgtgacagtgcccctggtgggggagcccggccccaaggaggagaatgtggacatcgagggcagcctgtgcttcagcctgagctttgtgctgcggctggaccctgcccccagcgtgtctgccctgacccctcatgctggcactggacctgtgaaccccccagcccgctgcagcaggaccttcatcaccttcagtgatgatgccacctttgaggagtggttcccccagggccggccccccaaggtgcctgtgcgggaggtgtgccctgtgacccacaggcctgccctgtacagagatcctgtgacagacatcccctatgccacagcccgggccttcaagatcatccgggaggcctacaagaagtacatcacagcccacggcctgcccccaacagccagcgccctgggccctggccccccacctcctgagcccctgcccggcagcggcccccgggccctgcggcagaagatcgtcatcaagtag

SEQ ID NO: 95909 - DNA, 1128 bp, Artificial Sequence
  derived and/or modified sequence
atgagcctggccggcggccgggccccccggaagaccgccggcaacagactcagcgggctcctggaggccgaagaggaagacgagttttatcagaccacctacgggggcttcactgaggagagcggggacgacgaataccagggtgatcagtctgatactgaggacgaggtggacagtgatttcgatatagacgaaggagatgagccctcctcagacggagaggctgaggaaccccgtcgaaagagaagggttgttaccaaagcgtataaagagcccctgaagtcattgcggccccggaaggttaatacacctgccggatcctctcagaaggccagggaagagaaagctctactccctcttgaactccaggacgacggaagcgattctcgtaaaagcatgcgccagagcacggccgagcatactcggcaaacttttcttagagtgcaggaaaggcaggggcagagtcggcgaagaaagggcccccattgcgagcgccccctgacacaggaggagctgctgagggaggccaagataacggaagagttgaatctgcgcagcttggagacgtatgaacgacttgaagcagacaaaaagaaacaggtgcataaaaaaagaaaatgccctggaccaataattacatatcactcggttactgtgcccctagtgggagagccaggcccaaaagaggagaacgtggatatcgagggaagcctctgtttcagtctcagtttcgtactgaggttagacccagctccttccgtgtccgcactcacgccccatgctgggacaggtcctgtgaacccacctgctcgatgttcccggacttttatcaccttttctgacgatgctaccttcgaagaatggtttccccaaggcaggcctccaaaggtgcccgtgcgtgaggtgtgtcctgtgactcatcggccagctttatacagggatccggtcaccgatataccctacgctacagccagagctttcaaaattatccgggaagcctacaagaaatatattaccgcccacgggctccctccaacagccagcgccctgggcccaggtccaccgccacctgaacccttgccgggttccgggccccgggcgctgagacaaaagatcgtcatcaaatag

SEQ ID NO: 95910 - DNA, 1128 bp, Artificial Sequence
  derived and/or modified sequence
atgtcccttgccggtggcagagctcccaggaaaactgctgggaatcgcttgtcgggactacttgaagctgaggaagaagacgaattctatcagacaacctatggcggtttcacagaggagtcaggggacgacgagtatcagggagatcagtccgacaccgaggacgaggtggattccgatttcgatatcgacgagggcgacgaaccatcctctgacggcgaagccgaggaacccagacgtaaaaggcgcgttgtcactaaagcctacaaagagcctctaaaaagcctgaggccaagaaaggtgaacacccccgcaggatccagtcagaaagcgagggaggaaaaggcactcctacccctcgaattacaggatgatggctctgactctagaaaatccatgcgtcaatccacggccgagcacacccgacagacctttcttcgcgttcaggagcgacaggggcagtcgaggcgacggaagggccctcactgcgagcgcccactgactcaggaagagttgctccgggaggccaaaatcaccgaggaactgaacctgagatcattggagacctatgaaagactggaagccgataagaagaagcaggtacataagaaacgcaagtgccctggcccaatcataacataccattccgttactgtccctctcgtcggagagcctggccctaaggaggagaatgtcgacatcgagggttctttatgtttcagcttgtcttttgtgctgaggcttgatccggcaccttcagtatccgccttgacaccacatgctgggaccggccctgtgaatcctcccgctagatgctctaggaccttcatcacgttttcagatgatgccaccttcgaggagtggtttccacagggtaggccgccaaaagttcccgtgcgcgaagtgtgcccagtgacacacagacccgctctctatagagatcctgttaccgacataccctacgccaccgccagagcattcaaaatcatcagagaggcatataagaaatatatcacagcccatggtctgcccccaaccgcttcagcattaggtcccggaccccctccaccagagccactgcctggttctggtccgagggcccttaggcagaagatcgtcatcaagtag

SEQ ID NO: 95911 - DNA, 1347 bp, Artificial Sequence
  derived and/or modified sequence
aggggctgcaggtggcggcgcagtctcggtaggcggtatgagtttggctgggggccgggcaccccggaagaccgctgggaaccggctttctgggcttttggaggcagaggaggaagatgagttctaccagacgacttatgggggtttcacagaggaatccggagatgatgagtatcaaggggaccagtcagacacagaggacgaagtggactctgactttgacattgatgaaggggatgaaccatccagtgatggagaagcagaagagccaagaaggaagcgccgagtagtcaccaaggcctataaggaacctctcaagagcttaaggcctcgaaaggtcaacaccccggctggtagctctcagaaggcgcgagaagagaaggcactactgccattagaactacaagatgacggctctgacagtcggaagtctatgcgtcagtctacagctgagcatacacgacaaacgttccttcgggtacaggagaggcagggccagtcaagacggcgaaaggggccccactgtgagcggccactaacccaggaggaactgctccgggaggccaagatcacagaagagcttaatttacggtcactggagacatatgagcggctcgaggctgataaaaagaagcaggttcataagaagcggaagtgccccgggcccataatcacctatcattcagtgacagtgccacttgttggggagccaggccccaaggaagagaacgttgacatagaaggctctttgtgtttttccttgtcttttgtcctcagacttgatcctgctccctcggtgtctgcattgactcctcatgctgggactggacccgtcaacccccctgctcgctgctcacgtaccttcatcacttttagtgatgatgcaactttcgaggaatggttcccccaagggcggcccccaaaagtccctgttcgtgaggtctgtccagtgacccatcgtccagccctataccgggaccctgttacagacataccctatgccactgctcgagccttcaagatcattcgtgaggcttacaagaagtacattactgcccatggactgccgcccactgcctcagccctgggccccggcccgccacctcctgagcccctccctggctctgggccccgagccttgcgccagaaaattgtcattaaatgaagagatgtctagtcctcagaaacttctttcctgccctgattggggctcttgctgttccgtttcttctccctgcttctcccctttgtcatctctgatctttgcctaatctgtttctttttccttttcccctagttcttacaggtttcgttgtgttttttaatctaataaaatagaaagatccc

SEQ ID NO: 95912 - protein, 499 aa, Artificial Sequence
  derived and/or modified sequence
MENGQSTAAKLGLPPLTPEQQEALQKAKKYAMEQSIKSVLVKQTIAHQQQQLTNLQMAAQRQRALAIMCRVYVGSIYYELGEDTIRQAFAPFGPIKSIDMSWDSVTMKHKGFAFVEYEVPEAAQLALEQMNSVMLGGRNIKVGRPSNIGQAQPIIDQLAEEARAFNRIYVASVHQDLSDDDIKSVFEAFGKIKSCTLARDPTTGKHKGYGFIEYEKAQSSQDAVSSMNLFDLGGQYLRVGKAVTPPMPLLTPATPGGLPPAAAVAAAAATAKITAQEAVAGAAVLGTLGTPGLVSPALTLAQPLGTLPQAVMAAQAPGVITGVTPARPPIPVTIPSVGVVNPILASPPTLGLLEPKKEKEEEELFPESERPEMLSEQEHMSISGSSARHMVMQKLLRKQESTVMVLRNMVDPKDIDDDLEGEVTEECGKFGAVNRVIIYQEKQGEEEDAEIIVKIFVEFSIASETHKAIQALNGRWFAGRKVVAEVYDQERFDNSDLSA

SEQ ID NO: 95913 - protein, 516 aa, Artificial Sequence
  derived and/or modified sequence
MENGQSTAAKLGLPPLTPEQQEALQKAKKYAMEQSIKSVLVKQTIAHQQQQLTNLQMAAVTMGFGDPLSPLQSMAAQRQRALAIMCRVYVGSIYYELGEDTIRQAFAPFGPIKSIDMSWDSVTMKHKGFAFVEYEVPEAAQLALEQMNSVMLGGRNIKVGRPSNIGQAQPIIDQLAEEARAFNRIYVASVHQDLSDDDIKSVFEAFGKIKSCTLARDPTTGKHKGYGFIEYEKAQSSQDAVSSMNLFDLGGQYLRVGKAVTPPMPLLTPATPGGLPPAAAVAAAAATAKITAQEAVAGAAVLGTLGTPGLVSPALTLAQPLGTLPQAVMAAQAPGVITGVTPARPPIPVTIPSVGVVNPILASPPTLGLLEPKKEKEEEELFPESERPEMLSEQEHMSISGSSARHMVMQKLLRKQESTVMVLRNMVDPKDIDDDLEGEVTEECGKFGAVNRVIIYQEKQGEEEDAEIIVKIFVEFSIASETHKAIQALNGRWFAGRKVVAEVYDQERFDNSDLSA

SEQ ID NO: 95914 - DNA, 1500 bp, Artificial Sequence
  derived and/or modified sequence
atggagaatggacagtcaacggccgcaaagttggggttacctccactcactcccgaacaacaggaggcactccagaaagctaagaaatacgccatggagcagtccattaaatctgtactcgtaaagcaaaccattgcgcaccaacagcagcagttaacgaacctgcagatggccgcacagaggcagcgggccctcgctataatgtgccgcgtatacgtaggctccatctactacgaattgggcgaggacacaattcgtcaggcttttgctccattcggcccaattaagtcaattgacatgagttgggactcagtcaccatgaagcacaagggcttcgcttttgtcgagtacgaggtccccgaggccgcgcagttggcgctggaacagatgaactctgtcatgctcggcggtcgaaatatcaaggttggaagaccatccaatattgggcaggctcagcctatcatcgaccagctcgcagaggaggccagggcgtttaataggatatacgtggcctcggtacaccaggacctttccgacgatgacataaaatcggtgtttgaagcctttggtaagatcaaatcctgcacacttgctcgcgacccaacgaccggtaagcataagggatatggattcatagagtatgaaaaggcccagagtagccaggacgctgtctcatccatgaacctgttcgatttaggggggcagtacctaagagtagggaaggccgtgactcctccaatgccattgctgacgccagccacacccggtgggctcccgcctgcagccgccgtcgcagcagccgcagcaaccgcaaaaattacagcacaagaagctgtggcaggcgccgcagtgctcggaaccctcgggacgccaggcctggtcagccctgcactcaccttggcccaacccctggggacactgccccaggccgtaatggcagcccaggccccaggcgtcatcactggtgtcacccccgcccgtcccccaatcccagtgacaattccctcagtcggtgttgttaatccaatcctggcctccccacctacactcggcctgctcgagccaaagaaagagaaggaagaggaggagttattccccgagagcgagcgtcctgaaatgctgagtgagcaggagcacatgagtataagcggatcaagcgccaggcatatggttatgcagaagctccttcggaagcaagagagcacagtaatggtcctaagaaacatggtggacccgaaggacatagacgacgatttggaaggcgaagtgaccgaggagtgcggcaaatttggggccgtgaaccgggtaatcatttatcaggagaaacagggcgaagaggaagatgccgaaatcatcgtcaagattttcgtcgaattcagtattgcttccgaaacacacaaggcaatacaagctctaaacggaaggtggttcgccggtcgcaaggtcgtggccgaggtgtacgaccaggagcggttcgacaattcagacctgagtgcttag

SEQ ID NO: 95915 - DNA, 1500 bp, Artificial Sequence
  derived and/or modified sequence
atggagaatggccagagcacagctgccaagctgggcctgccccccctgaccccagagcagcaggaggccctgcagaaggccaagaagtatgccatggagcagagcatcaagtctgtgctggtgaagcagaccatcgcccaccagcagcagcagctgaccaacctgcagatggccgcccagaggcagagggccctggccatcatgtgccgggtgtatgtgggcagcatctactatgagctgggggaggacaccatccggcaggcctttgcccccttcggccccatcaagagcattgacatgtcctgggacagcgtgaccatgaagcacaagggctttgcctttgtggagtatgaggtgcctgaggccgcccagctggccctggagcagatgaacagcgtgatgctgggcggcaggaacatcaaggtgggccggcccagcaacatcggccaggcccagcccatcatcgaccagctggccgaggaggcccgggccttcaaccgcatctacgtggcctctgtgcaccaggacctgagtgatgatgacatcaagtctgtgtttgaggccttcggcaagatcaagagctgcaccctggcccgggaccccaccaccgggaagcacaagggctacggcttcatcgagtatgagaaggcccagagcagccaggatgctgtgtcctccatgaacctgtttgacctgggcggccagtacctgcgggtgggcaaggctgtgaccccacccatgcccctgctgaccccagccaccccaggcggcctgcccccagctgctgctgtggccgctgctgctgccacagccaagatcacagcccaggaggccgtggccggggctgctgtgctgggcaccctgggcaccccaggcctggtgtccccagccctgaccctggcccagcccctgggcaccctgccccaggccgtgatggccgcccaggcccctggggtcatcactggagtgaccccagcccggccccccatccctgtgaccatccccagcgtgggcgtggtgaaccccatcctggccagcccccccaccctgggcctgctggagcccaagaaggagaaggaggaggaggagctgtttcctgagagcgagaggcctgagatgctgtctgagcaggagcacatgagcatcagcggcagcagcgcccggcacatggtgatgcagaagctgctgaggaagcaggagagcacagtgatggtgctgaggaacatggtggaccccaaggacattgatgatgacctggagggggaggtgacagaggagtgtgggaagtttggagctgtgaacagagtcatcatctaccaggagaagcagggcgaggaggaggatgctgagatcatcgtgaagatctttgtggagttcagcatcgccagcgagacccacaaggccatccaggccctgaatggccgctggtttgctggcaggaaggtggtggccgaggtgtatgaccaggagagatttgacaacagcgacctgagcgcctag

SEQ ID NO: 95916 - DNA, 1500 bp, Artificial Sequence
  derived and/or modified sequence
atggagaacggccagagcaccgccgccaagctgggcctgccccccctcaccccagaacagcaagaagctctacagaaggccaaaaaatatgcaatggaacaaagcatcaagtcagtactagtcaagcaaacaatcgcccatcaacagcagcagctgactaatttacagatggccgctcagaggcagagagctttggctataatgtgcagagtgtatgttggatctatctactatgaactgggagaggacacaataagacaggcattcgccccatttgggccgatcaaatctatcgatatgagttgggactcagtgactatgaaacataaggggtttgcctttgtggagtacgaggttcccgaggcagcgcaacttgccctcgaacagatgaacagcgtgatgctaggcggccggaatatcaaggtggggagaccgagcaacataggccaggcacagccaatcatagatcagttagccgaggaagcacgagcattcaacagaatctacgtggcctcggtacatcaagacttgtccgacgacgatatcaaatccgtgtttgaggccttcgggaaaattaaatcttgtacgttggctcgcgatcctactaccggtaaacacaagggttatgggttcatcgaatacgagaaagctcagagctcccaggacgcagtgtcttcgatgaacttgttcgatttaggtggacagtacctcagggtcggaaaagctgtaacgccgcccatgccactgttaacacccgccacccctgggggcctgccaccggccgccgccgtggccgccgcagccgctactgccaagattacagcccaggaggcagttgctggcgctgctgttctgggcaccttagggacccctgggctggtctctcccgcgctcaccctcgcacagcctctcggcactcttcctcaggccgtcatggccgctcaggcccctggtgttattactggagttacccctgcgaggcccccaatccctgtcacgatcccatccgtaggcgttgtaaatccaattttggctagccctcccacgttgggactcctggagcctaagaaggaaaaagaagaggaggagctttttcctgagtctgaaaggcccgagatgctcagcgagcaggagcacatgtccatttccgggtcctctgcccggcatatggtgatgcagaagttgctacgaaaacaggagtcaacggtgatggtgctacggaacatggtggatccaaaagatattgacgatgacttagaaggcgaagtaaccgaggagtgtgggaagttcggcgctgtcaatcgagtgataatctaccaggaaaaacagggcgaagaggaggatgccgagatcatcgtcaaaatatttgtcgagttctccatcgcatccgagacgcacaaagcaattcaggcgttgaatggccgctggtttgctggccgcaaagtcgtggccgaggtttacgatcaggagcgattcgataatagcgatctctccgcttag

SEQ ID NO: 95917 - DNA, 1500 bp, Artificial Sequence
  derived and/or modified sequence
atggaaaacggccagtctaccgctgccaaattaggactgccaccactgactcccgaacagcaggaagctcttcaaaaggccaaaaagtacgctatggagcagtctatcaagagcgtgcttgtgaaacagaccatcgctcaccagcagcagcagctgacaaatctgcagatggccgcacagaggcaacgtgctctggccatcatgtgtcgggtgtacgtcggctctatttactatgaactcggggaagacaccattagacaagcattcgccccttttggcccaattaagtcaattgatatgagttgggatagcgtcactatgaagcacaagggcttcgccttcgttgagtatgaagtgcctgaggcagcccaactggcacttgagcagatgaactccgttatgcttggcggacggaatatcaaggttggcaggccttccaacattgggcaggctcagccaataatcgatcagctggcagaggaggccagggcattcaatcgtatctacgtagcttccgtccatcaggacctcagtgacgacgatattaagagcgtctttgaagcttttgggaagatcaaaagctgcactctagcacgagaccccaccacgggcaaacacaaaggctacggtttcatcgagtatgagaaggcccaatcatcacaggacgcggtctcgagtatgaacttgtttgacctcgggggacaatacctgagagtcggcaaagctgtcactcctcctatgcctcttcttacacccgcaactccaggcggattgcccccagcagctgcggtcgccgctgcagcagcaacagccaagatcacagcacaggaagctgtggctggggctgcagtgctgggcaccctggggacccccggacttgtcagcccagctctcaccttggcccaacctctcgggactctgccacaagccgttatggccgctcaggctcccggagtaatcactggtgttaccccagccagaccaccgatccctgtgaccattcccagcgtaggtgtggtcaacccgatcctcgccagtccgcctacactcgggttgctcgagcccaagaaggaaaaagaggaagaagagctctttcccgagtccgagcgacctgagatgctgtcagaacaagagcacatgtctatcagcggctctagcgcccgacacatggtgatgcagaagttgctgcgcaagcaggagtcaacagtaatggtgctgaggaacatggtggatcccaaggacatcgatgacgacctggagggcgaggtcaccgaagaatgcggtaaattcggtgctgtgaacagagtcatcatctaccaggaaaagcagggagaggaggaggacgcggaaattatagtgaaaatttttgtggaattctcaatagcttcggaaacccataaggcaatccaagccctaaatggtcgatggtttgccggtagaaaggttgtggccgaggtctacgaccaggagcgctttgacaactccgacttgtcagcctag

SEQ ID NO: 95918 - DNA, 1500 bp, Artificial Sequence
  derived and/or modified sequence
atggagaacggccagagcaccgccgccaagctgggcctgccccccctgacccccgagcagcaggaggccctgcagaaggccaagaagtacgccatggagcagagcatcaagagcgtgctggtgaagcagaccatcgcccaccagcagcagcagctgaccaacctgcagatggccgcccagagacagagagccctggccatcatgtgcagagtgtacgtgggcagcatctactacgagctgggcgaggacaccatcagacaggccttcgcccccttcggccccatcaagagcatcgacatgagctgggacagcgtgaccatgaagcacaagggcttcgccttcgtggagtacgaggtgcccgaggccgcccagctggccctggagcagatgaacagcgtgatgctgggcggcagaaacatcaaggtgggcagacccagcaacatcggccaggcccagcccatcatcgaccagctggccgaggaggccagagccttcaacagaatctacgtggccagcgtgcaccaggacctgagcgacgacgacatcaagagcgtgttcgaggccttcggcaagatcaagagctgcaccctggccagagaccccaccaccggcaagcacaagggctacggcttcatcgagtacgagaaggcccagagcagccaggacgccgtgagcagcatgaacctgttcgacctgggcggccagtacctgagagtgggcaaggccgtgaccccccccatgcccctgctgacccccgccacccccggcggcctgccccccgccgccgccgtggccgccgccgccgccaccgccaagatcaccgcccaggaggccgtggccggcgccgccgtgctgggcaccctgggcacccccggcctggtgagccccgccctgaccctggcccagcccctgggcaccctgccccaggccgtgatggccgcccaggcccccggcgtgatcaccggcgtgacccccgccagaccccccatccccgtgaccatccccagcgtgggcgtggtgaaccccatcctggccagcccccccaccctgggcctgctggagcccaagaaggagaaggaggaggaggagctgttccccgagagcgagagacccgagatgctgagcgagcaggagcacatgagcatcagcggcagcagcgccagacacatggtgatgcagaagctgctgagaaagcaggagagcaccgtgatggtgctgagaaacatggtggaccccaaggacatcgacgacgacctggagggcgaggtgaccgaggagtgcggcaagttcggcgccgtgaacagagtgatcatctaccaggagaagcagggcgaggaggaggacgccgagatcatcgtgaagatcttcgtggagttcagcatcgccagcgagacccacaaggccatccaggccctgaacggcagatggttcgccggcagaaaggtggtggccgaggtgtacgaccaggagagattcgacaacagcgacctgagcgcctag

SEQ ID NO: 95919 - DNA, 1500 bp, Artificial Sequence
  derived and/or modified sequence
atggagaacggccagagcacagccgcgaagctgggtctccccccactcacaccagaacagcaggaggcgctccagaaggccaaaaagtacgctatggagcagagtatcaagagtgtgttagtgaaacaaactatcgctcatcagcaacaacagcttacgaatttgcaaatggccgctcagaggcagcgggccctcgctataatgtgcagagtttacgtcggctcaatctactatgagctcggggaggataccatacggcaagcctttgcccctttcggtccaataaaaagcatagacatgtcatgggatagcgtgacaatgaaacataaggggttcgctttcgtagaatatgaagtacctgaggctgcacagcttgcgctcgagcagatgaatagtgttatgcttgggggaagaaatattaaggtcggtaggccctccaacatcgggcaagcccagccaattatcgatcaattagctgaggaagcccgtgcattcaataggatttatgtagcgagcgtccaccaagacttgagcgatgacgatataaagagcgtattcgaggcctttgggaaaattaagtcatgcaccttggcacgagaccccacaacagggaagcacaagggctacgggtttattgaatatgaaaaggcacaatcctctcaggatgctgtctctagtatgaacctttttgaccttggcggacagtatctgagagtgggtaaagccgtgacaccccccatgccgttactcacgccggcgacaccaggtggtctgccgcccgccgctgctgtggccgcagctgccgctacggcgaagattaccgcccaagaagctgttgctggagctgcagtacttgggacacttggcactcccggcctggtgagtcctgccctgaccctcgcacaaccactcggaaccctaccgcaggcggtgatggccgcacaagctcctggcgtcattactggtgttacacctgccagacctcctattccagtcactatcccttcagtaggggttgtgaaccccattctggcaagtccaccaacactaggcttattggaacccaaaaaggaaaaggaagaggaggaacttttcccagaatccgaaaggcccgaaatgctgtccgagcaagagcacatgagcattagcgggagctcagcccggcatatggtaatgcagaaactgctgcgtaagcaggaatcaacagtgatggttctgcgcaacatggtcgaccctaaagatatcgacgacgacctcgagggtgaggtgaccgaggagtgtgggaagtttggcgcagtgaatcgagtgattatctatcaggagaagcagggagaggaggaagacgccgaaataatcgtaaaaatatttgtcgagttttctatcgcctcagagacacacaaggcaatccaggctcttaacgggagatggttcgcagggcggaaggtcgtggccgaagtgtacgatcaggagcgtttcgacaattccgatttgtccgcgtag

SEQ ID NO: 95920 - DNA, 1500 bp, Artificial Sequence
  derived and/or modified sequence
atggagaacggccagagcaccgccgccaagctgggcctgccccccttgactccagagcagcaggaggcactccaaaaggccaagaaatatgccatggaacagtccattaaatcagttctggtgaagcaaacaattgcccatcagcagcagcaactgactaatctccaaatggcagctcagcgacagagggctctggctatcatgtgccgtgtctatgtgggtagcatttattacgagcttggagaagatacgattaggcaagcgtttgccccatttggtccgatcaagtctatcgacatgagctgggactcggttaccatgaagcacaaaggattcgcctttgtagaatacgaggtgccggaggccgcccaacttgccttggagcaaatgaactctgtgatgctgggaggacggaacataaaagtcggacggccatctaatatagggcaggcccagcccattattgatcaactggccgaggaggctcgggcgtttaatcgcatctatgttgctagcgtgcatcaggatctcagcgacgacgatatcaaatctgttttcgaggcctttggcaagatcaagtcttgtacacttgcgcgagacccaaccactggaaaacacaaaggctacggtttcatcgagtatgaaaaggcccagtccagtcaggatgcagtcagctcgatgaacttgtttgacctcggtggacagtatctgcgcgtaggcaaggctgttacaccacccatgcccttgcttactccagccactcctgggggactgccgcccgcagccgccgtggccgcagccgctgctaccgccaagatcactgcacaggaagccgtggccggcgcagcagtgctaggaactctggggacccccggactggtgtcacctgctctgaccctggcccagcctctcgggaccctgcctcaggctgtgatggccgcccaggcccctggggtcatcacaggggttacccccgcccggccgccaatcccagtgaccatacctagtgttggtgtagtgaaccccatactcgcctcgcctccaacgctcgggctgttggaacctaagaaagagaaggaagaagaggagctgttccccgaaagcgaacggcccgaaatgctctctgaacaggaacacatgtccatatctggttctagcgctcggcacatggtgatgcaaaagttattgaggaagcaagaaagcaccgttatggttctgcggaatatggtggacccgaaagatatagatgatgatttggagggagaggttactgaggagtgtgggaagttcggcgctgtgaacagggttataatttaccaggagaagcagggggaagaagaggacgccgagattatcgtgaaaatcttcgttgagttctccattgcttccgagacacataaagcgattcaagctctcaacggaaggtggttcgctggcaggaaagttgtcgccgaagtttatgatcaggagagatttgacaacagcgatttgtcagcttag

SEQ ID NO: 95921 - DNA, 1500 bp, Artificial Sequence
  derived and/or modified sequence
atggagaacggtcagtctacagccgcaaaactaggtctgcctccactaaccccggagcagcaggaggccttacagaaggcaaagaagtacgcaatggagcaaagtataaagtcggtcctagtcaagcaaacaatcgcacatcaacagcaacagcttacaaatctgcagatggcggctcagaggcaaagggccctggccattatgtgtagagtatacgtgggctcaatatactacgagctgggtgaagatacaatcagacaggcctttgctccattcgggcctattaagagtatcgatatgtcgtgggatagcgtaacaatgaaacataaggggttcgccttcgtcgagtatgaagtgcccgaagcagcacaactggccttagagcaaatgaacagtgtgatgctggggggtcgcaatattaaagtgggacgcccaagtaacatcggccaggcacagccaataatagatcagttagctgaagaggctagggcatttaaccggatctatgtagcatctgtacaccaggatctttcggacgacgatataaagtcagtgtttgaggcctttggaaagattaagtcctgcactctggctagagatcccactacaggtaaacacaaaggctacggattcattgagtacgaaaaagcccaatcatcccaggacgccgtctcctcaatgaatctcttcgatcttgggggacaatacctgcgcgtgggcaaggccgtaacccctcccatgccattgttgacccctgccacacccggtgggcttccgcctgccgctgctgttgcggcagccgcagcaacagccaagattacagcccaagaagcggtggcaggggctgccgtcctgggaaccttgggtacccctggcctcgtgagccctgccctcactttggcccagcccctaggcaccttgccacaggctgtgatggcggctcaggccccaggtgtcattaccggagtgacgccagcacggcctccaataccggtgacaattccatctgttggcgttgtcaatccgatcttggcatcaccacctactttgggactgctggaacccaaaaaggagaaggaggaagaggaactctttcccgaatccgaacgtccagaaatgctctctgagcaggagcacatgtctattagtgggtctagtgctcggcacatggtcatgcagaagctgcttcggaagcaagagtccaccgtgatggtcctgcgcaacatggttgaccctaaggatatcgacgacgacctagagggggaggtgactgaggagtgcggcaaatttggcgctgtgaaccgggttataatctaccaggaaaagcagggcgaggaagaagatgccgaaatcatcgtgaaaatcttcgtggaattctcgattgcttcagaaactcataaagcaatccaggccctgaatgggcgatggtttgctggacggaaggtagttgcagaagtgtatgatcaggagcgatttgacaactcagacctctctgcctag

SEQ ID NO: 95922 - protein, 331 aa, Artificial Sequence
  derived and/or modified sequence
MRGYLVAIFLSAVFLYYVLHCILWGTNVYWVAPVEMKRRNKIQPCLSKPAFASLLRFHQFHPFLCAADFRKIASLYGSDKFDLPYGMRTSAEYFRLALSKLQSCDLFDEFDNIPCKKCVVVGNGGVLKNKTLGEKIDSYDVIIRMNNGPVLGHEEEVGRRTTFRLFYPESVFSDPIHNDPNTTVILTAFKPHDLRWLLELLMGDKINTNGFWKKPALNLIYKPYQIRILDPFIIRTAAYELLHFPKVFPKNQKPKHPTTGIIAITLAFYICHEVHLAGFKYNFSDLKSPLHYYGNATMSLMNKNAYHNVTAEQLFLKDIIEKNLVINLTQD

SEQ ID NO: 95923 - DNA, 750 bp, Artificial Sequence
  derived and/or modified sequence
ggcgctcggcgcagtcgcccgggattggggctggcgggagcctgagactccggccatgagagggtatcttgtggccatattcctgagtgctgtcttcctctattatgtactgcattgcatattatggggaacgaatgtctattgggtggcacctgtggaaatgaaacggagaaataagatccagccttgtttatcaaagccagcttttgcctctctgctgaggtttcatcagtttcacccttttctgtgtgcggctgattttagaaagattgcttccttgtatggtagcgataagtttgatttgccctatgggatgagaacatcagcggaatattttcgacttgctctttcaaaactgcagagttgtgatctctttgatgagtttgacaacataccctgtaaaaagtgtgtggtggttggtaatggaggagttttgaagaataagacattaggagaaaaaatcgactcctatgatgtaataataagaatgaataatggtcctgttttaggacatgaagaagaagttgggagaaggacaaccttccgacttttttatccagaatctgttttttcagatcctattcacaatgaccctaatacgacagtgattctcactgcttttaagccacatgatttaaggtggctgttggaattgttgatgggtgacaaaataaacactaatggtttttggaagaaaccagccttaaacctgatttataaaccttatcaaatccgaatattagatccttt

SEQ ID NO: 95924 - protein, 231 aa, Artificial Sequence
  derived and/or modified sequence
MRGYLVAIFLSAVFLYYVLHCILWGTNVYWVAPVEMKRRNKIQPCLSKPAFASLLRFHQFHPFLCAADFRKIASLYGSDKFDLPYGMRTSAEYFRLALSKLQSCDLFDEFDNIPCKKCVVVGNGGVLKNKTLGEKIDSYDVIIRMNNGPVLGHEEEVGRRTTFRLFYPESVFSDPIHNDPNTTVILTAFKPHDLRWLLELLMGDKINTNGFWKKPALNLIYKPYQIRILDP

SEQ ID NO: 95925 - DNA, 996 bp, Artificial Sequence
  derived and/or modified sequence
atgagaggctacctggtggccatcttcctgagcgccgtgttcctgtactacgtgctgcactgcatcctgtggggcaccaacgtgtactgggtggcccccgtggagatgaagagaagaaacaagatccagccctgcctgagcaagcccgccttcgccagcctgctgagattccaccagttccaccccttcctgtgcgccgccgacttcagaaagatcgccagcctgtacggcagcgacaagttcgacctgccctacggcatgagaaccagcgccgagtacttcagactggccctgagcaagctgcagagctgcgacctgttcgacgagttcgacaacatcccctgcaagaagtgcgtggtggtgggcaacggcggcgtgctgaagaacaagaccctgggcgagaagatcgacagctacgacgtgatcatcagaatgaacaacggccccgtgctgggccacgaggaggaggtgggcagaagaaccaccttcagactgttctaccccgagagcgtgttcagcgaccccatccacaacgaccccaacaccaccgtgatcctgaccgccttcaagccccacgacctgagatggctgctggagctgctgatgggcgacaagatcaacaccaacggcttctggaagaagcccgccctgaacctgatctacaagccctaccagatcagaatcctggaccccttcatcatcagaaccgccgcctacgagctgctgcacttccccaaggtgttccccaagaaccagaagcccaagcaccccaccaccggcatcatcgccatcaccctggccttctacatctgccacgaggtgcacctggccggcttcaagtacaacttcagcgacctgaagagccccctgcactactacggcaacgccaccatgagcctgatgaacaagaacgcctaccacaacgtgaccgccgagcagctgttcctgaaggacatcatcgagaagaacctggtgatcaacctgacccaggactag

SEQ ID NO: 95926 - DNA, 696 bp, Artificial Sequence
  derived and/or modified sequence
atgagaggctacctggtggccatcttcctgagcgccgtgttcctgtactacgtgctgcactgcatcctgtggggcaccaacgtgtactgggtggcccccgtggagatgaagagaagaaacaagatccagccctgcctgagcaagcccgccttcgccagcctgctgagattccaccagttccaccccttcctgtgcgccgccgacttcagaaagatcgccagcctgtacggcagcgacaagttcgacctgccctacggcatgagaaccagcgccgagtacttcagactggccctgagcaagctgcagagctgcgacctgttcgacgagttcgacaacatcccctgcaagaagtgcgtggtggtgggcaacggcggcgtgctgaagaacaagaccctgggcgagaagatcgacagctacgacgtgatcatcagaatgaacaacggccccgtgctgggccacgaggaggaggtgggcagaagaaccaccttcagactgttctaccccgagagcgtgttcagcgaccccatccacaacgaccccaacaccaccgtgatcctgaccgccttcaagccccacgacctgagatggctgctggagctgctgatgggcgacaagatcaacaccaacggcttctggaagaagcccgccctgaacctgatctacaagccctaccagatcagaatcctggacccctag

SEQ ID NO: 95927 - DNA, 996 bp, Artificial Sequence
  derived and/or modified sequence
atgaggggttatctggtggccatcttcctttccgcagtgtttctgtattatgtcttgcattgcattttgtgggggaccaatgtctattgggtggcccctgtggaaatgaagcggcgcaacaagattcagccatgcctgagcaaacctgccttcgcctcgctgttgcggtttcaccagttccaccccttcctgtgtgcagccgactttcgcaagattgccagtttgtacggatccgacaagtttgacctgccttatgggatgcgtacctctgccgaatacttcagacttgccctatcaaaacttcaatcatgtgacctcttcgatgagttcgacaacattccttgcaaaaagtgcgtggtcgttggcaacggcggcgtgctaaagaacaaaaccttgggagagaaaatcgactcctacgacgtgattatccggatgaacaacggacctgttttaggccatgaggaggaggtggggagacggacaacatttaggctattttatccggagtctgtcttcagcgatcctatccacaacgatcctaatactaccgtgatcctcactgcctttaagccgcacgatctgcggtggctgctggagctgctcatgggtgacaaaatcaacacaaatggtttctggaaaaagccagcactgaacctgatctacaaaccataccaaattcgaattttggatcctttcattatacgtacagcagcttacgaactcctccacttccccaaggtcttccccaaaaaccagaagcctaagcaccctaccaccggtattatagcaatcaccctggccttctatatatgtcacgaggtccatctcgccggctttaagtataatttttcagatttaaaaagcccactgcattattacggaaacgcaacaatgagtctaatgaacaagaacgcttatcacaacgttacggccgaacaattattcttaaaagacatcatcgaaaagaacttggtgattaacctgactcaggactag

SEQ ID NO: 95928 - DNA, 996 bp, Artificial Sequence
  derived and/or modified sequence
atgagaggatacttggtggctatttttctgtccgcagtcttcctgtactatgttctgcactgtattctgtggggaaccaacgtttattgggtggctccagttgaaatgaaacgccgaaataaaatccagccatgtcttagcaaaccggcctttgcatcactgctccgcttccaccagttccacccttttctgtgtgctgcagatttccgtaagatagcaagtttatacggcagcgataagttcgacctaccctacggcatgagaacgtcagcagaatattttcggctggcgctgagcaagctccaatcctgcgatttgtttgatgagtttgataatatcccttgcaagaaatgcgtggtggtagggaacggtggagttctgaagaacaaaactcttggagagaagatagactcttatgacgtcattatacgcatgaacaacggtcctgttctggggcatgaggaggaggtagggaggcgtaccacgtttaggctgttctatcctgaatccgttttttcagatcccatccataacgaccctaatactacagtgattctgacggctttcaagccccatgatttgaggtggctgcttgagctccttatgggcgacaaaattaatacaaacggattctggaagaagcctgcgctcaacttgatctacaaaccttaccagatccggatcctggatccctttattattaggactgccgcatacgaattgctccatttcccaaaggtgtttccgaaaaatcagaaaccaaaacacccgacaactggcattatcgccatcaccctcgccttttatatctgccatgaggtccatctggctgggttcaagtataacttttcggatctgaagtcgcccctccactactacggtaacgctacaatgagtttaatgaataaaaacgcttaccataacgtgaccgccgagcagctgttcctgaaggatattatcgagaagaatctggtcatcaatctaacacaagactag

SEQ ID NO: 95929 - DNA, 696 bp, Artificial Sequence
  derived and/or modified sequence
atgcgcggatacttagtagccatcttcctgtccgctgtattcctgtactatgtactgcactgcatcctctgggggactaatgtctattgggtggcacccgtagaaatgaagcgccgaaacaaaatccagccctgcctgtctaaacctgcttttgccagcctcttgagattccaccagttccaccctttcctatgtgcagccgactttagaaaaatagcatcgctctacgggtccgataaattcgacctgccttacggcatgcggacttccgcagagtattttcggctggcactgtctaaactgcagtcatgtgatttattcgacgaatttgataacattccttgcaagaaatgtgtggtggtgggaaacggtggcgtgctgaagaataagacactgggcgagaaaattgactcatacgacgtgattatccggatgaacaatggcccggtacttggccacgaagaggaagtgggccgaaggaccacattcagacttttctacccagagtcggtgtttagtgaccctattcataacgaccccaacacaactgtgattctcactgccttcaagccccatgacctaagatggcttctggaattactgatgggggataagatcaacaccaatggcttttggaagaagccggccttgaatctgatttacaagccctaccagatccggattttggacccgtag

SEQ ID NO: 95930 - DNA, 996 bp, Artificial Sequence
  derived and/or modified sequence
atgaggggctacctggtggccatcttcctgtctgctgtgttcctgtactacgtgctgcactgcatcctgtggggcaccaacgtgtactgggtggcccctgtggagatgaagagaagaaacaagatccagccctgcctgagcaagccagcctttgccagcctgctgcgcttccaccagttccaccccttcctgtgtgccgctgacttcaggaagatcgccagcctgtatggcagtgacaagtttgacctgccctacggcatgaggaccagcgctgagtacttccggctggccctgagcaagctgcagagctgtgacctgtttgatgaatttgacaacatcccctgcaagaagtgtgtggtggtgggcaatggaggagtgctgaagaacaagaccctgggggagaagattgacagctatgatgtgatcatccgcatgaacaatggacctgtgctgggccacgaggaggaggtgggccgccgcaccaccttccgcctcttctacccagagagcgtcttcagtgaccccatccacaatgaccccaacaccaccgtcatcctgacagccttcaagccccatgacctgcgctggctgctggagctgctgatgggagacaagatcaacaccaacggcttctggaagaagccagccctgaacctgatctacaagccctaccagatccgcatcctggaccccttcatcatcagaacagctgcctatgagctgctgcacttccccaaggtgttccccaagaaccagaagcccaagcaccccaccaccggcatcatcgccatcaccctggccttctacatctgccacgaggtgcacctggccggcttcaagtacaacttcagtgacctgaagagccccctgcactactatggaaatgccaccatgagcctgatgaacaagaatgcctaccacaacgtgacagctgagcagctgttcctgaaggacatcatcgagaagaacctggtgatcaacctgacccaggactag

SEQ ID NO: 95931 - DNA, 696 bp, Artificial Sequence
  derived and/or modified sequence
atgaggggctacctggtggccatcttcctgtctgctgtgttcctgtactacgtgctgcactgcatcctgtggggcaccaacgtgtactgggtggcccctgtggagatgaagagaagaaacaagatccagccctgcctgagcaagccagcctttgccagcctgctgcgcttccaccagttccaccccttcctgtgtgccgctgacttcaggaagatcgccagcctgtatggcagtgacaagtttgacctgccctacggcatgaggaccagcgctgagtacttccggctggccctgagcaagctgcagagctgtgacctgtttgatgaatttgacaacatcccctgcaagaagtgtgtggtggtgggcaatggaggagtgctgaagaacaagaccctgggggagaagattgacagctatgatgtgatcatccgcatgaacaatggacctgtgctgggccacgaggaggaggtgggccgccgcaccaccttccgcctcttctacccagagagcgtcttcagtgaccccatccacaatgaccccaacaccaccgtcatcctgacagccttcaagccccatgacctgcgctggctgctggagctgctgatgggagacaagatcaacaccaacggcttctggaagaagccagccctgaacctgatctacaagccctaccagatccgcatcctggacccctag

SEQ ID NO: 95932 - DNA, 996 bp, Artificial Sequence
  derived and/or modified sequence
atgcggggctacctggtggccatcttcctgagcgccgtgttcctgtactacgtattacattgcatactttgggggacaaatgtgtattgggtggcaccagtggagatgaagaggaggaacaaaatccaaccttgtctgtcaaagccagctttcgcttcattactcaggtttcaccaattccatccttttctttgcgccgccgattttcgtaagatagcctctctgtacggtagcgataagtttgatttaccttatggaatgcgcacttctgccgaatatttccgtttagccttatccaaacttcagtcctgtgacttatttgacgaattcgacaatatcccctgcaaaaaatgcgtcgtcgtcgggaacggcggagttctgaagaacaaaacattgggagagaagatagattcatacgacgtgattattagaatgaacaacggccccgtgctgggccatgaggaagaagtcggccggagaactacttttaggcttttctacccggagagtgtgtttagcgatcccattcacaacgacccaaatacaacagtgatactcaccgcttttaagccacatgacctgcgctggctgctggaactgttaatgggggataaaatcaacaccaatgggttctggaagaagcccgccttgaatctgatctataagccttatcaaatacggatcttagatccattcattattcgcaccgctgcctacgagctgctgcatttccccaaggtgtttcctaagaaccagaaaccaaagcacccaacgacggggattatcgccattacgctggccttttacatttgtcacgaagtccatctggctggctttaagtacaattttagcgatttaaaaagccctttacattactatggcaacgccactatgtcactgatgaacaaaaacgcctaccacaacgttacggcagagcagctgtttctcaaagatatcattgagaaaaatctcgtgatcaacctgacacaagattag

SEQ ID NO: 95933 - DNA, 996 bp, Artificial Sequence
  derived and/or modified sequence
atgcggggctacctggtggccatcttcctgagcgccgtgttcctgtattacgtgttgcactgtattctctggggcaccaacgtttattgggtggcacccgtggagatgaagcgacggaataaaattcagccctgcctgagcaagcccgccttcgcttccctcctcagattccatcaattccaccccttcctgtgtgcggccgattttcgcaaaatagcatctctgtatggcagtgacaagtttgacctcccttacgggatgagaacctctgccgagtacttcaggctggccctgtctaaactgcagagttgtgatcttttcgatgagttcgacaatattccctgcaagaaatgcgtggtggtgggcaatggcggagtgctgaagaacaaaaccctgggcgaaaaaatcgactcctatgatgtgattatccgaatgaacaatgggcccgtgctgggtcatgaagaggaagtgggcagaaggactaccttcaggcttttttatccagagtccgtcttctccgatcccatccacaacgaccccaataccaccgtaattcttacagcgttcaaaccccatgatttaagatggctccttgaactgctaatgggcgataagattaacactaatggtttttggaagaaacccgcactcaatcttatctataagccatatcagatccgaattctcgatccctttattatcagaaccgccgcatatgagcttctgcactttcctaaagtgttccccaagaatcagaagccaaaacatcctactaccggtataattgcaatcacactggcattttacatatgccacgaggtgcaccttgcaggttttaaatacaactttagcgacctgaagtcccccctgcactattacggtaacgctacaatgagcctgatgaacaaaaatgcctaccacaacgtcaccgctgaacagttatttcttaaggacatcatcgaaaaaaatctcgtaatcaatctgacccaggactag

SEQ ID NO: 95934 - DNA, 696 bp, Artificial Sequence
  derived and/or modified sequence
atgcggggctacctggtggccatcttcctgagcgccgtgttcctgtattatgtgttgcactgcattctctgggggaccaacgtctactgggttgctccagttgagatgaaaaggagaaacaaaattcagccctgtctgtcgaagcccgcttttgcaagtctgcttcgattccaccagtttcaccccttcctctgtgctgccgattttagaaaaatcgctagtctatacgggtcggacaagttcgacctgccgtatgggatgcggaccagtgccgaatacttcagactggctctgtctaagctgcagagctgcgacttattcgacgaattcgataatattccttgtaaaaaatgcgttgtcgttgggaatggcggggtcctgaaaaataaaactcttggggaaaagatcgattcttatgatgtgattattagaatgaacaacggtccggtactgggacacgaagaggaggtgggcagaaggactacgttcaggcttttctacccagagagtgtttttagtgacccgatccacaacgaccctaacacaacggtgatcctcaccgccttcaaacctcacgacctgagatggctacttgaacttcttatgggtgataagattaacactaatgggttttggaagaagcccgccttaaatctcatatataaaccctaccagattagaattcttgatccctag

SEQ ID NO: 95935 - DNA, 996 bp, Artificial Sequence
  derived and/or modified sequence
atgagaggatacctggtggccatctttctgtccgctgtctttctgtattacgtcttgcattgtattttgtggggcacaaacgtttattgggtggctcctgtggaaatgaaaagacgcaacaaaatccagccctgcctcagcaagcccgctttcgcctctctgcttagattccaccagttccatccgttcctgtgcgctgcagatttccgcaaaatcgcgagcctttatggaagcgataaattcgaccttccctatggcatgaggacttcagccgaatacttccggttggccttgtccaaattgcagagctgcgacctcttcgacgagtttgataatatcccttgcaaaaaatgtgttgtggtcggcaacggtggagtgcttaaaaacaagaccttgggtgaaaagattgacagctacgacgtcatcatccgtatgaacaacggccctgtcctcggccacgaggaagaggttggccgaagaacaacatttcggttgttctaccccgagtctgtattttccgaccccatacacaatgatcccaatactaccgtgatactcactgccttcaagcctcacgacctacgttggctgctcgagttgctcatgggggacaaaattaacaccaatggcttctggaagaagcccgcactgaatttaatatataaaccatatcagatcaggatccttgaccctttcatcattcggaccgccgcatacgagctcctccacttccccaaagtatttcccaagaaccagaaaccgaaacacccaaccaccggcattattgccatcacacttgccttctacatctgtcacgaggtgcatttggcgggtttcaagtataacttcagcgatctgaagagcccactgcattactacggcaatgctacaatgtcattgatgaacaagaatgcctaccacaacgttacagcagagcagctttttttaaaagacataatcgagaagaacctggtcatcaatctgacacaggactag

SEQ ID NO: 95936 - DNA, 996 bp, Artificial Sequence
  derived and/or modified sequence
atgcgagggtatctggtggctatcttcctcagtgccgtgtttctctactacgtattgcactgtattctatggggtaccaacgtgtattgggtcgccccagtagaaatgaaaaggcggaataaaattcagccttgtcttagcaaaccagcctttgcctctttgctgcgctttcaccagttccatccttttttgtgcgcagcagatttcaggaaaatcgcctccctgtacggatcggacaaattcgacctgccgtatggaatgagaacatccgccgagtatttcaggcttgcactttccaagctgcagagctgtgatctgtttgacgagttcgacaatataccttgcaaaaagtgcgtagtggtcgggaacggaggagtgctcaagaacaagacactgggcgagaagatcgatagctatgacgtcataatccggatgaataatggccctgtgctgggccacgaagaggaggtgggtaggagaaccactttcagattattctaccccgaatcagttttctctgatcctatccacaacgatccgaacacaactgtcatcctgaccgccttcaaaccccacgacctgcgatggctgcttgagctcttgatgggagataaaatcaacaccaatgggttttggaaaaagcctgccctcaatctgatctacaagccgtatcagattcgaatacttgacccttttataatacggactgccgcttacgagcttttgcactttcctaaggtgtttcccaagaaccaaaaacccaagcatcctactactggcatcatcgcaatcacgctcgccttttacatatgtcacgaagttcaccttgcgggtttcaagtataattttagcgatctgaagtccccactgcactactatgggaacgctaccatgtctctgatgaataagaatgcataccacaatgtaaccgccgagcaactatttctgaaggacatcatcgagaaaaatcttgtcatcaacctgactcaagactag

SEQ ID NO: 95937 - DNA, 696 bp, Artificial Sequence
  derived and/or modified sequence
atgaggggatacttagtggccatcttcctgtcggctgtgtttctttattacgtgcttcactgcatcttgtggggcactaacgtctattgggtcgcacccgtggagatgaagcgacggaacaagatacaaccgtgcctatcaaaacctgcattcgccagccttctgaggtttcaccagttccatcccttcttatgtgctgctgatttcagaaaaatcgcgtctctttatggttcagacaagtttgacttgccatatggaatgagaacctctgccgaatattttaggctggccttgtccaaattacagagctgcgatttattcgacgagtttgataatatcccgtgcaaaaagtgcgttgttgtcggaaatggcggtgtgctcaaaaacaaaaccttgggggagaaaattgactcctacgacgtgatcatacgcatgaacaatggtccagttctggggcacgaggaggaagtgggcaggcgcaccacattcagactattttacccagagtcagtttttagcgaccccatccacaacgacccaaatacgacagtgattcttactgcctttaagccacacgacctccggtggctgctcgagctccttatgggagataaaataaacaccaatgggttttggaagaagccagctctgaacctgatttataagccctatcaaatccgaattttagatccttag

SEQ ID NO: 95938 - DNA, 2837 bp, Artificial Sequence
  derived and/or modified sequence
agtccgcggcgccacaagcctcagtgtttacttctgccgcctgccagccgggcggggaaggggagtacccggccacccctcactttagctcctgcagctttccaaacaaaccagggcgggatgggagtgtcttcttggctgtggaaatcgatcctcctaccttgtcctgaagccacccgccgcctttcctcgtccctcccttcgcggtgattttccggtcccggcgcccggcgagggcgcgcggctggtgtccgccccgcccgaaaggtgagccagccatgagagggtatcttgtggccatattcctgagtgctgtcttcctctattatgtactgcattgcatattatggggaacgaatgtctattgggtggcacctgtggaaatgaaacggagaaataagatccagccttgtttatcaaagccagcttttgcctctctgctgagtcagagctctgcatatattttaagaaaaggcattgaggaactcaatcaaaccagtattcttttcacacaggtttcatcagtttcacccttttctgtgtgcggctgattttagaaagattgcttccttgtatggtagcgataagtttgatttgccctatgggatgagaacatcagcggaatattttcgacttgctctttcaaaactgcagagttgtgatctctttgatgagtttgacaacataccctgtaaaaagtgtgtggtggttggtaatggaggagttttgaagaataagacattaggagaaaaaatcgactcctatgatgtaataataagaatgaataatggtcctgttttaggacatgaagaagaagttgggagaaggacaaccttccgacttttttatccagaatctgttttttcagatcctattcacaatgaccctaatacgacagtgattctcactgcttttaagccacatgatttaaggtggctgttggaattgttgatgggtgacaaaataaacactaatggtttttggaagaaaccagccttaaacctgatttataaaccttatcaaatccgaatattagatcctttcattatcagaacagcagcttatgaactgcttcattttccaaaagtgtttcccaaaaatcagaaacctaaacacccaacaacaggaattattgccatcacattggcgttttacatatgtcacgaagttcacctagctggttttaaatacaacttttctgacctcaagagtcctttgcactactatgggaatgccaccatgtctttgatgaataagaacgcgtatcacaatgtgactgcagagcagctctttttgaaggacattatagaaaaaaacctcgtaatcaacttgactcaagattgactctacagactcagaagatgatgctaacagtgttagttttatttttgtactgcaatttttagtttaaaatatgttggatgcactcgtcaaataattatgtatactgtctgttgctgcctggtgattcataaccaccagcttaatttctgtgaatactgtatatttaacttatgaaaaccaagaaatgtaaagataacaggaaaataagttttgattgcattgtttttaaaataagctagttttctgaggtgttttcacacgtctttttatagttacttcatcttagatttttgaagggatatgacttcctactaaggatttagtttaccacaacaattctgactacaataagacattttgaggaggatatttggctactgtaaacatggctggtggaaaatcacgattgtggcttgatgtggcaagccgaaaccacttggctctggaaatctaagttcatactggtttaattaagctctctcctgacaacccccagaattaaatgaaccatgattgtgaagagtaatttggtacaatgaaggcagtgtttgtttttaagttaaaggaaatgggctaaacataaagttcttattagataagtaaataactaaagaaagaatacaattactaaactctgatggctttgtattattttaaagaaatgaagtttaactttatacagtgaagctaagctaggcaagctcaagaaggaaaaaaaaatcttgaacattatttttttttgcctgacttacttattcattaaattttgaaggttttccacttgaagtaaattaggaaaggtaaagaagataacagaacaagtaaacacttaagaaaagtcaagctgaggccgggcagggtggctcacacctgtaatcctaacaaacactttgggaggccgagggaggcagctggattgcctgaactcaggagttcaagaccagcctggccaacatggtgaaacctcatctctactaaaatacaaaataattagctgggcgtggtggtatgcgctgtagtcccaggtactcgggaggctgaggcacgagaattgcttgagcccgggaggcagaggttgcagtgagccaagatcgcgccactgcacttcagcctgggtgacagagtgaggctgtcttctaaaaaatataaaaagtgaagttgggatttttggatttaaatggtacaaaaagaatatctcattttcccatgattaaagctaatcttcagatggaaagcttgcctggctacctagggtgcaccagagaatctgatccaatgcaagccagtcaatcctacaaatgtggtgagctagtcttccttcctatattttaataaatgtaaccaaaggccatctggaggtaggggaatgagaggtgaagaaacagaaaaatagaggttataaggatggaactaaaagttgtcagaagaggtatgagctgaagaaagaattactctcttttgaccaataaatacaattgggaaacactggaaaa

SEQ ID NO: 95939 - protein, 213 aa, Artificial Sequence
  derived and/or modified sequence
MRTSAEYFRLALSKLQSCDLFDEFDKMNNGPVLGHEEEVGRRTTFRLFYPESVFSDPIHNDPNTTVILTAFKPHDLRWLLELLMGDKINTNGFWKKPALNLIYKPYQIRILDPFIIRTAAYELLHFPKVFPKNQKPKHPTTGIIAITLAFYICHEVHLAGFKYNFSDLKSPLHYYGNATMSLMNKNAYHNVTAEQLFLKDIIEKNLVINLTQD

SEQ ID NO: 95940 - DNA, 642 bp, Artificial Sequence
  derived and/or modified sequence
atgagaaccagcgccgagtacttcagactggccctgagcaagctgcagagctgcgacctgttcgacgagttcgacaagatgaacaacggccccgtgctgggccacgaggaggaggtgggcagaagaaccaccttcagactgttctaccccgagagcgtgttcagcgaccccatccacaacgaccccaacaccaccgtgatcctgaccgccttcaagccccacgacctgagatggctgctggagctgctgatgggcgacaagatcaacaccaacggcttctggaagaagcccgccctgaacctgatctacaagccctaccagatcagaatcctggaccccttcatcatcagaaccgccgcctacgagctgctgcacttccccaaggtgttccccaagaaccagaagcccaagcaccccaccaccggcatcatcgccatcaccctggccttctacatctgccacgaggtgcacctggccggcttcaagtacaacttcagcgacctgaagagccccctgcactactacggcaacgccaccatgagcctgatgaacaagaacgcctaccacaacgtgaccgccgagcagctgttcctgaaggacatcatcgagaagaacctggtgatcaacctgacccaggactag

SEQ ID NO: 95941 - DNA, 642 bp, Artificial Sequence
  derived and/or modified sequence
atgcgcacttccgccgagtacttccgcctcgctctgagcaagcttcagagctgcgacctattcgacgaatttgataaaatgaacaatggcccagtccttgggcatgaagaagaagtgggaaggcgaacgacattcagactattctatcccgaatcagtcttctcggacccgattcacaacgaccctaatactacggtgatcctcactgcttttaaaccccacgatctccgatggctactggagcttctgatgggtgataagataaataccaatggtttttggaaaaaacctgcgcttaacctcatatataaaccctaccagatacggatactcgatccatttatcatcagaacagcagcttatgagttactgcactttcctaaggtattccccaagaaccaaaagcccaagcatccaaccactgggatcattgccattactttagccttctatatatgccacgaggttcacctggcgggttttaaatacaattttagcgacctgaagagcccgcttcactactacgggaatgccactatgtccctgatgaataaaaacgcttatcacaatgtcactgcagagcagttatttttaaaggatattattgaaaagaatcttgtgatcaatctcacccaggattag

SEQ ID NO: 95942 - DNA, 642 bp, Artificial Sequence
  derived and/or modified sequence
atgaggaccagcgctgagtacttccggctggccctgagcaagctgcagagctgtgacctgtttgatgaatttgacaagatgaacaatggacctgtgctgggccacgaggaggaggtgggccgccgcaccaccttccgcctcttctacccagagagcgtcttcagtgaccccatccacaatgaccccaacaccaccgtcatcctgacagccttcaagccccatgacctgcgctggctgctggagctgctgatgggagacaagatcaacaccaacggcttctggaagaagccagccctgaacctgatctacaagccctaccagatccgcatcctggaccccttcatcatcagaacagctgcctatgagctgctgcacttccccaaggtgttccccaagaaccagaagcccaagcaccccaccaccggcatcatcgccatcaccctggccttctacatctgccacgaggtgcacctggccggcttcaagtacaacttcagtgacctgaagagccccctgcactactatggaaatgccaccatgagcctgatgaacaagaatgcctaccacaacgtgacagctgagcagctgttcctgaaggacatcatcgagaagaacctggtgatcaacctgacccaggactag

SEQ ID NO: 95943 - DNA, 642 bp, Artificial Sequence
  derived and/or modified sequence
atgcggaccagcgccgagtacttccggctggccctgagcaagctgcagagctgcgacctgttcgacgaattcgacaagatgaacaatggcccagtgctggggcatgaagaggaggtgggaaggaggactacttttaggcttttttatcctgagtcagtcttctcagaccctatccacaatgatcctaacacaacggtgattctgactgcattcaaaccacatgatctgagatggctgttggagcttcttatgggtgacaaaattaataccaatggtttctggaaaaaaccagctctgaacttaatttacaaaccttaccagattaggattctcgacccctttattattaggaccgccgcctatgaactgctccactttcccaaggtctttccaaaaaaccagaagcccaagcaccctaccacaggtataattgctattactttggccttctatatttgccacgaagttcaccttgcaggcttcaagtacaatttttccgatctgaaaagtcccctccattattatggtaacgccactatgtccctcatgaataagaatgcttatcataacgttactgcggagcaacttttcttaaaagacatcattgaaaaaaatttagtaatcaatctcacccaggattag

SEQ ID NO: 95944 - DNA, 642 bp, Artificial Sequence
  derived and/or modified sequence
atgcggactagcgcggagtattttagacttgctttgtcaaaactccagtcttgtgacctctttgatgaattcgacaaaatgaacaacggacctgtattaggacatgaggaggaggtcggccgaagaactacattccgcctgttctatcctgagagcgttttttctgatcccatccacaatgatccgaacaccactgttatactgacagcctttaaaccacatgacctgaggtggttgttagaactgctcatgggagataagatcaataccaatggcttttggaagaaaccagccctgaatctgatatacaagccttaccagatacgaattctggacccttttatcattaggacagctgcctacgagctgctccactttcctaaagtgtttccgaaaaatcaaaaacccaagcaccctaccaccgggatcattgcaatcactcttgctttttacatatgccacgaggtgcaccttgcaggtttcaaatacaatttctccgacttaaaatcaccactgcactactatggaaacgcgacaatgtcattgatgaacaagaacgcttatcacaacgtgaccgctgagcagttgttcctgaaagatatcatagagaagaacctggtcattaacttaacccaggattag

SEQ ID NO: 95945 - protein, 831 aa, Artificial Sequence
  derived and/or modified sequence
MTELKAKGPRAPHVAGGPPSPEVGSPLLCRPAAGPFPGSQTSDTLPEVSAIPISLDGLLFPRPCQGQDPSDEKTQDQQSLSDVEGAYSRAEATRGAGGSSSSPPEKDSGLLDSVLDTLLAPSGPGQSQPSPPACEVTSSWCLFGPELPEDPPAAPATQRVLSPLMSRSGCKVGDSSGTAAAHKVLPRGLSPARQLLLPASESPHWSGAPVKPSPQAAAVEVEEEDGSESEESAGPLLKGKPRALGGAAAGGGAAAVPPGAAAGGVALVPKEDSRFSAPRVALVEQDAPMAPGRSPLATTVMDFIHVPILPLNHALLAARTRQLLEDESYDGGAGAASAFAPPRSSPCASSTPVAVGDFPDCAYPPDAEPKDDAYPLYSDFQPPALKIKEEEEGAEASARSPRSYLVAGANPAAFPDFPLGPPPPLPPRATPSRPGEAAVTAAPASASVSSASSSGSTLECILYKAEGAPPQQGPFAPPPCKAPGASGCLLPRDGLPSTSASAAAAGAAPALYPALGLNGLPQLGYQAAVLKEGLPQVYPPYLNYLRPDSEASQSPQYSFESLPQKICLICGDEASGCHYGVLTCGSCKVFFKRAMEGQHNYLCAGRNDCIVDKIRRKNCPACRLRKCCQAGMVLGGFRNLHIDDQITLIQYSWMSLMVFGLGWRSYKHVSGQMLYFAPDLILNEQRMKESSFYSLCLTMWQIPQEFVKLQVSQEEFLCMKVLLLLNTIPLEGLRSQTQFEEMRSSYIRELIKAIGLRQKGVVSSSQRFYQLTKLLDNLHDLVKQLHLYCLNTFIQSRALSVEFPEMMSEVIAAQLPKILAGMVKPLLFHKK

SEQ ID NO: 95946 - DNA, 2496 bp, Artificial Sequence
  derived and/or modified sequence
atgaccgagctgaaggccaagggccccagagccccccacgtggccggcggcccccccagccccgaggtgggcagccccctgctgtgcagacccgccgccggccccttccccggcagccagaccagcgacaccctgcccgaggtgagcgccatccccatcagcctggacggcctgctgttccccagaccctgccagggccaggaccccagcgacgagaagacccaggaccagcagagcctgagcgacgtggagggcgcctacagcagagccgaggccaccagaggcgccggcggcagcagcagcagcccccccgagaaggacagcggcctgctggacagcgtgctggacaccctgctggcccccagcggccccggccagagccagcccagcccccccgcctgcgaggtgaccagcagctggtgcctgttcggccccgagctgcccgaggacccccccgccgcccccgccacccagagagtgctgagccccctgatgagcagaagcggctgcaaggtgggcgacagcagcggcaccgccgccgcccacaaggtgctgcccagaggcctgagccccgccagacagctgctgctgcccgccagcgagagcccccactggagcggcgcccccgtgaagcccagcccccaggccgccgccgtggaggtggaggaggaggacggcagcgagagcgaggagagcgccggccccctgctgaagggcaagcccagagccctgggcggcgccgccgccggcggcggcgccgccgccgtgccccccggcgccgccgccggcggcgtggccctggtgcccaaggaggacagcagattcagcgcccccagagtggccctggtggagcaggacgcccccatggcccccggcagaagccccctggccaccaccgtgatggacttcatccacgtgcccatcctgcccctgaaccacgccctgctggccgccagaaccagacagctgctggaggacgagagctacgacggcggcgccggcgccgccagcgccttcgccccccccagaagcagcccctgcgccagcagcacccccgtggccgtgggcgacttccccgactgcgcctacccccccgacgccgagcccaaggacgacgcctaccccctgtacagcgacttccagccccccgccctgaagatcaaggaggaggaggagggcgccgaggccagcgccagaagccccagaagctacctggtggccggcgccaaccccgccgccttccccgacttccccctgggcccccccccccccctgccccccagagccacccccagcagacccggcgaggccgccgtgaccgccgcccccgccagcgccagcgtgagcagcgccagcagcagcggcagcaccctggagtgcatcctgtacaaggccgagggcgcccccccccagcagggccccttcgccccccccccctgcaaggcccccggcgccagcggctgcctgctgcccagagacggcctgcccagcaccagcgccagcgccgccgccgccggcgccgcccccgccctgtaccccgccctgggcctgaacggcctgccccagctgggctaccaggccgccgtgctgaaggagggcctgccccaggtgtaccccccctacctgaactacctgagacccgacagcgaggccagccagagcccccagtacagcttcgagagcctgccccagaagatctgcctgatctgcggcgacgaggccagcggctgccactacggcgtgctgacctgcggcagctgcaaggtgttcttcaagagagccatggagggccagcacaactacctgtgcgccggcagaaacgactgcatcgtggacaagatcagaagaaagaactgccccgcctgcagactgagaaagtgctgccaggccggcatggtgctgggcggcttcagaaacctgcacatcgacgaccagatcaccctgatccagtacagctggatgagcctgatggtgttcggcctgggctggagaagctacaagcacgtgagcggccagatgctgtacttcgcccccgacctgatcctgaacgagcagagaatgaaggagagcagcttctacagcctgtgcctgaccatgtggcagatcccccaggagttcgtgaagctgcaggtgagccaggaggagttcctgtgcatgaaggtgctgctgctgctgaacaccatccccctggagggcctgagaagccagacccagttcgaggagatgagaagcagctacatcagagagctgatcaaggccatcggcctgagacagaagggcgtggtgagcagcagccagagattctaccagctgaccaagctgctggacaacctgcacgacctggtgaagcagctgcacctgtactgcctgaacaccttcatccagagcagagccctgagcgtggagttccccgagatgatgagcgaggtgatcgccgcccagctgcccaagatcctggccggcatggtgaagcccctgctgttccacaagaagtag

SEQ ID NO: 95947 - DNA, 2496 bp, Artificial Sequence
  derived and/or modified sequence
atgactgagctgaaggccaaaggcccaagggcaccccatgtggccggtggtccccctagtcctgaggtgggaagccctcttctgtgtcggcccgcagccgggcccttccctggatcacagacgtccgacaccctcccggaagtgtccgcgattcccatctcattggatggcctgctgttcccgcgaccttgccaggggcaggatccttctgacgagaagacgcaagatcaacagagcttgtccgatgtcgagggagcttactcccgggcagaggccactaggggagccggaggttctagcagtagtcccccagagaaagattccgggctgttggactcagtgcttgacactcttctggctccttccggcccagggcagtctcaacctagtccccctgcgtgcgaagtgacaagtagctggtgtctttttggccccgaactcccagaagacccccccgccgctcctgcaactcaacgcgtcctttctcccctcatgtcacggtctggatgcaaggtcggcgacagtagtgggacagcggcggcgcataaagtgttaccacgcggcctcagccctgctaggcagctccttctgcccgcctccgaatctccccattggagtggagcccccgtcaaaccctccccacaagccgcggctgtggaggttgaggaggaggacgggagcgaatccgaagagtccgcggggcctctgctgaaaggtaaacctcgcgccctcggaggtgccgccgccggggggggagccgctgcagtgcctccaggtgcggccgccggaggcgtggcgctggtacccaaggaggactccagattctcggctccgagggtggccttggtcgaacaggatgcgccgatggcacccggccgaagccctctggcaacaactgtgatggactttatccatgtgcctatcttgccattgaaccacgcactgttagcagcccggacaaggcaactgttagaggacgaaagctatgatggcggcgccggcgccgcctccgcattcgcaccccccaggtcttccccttgcgcctcaagtacccctgtggccgtgggagattttccagattgcgcttaccctccagacgccgaacccaaggatgacgcctatcccttatattcggactttcaaccccctgccctgaaaattaaggaggaggaagagggggcggaggcatccgcccgcagtccaagatcgtaccttgttgcaggagctaaccccgctgcctttcctgactttcctctcggtcccccaccacctctgcctccccgggccactcctagccgcccgggggaggccgccgtgacggcagctcccgcttccgctagcgtatcaagtgcgtcttctagcgggagcacattggaatgtatcctttacaaagctgagggtgcccctccccaacagggtccattcgccccccctccatgcaaagcccctggggcttcaggatgcttacttccaagagacggtcttccttccacatccgcatctgctgcggcggccggggcggccccggccctctacccggccttgggtttaaatggcctgcctcagctgggctaccaagctgcagtgttgaaggagggattgccccaggtctatcctccctatctgaattatcttaggccagactcagaagccagtcaaagcccgcagtatagcttcgagagtctgccgcaaaaaatctgtcttatttgtggagacgaagccagtggttgccactatggggtgctgacgtgtggctcctgcaaagtcttttttaaaagggccatggagggtcagcataactacctatgcgcgggaagaaatgattgcatagttgacaagattaggaggaagaattgtccagcctgcagactgaggaaatgttgtcaggccggcatggtgcttggtgggttccgtaatctgcacattgatgaccagattaccttaatccagtactcatggatgagcctcatggtgttcggtctcggctggcgcagttataaacacgtctcaggccaaatgttgtatttcgcacccgacttgattctgaatgagcagagaatgaaggagtcttctttttacagcttatgcctgaccatgtggcaaataccccaggagttcgtcaagctgcaggtctctcaggaggagtttctgtgcatgaaggtgctgctcctgctgaacacaatacctctggagggcctgcgatcacagactcagtttgaggagatgcgatcttcatacattcgggagctgataaaggccatcgggctaagacaaaaaggggtcgtgagcagttcccaacggttttatcagctcacaaaattgctggacaatctccacgacctagtaaaacagctgcacctgtattgtctgaacacattcattcagagcagagctctgtcggttgagtttcctgaaatgatgtcagaggtgattgctgctcagctccccaagatcttggctgggatggtgaagcctctactctttcacaagaagtag

SEQ ID NO: 95948 - DNA, 2496 bp, Artificial Sequence
  derived and/or modified sequence
atgacagagctgaaggccaagggcccccgggcccctcatgtggccggcggcccccccagccctgaggtgggcagccccctgctgtgcaggcctgctgctggccccttccctggcagccagaccagtgacaccctgcctgaggtgtctgccatccccatcagcctggatggcctgctcttcccccggccctgccagggccaggaccccagtgatgagaagacccaggaccagcagagcctgagtgatgtggagggcgcctacagcagagctgaggccaccaggggggccggcggcagcagcagcagccccccagagaaggacagcggcctgctggacagcgtgctggacaccctgctggcccccagcggccctggccagagccagcccagccccccagcctgtgaggtgaccagctcctggtgcctgtttggacctgagctgcctgaagatcctcctgctgccccagccacccagagggtgctgagccccctgatgagccgcagcggctgcaaggtgggggacagcagcggcacagctgctgcccacaaggtgctgccccggggcctgagccctgcccggcagctgctgctgcctgccagcgagagcccccactggagcggggcccctgtgaagcccagcccccaggccgctgctgtggaggtggaggaggaggatggcagcgagagcgaggagagcgctggccccctgctgaagggcaagccccgggccctgggcggcgctgctgctgggggcggcgctgctgctgtgcccccaggagctgctgctgggggcgtggccctggtgcccaaggaggacagccgcttcagcgccccccgggtggccctggtggagcaggatgcccccatggcccctggccgcagccccctggccaccaccgtgatggacttcatccacgtgcccatcctgcccctgaaccacgccctgctggccgcccggacccggcagctgctggaggatgagagctatgatggaggagctggggccgccagcgcctttgccccacccaggagcagcccctgtgccagcagcacccctgtggccgtgggggacttcccagactgtgcctaccccccagatgctgagcccaaggatgatgcctaccccctgtacagcgacttccagcccccagccctgaagatcaaggaggaggaggagggcgctgaggccagcgcccggagccccaggagctacctggtggccggggccaacccagctgccttcccagacttccccctgggccccccaccacccctgcccccccgggccacccccagcaggcctggagaggccgctgtgacagctgccccagccagcgcctctgtgagcagcgccagcagcagcggcagcaccctggagtgcatcctgtacaaggccgagggcgccccaccccagcagggcccctttgcccccccaccctgcaaggcccctggggccagcggctgcctgctgcccagagatggcctgcccagcaccagcgccagcgctgctgctgctggagctgccccagccctgtacccagccctgggcctgaatggcctgccccagctgggctaccaggccgctgtgctgaaggagggcctgccccaggtgtacccaccctacctgaactacctgcggccagattctgaggccagccagagcccccagtacagctttgagagcctgccccagaagatctgcctgatctgtggagatgaggccagcggctgccactatggagtgctgacctgtggcagctgcaaggtgttcttcaagagggccatggagggccagcacaactacctgtgtgccggcagaaatgactgcatcgtggacaagatccggaggaagaactgcccagcctgccgcctgaggaagtgctgccaggccggcatggtgctgggcggcttcaggaacctgcacattgatgaccagatcaccctcatccagtacagctggatgagcctgatggtgtttggcctgggctggaggagctacaagcacgtgtctggccagatgctgtactttgccccagacctgatcctgaatgagcagaggatgaaggagagcagcttctacagcctgtgcctgaccatgtggcagatcccccaggagtttgtgaagctgcaggtgtcccaggaggagttcctgtgcatgaaggtgctgctgctgctgaacaccatccccctggagggcctgcggagccagacccagtttgaggagatgaggagcagctacatccgggagctgatcaaggccatcggcctgcggcagaagggcgtggtgagcagcagccagcgcttctaccagctgaccaagctgctggacaacctgcatgacctggtgaagcagctgcacctgtactgcctgaacaccttcatccagagccgggccctgtctgtggagttccctgagatgatgtctgaggtgattgctgcccagctgcccaagatcctggccggcatggtgaagcccctgctcttccacaagaagtag

SEQ ID NO: 95949 - DNA, 2496 bp, Artificial Sequence
  derived and/or modified sequence
atgaccgagctgaaggccaagggcccccgggccccccacgtggccggcggacctccttcacccgaagtcggaagccctctcctctgtagaccagccgctggtcctttccccggctcccagacgagcgacacactaccagaggtctccgctatacccatctccctggatggactgctcttccctcggccttgccagggtcaggacccaagcgatgagaaaactcaggaccaacaaagtttgagcgacgtcgagggagcttattccagggctgaggctacccgaggtgccggcggctcttcgagctcacctcccgaaaaggattctggccttctggacagcgtgctggacacgctcctggcaccctctggacctggacaatcgcaaccctccccccccgcgtgtgaagtaacatcaagctggtgcctgttcggacccgaattgccagaggatccaccagccgcacctgctacccaaagagtgctttctccgctgatgtctagatctggatgcaaggtgggtgattcttcgggaacagctgcagctcacaaggttctacccagggggctgtctcccgcacgccagctgctcctacctgctagtgagtcaccacactggtcgggcgcacccgtcaagccttcccctcaagccgccgctgtggaggtggaggaagaggatggatccgaatctgaggagtccgccggacccctactgaaaggaaagccacgggccctggggggggccgccgctggagggggggccgcagcagtgccccctggtgcagcggctggaggggtggccctggtgcccaaggaagacagcagattcagtgccccaagagtcgcactcgtagaacaggacgccccgatggctccgggtcggtcaccattggccacaacggtgatggactttatccacgtgcccatattacctctgaaccatgccctgcttgccgcacgtacccgccagctcctcgaagacgagagttacgatgggggggcgggagcagctagcgcttttgcgccaccccgctcgagcccttgcgcgagttccacacccgtggcggtgggagactttcctgactgcgcctacccccctgatgccgaacctaaagacgacgcctatccgctctattccgattttcagccccccgccctgaaaatcaaggaggaagaggagggggctgaagcaagcgcgagatctccaagatcatacctcgttgccggggcaaacccagccgcatttcctgactttccactgggacctcccccaccactgccgcctcgggcaactccgtcccgcccgggggaggctgcagttactgctgcccctgcatccgcgtctgtatcgtctgcttcatcttctggatctactttggagtgtattctgtataaagctgagggtgcccctccccagcagggaccttttgctcctccgccatgcaaagcacccggggcttctgggtgcctactcccaagggatggacttcctagcacctctgcctcggccgccgcggctggcgctgctcctgccttgtatccggctctcggactgaacgggctccctcaacttggataccaggcggccgtgcttaaagaaggactgcctcaggtataccccccttacctcaactatttgagacctgactcagaggcttcacaatcgccacagtatagctttgagagcttgccccagaagatttgtttgatctgtggcgatgaagcatcaggatgccactacggtgtccttacatgcggtagttgtaaagtcttctttaagcgggccatggaaggccagcacaactacttatgtgctggtcgcaacgactgtattgtggataagatccgcaggaagaattgtcccgcatgtagacttcgcaagtgttgtcaggcaggaatggttctgggaggctttagaaacctccatattgacgaccagatcacgttaattcaatatagctggatgagtctcatggtctttgggctggggtggcgttcctacaaacatgtttctggacaaatgctgtactttgctcctgacctgatcctgaatgagcaaaggatgaaagagtcgagtttctattcgctgtgtctgactatgtggcagattccacaagagttcgtaaaactccaggtaagccaggaagaatttctttgtatgaaagtgctcctgctgttgaatactattcccttggagggcttaagatcacagacccagtttgaggaaatgagaagctcttacatacgcgaattaatcaaagctataggtttgcgtcagaagggggtggtgagttcttcccaaaggttctatcaactcactaagctgttagacaatcttcatgacctggttaaacagctgcacctctattgcctgaatacattcatccagtccagagctctgagtgtggagttcccagagatgatgagcgaagtcattgctgcccagctcccgaagatcctcgccggcatggtgaagccccttttgttccacaagaaatag

SEQ ID NO: 95950 - DNA, 2496 bp, Artificial Sequence
  derived and/or modified sequence
atgaccgaattgaaagccaaggggcctagagccccacatgtggctggtgggcctccctctccggaggtgggctctcccttgctgtgcaggcccgcagccggacccttccccggaagtcagacttctgacactctgccagaggtgtcagcaatccccatcagtctagatggacttctgtttccacgtccatgccagggtcaggacccgagcgacgagaagacccaagaccagcagtctctgtcagacgtggaaggagcctactcccgcgctgaagccacacgcggtgcaggcggaagttcttcttccccacctgaaaaggactccggactgctggattcggtgctagatactctgctcgctccatctgggcctggtcagtcccagcccagcccaccggcatgtgaggttacatcgtcctggtgcctcttcggaccagaactcccagaggatccccctgccgctcctgccacccagagagtcctgagtccactcatgtccaggtcagggtgcaaggtgggcgacagttctggtactgctgctgctcataaagtgttgccaagaggtctatcccccgctaggcagctccttctccctgctagcgaatccccccactggtccggcgctcccgtgaaaccttcccctcaagcagcagcggtggaggttgaggaggaggatggaagcgagtcagaggagtcagctggccctcttctcaaaggtaagcctcgcgctttgggaggagcggctgcaggtggcggtgcagccgctgtgccaccgggagccgcagccggtggagtggcactggtgcctaaggaagactcaagatttagcgcaccaagagttgctctcgtcgagcaggacgcgcctatggcaccaggcaggagtcccctggccaccaccgttatggactttatccacgtgcccattctccctcttaaccacgcactgctagctgctaggacgcgccaactcctagaagatgagagctatgatggcggtgccggtgcagcctctgcatttgcccctccccgatctagcccctgtgcaagctcgacccctgtcgctgtgggcgactttccggactgtgcctatccaccagacgccgagcctaaggacgatgcgtatccgttatacagcgattttcagccaccagccctcaagatcaaggaagaggaagagggagctgaggctagcgcccgaagtcctcgcagctatctggtcgccggagctaaccccgctgcttttccagactttccactaggaccccctccccctctgccaccccgagctactccatctagaccaggcgaagccgcagttacagctgcgccagcaagcgcatccgtatccagtgcgtctagttcaggcagtacacttgagtgtatcctatacaaagctgagggggctcccccacagcagggccctttcgccccacccccttgcaaagctcctggagcttccggctgcctgctgcctcgcgacggccttccaagcacctccgcctccgccgctgcggctggggctgcaccagcactctatcccgcactggggctgaatgggcttcctcagcttggataccaagctgctgtgctgaaggaggggttgcctcaggtatatcccccatacctgaactacctgcgcccagattccgaggcctcccaatctcctcagtactctttcgagtcgctgcctcaaaaaatttgcctcatctgtggcgatgaggccagcggctgtcactatggtgtgcttacatgtggcagctgcaaagtgttcttcaaaagagcaatggaggggcagcacaactatctatgtgctgggcgtaacgattgtatcgttgacaaaatcaggagaaagaactgccccgcttgccggctaaggaagtgctgtcaggcaggaatggtcttggggggtttccggaacttacacatcgatgaccagataacactgatccaatattcctggatgagtctgatggtgtttgggctgggatggcgctcctacaagcacgtttccggccagatgctttactttgctcccgatctcatcctcaatgagcagaggatgaaggaatcgagtttctactcgctgtgtctgacgatgtggcagattccacaggagttcgtgaagttgcaggtgtcgcaagaagagtttctatgtatgaaggttctcctgctcctgaataccattcctctggaggggttgaggagccagacacagttcgaagagatgagatcttcgtacatcagagaactcattaaggccatcggcctcagacagaagggagtggttagctcctcacaacgcttctatcagctgaccaagctgctggacaacctgcatgatctggtgaaacagcttcacctttactgtctcaatacttttattcagtctcgtgcccttagtgtcgaatttcccgagatgatgtctgaggtcattgcagcgcagctccccaagatcctagctggcatggtcaagccattactttttcataaaaagtag

SEQ ID NO: 95951 - DNA, 2496 bp, Artificial Sequence
  derived and/or modified sequence
atgactgagctgaaggcaaagggtccccgggctccccacgtggcgggcggcccgccctcccccgaggtcggatccccactgctgtgtcgcccagccgcaggtccgttcccggggagccagacctcggacaccttgcctgaagtttcggccatacctatctccctggacgggctactcttccctcggccctgccagggacaggacccctccgacgaaaagacgcaggaccagcagtcgctgtcggacgtggagggcgcatattccagagctgaagctacaaggggtgctggaggcagcagttctagtcccccagaaaaggacagcggactgctggacagtgtcttggacactctgttggcgccctcaggtcccgggcagagccaacccagccctcccgcctgcgaggtcaccagctcttggtgcctgtttggccccgaacttcccgaagatccaccggctgcccccgccacccagcgggtgttgtccccgctcatgagccggtccgggtgcaaggttggagacagctccgggacggcagctgcccataaagtgctgccccggggcctgtcaccagcccggcagctgctgctcccggcctctgagagccctcactggtccggggccccagtgaagccgtctccgcaggccgctgcggtggaggttgaggaggaggatggctctgagtccgaggagtctgcgggtccgcttctgaagggcaaacctcgggctctgggtggcgcggcggctggaggaggagccgcggctgtcccgccgggggcggcagcaggaggcgtcgccctggtccccaaggaagattcccgcttctcagcgcccagggtcgccctggtggagcaggacgcgccgatggcgcccgggcgctccccgctggccaccacggtgatggatttcatccacgtgcctatcctgcctctcaatcacgccttattggcagcccgcactcggcagctgctggaagacgaaagttacgacggcggggccggggctgccagcgcctttgccccgccgcggagttcaccctgtgcctcgtccaccccggtcgctgtaggcgacttccccgactgcgcgtacccgcccgacgccgagcccaaggacgacgcgtaccctctctatagcgacttccagccgcccgctctaaagataaaggaggaggaggaaggcgcggaggcctccgcgcgctccccgcgttcctaccttgtggccggtgccaaccccgcagccttcccggatttcccgttggggccaccgcccccgctgccgccgcgagcgaccccatccagacccggggaagcggcggtgacggccgcacccgccagtgcctcagtctcgtctgcgtcctcctcggggtcgaccctggagtgcatcctgtacaaagcggagggcgcgccgccccagcagggcccgttcgcgccgccgccctgcaaggcgccgggcgcgagcggctgcctgctcccgcgggacggcctgccctccacctccgcctctgccgccgccgccggggcggcccccgcgctctaccctgcactcggcctcaacgggctcccgcagctcggctaccaggccgccgtgctcaaggagggcctgccgcaggtctacccgccctatctcaactacctgaggccggattcagaagccagccagagcccacaatacagcttcgagtcattacctcagaagatttgtttaatctgtggggatgaagcatcaggctgtcattatggtgtccttacctgtgggagctgtaaggtcttctttaagagggcaatggaagggcagcacaactacttatgtgctggaagaaatgactgcatcgttgataaaatccgcagaaaaaactgcccagcatgtcgccttagaaagtgctgtcaggctggcatggtccttggaggttttcgaaacttacatattgatgaccagataactctcattcagtattcttggatgagcttaatggtgtttggtctaggatggagatcctacaaacacgtcagtgggcagatgctgtattttgcacctgatctaatactaaatgaacagcggatgaaagaatcatcattctattcattatgccttaccatgtggcagatcccacaggagtttgtcaagcttcaagttagccaagaagagttcctctgtatgaaagtattgttacttcttaatacaattcctttggaagggctacgaagtcaaacccagtttgaggagatgaggtcaagctacattagagagctcatcaaggcaattggtttgaggcaaaaaggagttgtgtcgagctcacagcgtttctatcaacttacaaaacttcttgataacttgcatgatcttgtcaaacaacttcatctgtactgcttgaatacatttatccagtcccgggcactgagtgttgaatttccagaaatgatgtctgaagttattgctgcacaattacccaagatattggcagggatggtgaaaccccttctctttcataaaaagtga

SEQ ID NO: 95952 - DNA, 1020 bp, Artificial Sequence
  derived and/or modified sequence
atggagggccagcacaactacctgtgcgccggcagaaacgactgcatcgtggacaagatcagaagaaagaactgccccgcctgcagactgagaaagtgctgccaggccggcatggtgctgggcggcagaaagttcaagaagttcaacaaggtgagagtggtgagagccctggacgccgtggccctgccccagcccgtgggcgtgcccaacgagagccaggccctgagccagagattcaccttcagccccggccaggacatccagctgatcccccccctgatcaacctgctgatgagcatcgagcccgacgtgatctacgccggccacgacaacaccaagcccgacaccagcagcagcctgctgaccagcctgaaccagctgggcgagagacagctgctgagcgtggtgaagtggagcaagagcctgcccggcttcagaaacctgcacatcgacgaccagatcaccctgatccagtacagctggatgagcctgatggtgttcggcctgggctggagaagctacaagcacgtgagcggccagatgctgtacttcgcccccgacctgatcctgaacgagcagagaatgaaggagagcagcttctacagcctgtgcctgaccatgtggcagatcccccaggagttcgtgaagctgcaggtgagccaggaggagttcctgtgcatgaaggtgctgctgctgctgaacaccatccccctggagggcctgagaagccagacccagttcgaggagatgagaagcagctacatcagagagctgatcaaggccatcggcctgagacagaagggcgtggtgagcagcagccagagattctaccagctgaccaagctgctggacaacctgcacgacctggtgaagcagctgcacctgtactgcctgaacaccttcatccagagcagagccctgagcgtggagttccccgagatgatgagcgaggtgatcgccgcccagctgcccaagatcctggccggcatggtgaagcccctgctgttccacaagaagtag

SEQ ID NO: 95953 - DNA, 1020 bp, Artificial Sequence
  derived and/or modified sequence
atggaagggcaacacaactacctctgcgcgggtcggaatgactgtatcgtggacaagatcaggagaaagaactgccccgcctgtcgcctcaggaaatgttgccaagcaggaatggtcctagggggccgcaagtttaaaaaattcaacaaagtccgggttgtcagggcactcgacgccgttgctctacctcagccggttggggttccaaacgaaagtcaagccctatctcagcggttcaccttcagccctggccaagatattcaactgatccctcccctcatcaatctactgatgtctatcgaaccagatgtgatctacgctggtcacgacaacacaaagccggatacttcaagttctctgctgacgtcactcaaccagctgggggagaggcagctgttatctgttgtgaaatggagtaaatcgttgcccggcttccgtaacttacatatcgacgaccagataacattgattcagtactcctggatgtccttgatggtgtttggtctcggctggagaagctataaacacgtgtcaggccaaatgctttactttgccccggacctaattcttaatgagcagagaatgaaggaatccagcttctactccctatgcctgacaatgtggcagatcccccaggaatttgtgaaactgcaggtttcacaggaagaatttctttgcatgaaagtgctgctgctgctcaatactatcccactggaagggttgcgcagccagacccagttcgaagagatgcggtcctcatacatcagggagctgatcaaagcaattggtttaaggcagaaaggcgttgtatcctcctctcagcgcttctaccagctcactaagctgcttgataatctgcacgatctcgtgaaacagctacatttgtattgcttgaacactttcatacaatcgagagcgctttcggtggagttcccggaaatgatgagcgaggtgattgccgcacagctgcctaaaattcttgccggaatggtaaaaccactgctgttccataaaaagtag

SEQ ID NO: 95954 - DNA, 1020 bp, Artificial Sequence
  derived and/or modified sequence
atggagggccagcacaactacctgtgtgccggcagaaatgactgcatcgtggacaagatccggaggaagaactgcccagcctgccgcctgaggaagtgctgccaggccggcatggtgctgggcggcaggaagttcaagaagttcaacaaggtgcgggtggtgcgggccctggatgctgtggccctgccccagcctgtgggcgtgcccaatgaaagccaggccctgagccagcgcttcaccttcagccctggccaggacatccagctgatccccccactcatcaacctgctgatgagcattgaaccagatgtgatctatgccggccatgacaacaccaagccagacaccagcagcagcctgctgaccagcctgaaccagctgggggagcggcagctgctgtctgtggtgaagtggagcaagagcctgcccggcttcaggaacctgcacattgatgaccagatcaccctcatccagtacagctggatgagcctgatggtgtttggcctgggctggaggagctacaagcacgtgtctggccagatgctgtactttgccccagacctgatcctgaatgagcagaggatgaaggagagcagcttctacagcctgtgcctgaccatgtggcagatcccccaggagtttgtgaagctgcaggtgtcccaggaggagttcctgtgcatgaaggtgctgctgctgctgaacaccatccccctggagggcctgcggagccagacccagtttgaggagatgaggagcagctacatccgggagctgatcaaggccatcggcctgcggcagaagggcgtggtgagcagcagccagcgcttctaccagctgaccaagctgctggacaacctgcatgacctggtgaagcagctgcacctgtactgcctgaacaccttcatccagagccgggccctgtctgtggagttccctgagatgatgtctgaggtgattgctgcccagctgcccaagatcctggccggcatggtgaagcccctgctcttccacaagaagtag

SEQ ID NO: 95955 - DNA, 1020 bp, Artificial Sequence
  derived and/or modified sequence
atggagggccagcacaactacctgtgcgccggccggaacgactgcatagtggataagatccgtaggaagaattgcccggcttgccggctgcgaaagtgctgtcaggccggcatggttctgggaggcagaaagttcaaaaagttcaacaaggtgcgggtggtgagagctctggatgccgttgctctgccccaacccgtgggggtccccaatgagtcccaggccctctcacagcgcttcacattcagtcctggacaggacattcagcttattccaccgttaattaatctgctgatgagcattgaacctgatgtgatttatgcgggacacgacaacacgaagccagatacctcatctagtctgctcacaagcttgaaccagctgggggaaagacagttgctcagcgtggtcaaatggtctaagtctctcccgggatttagaaacctccatatcgatgaccagataaccttaatccagtactcatggatgagtttaatggtattcggactgggctggcgaagttataaacatgtttccggacagatgctgtatttcgcccccgacttgatcctcaatgagcaacgcatgaaagaaagctctttctactcactctgcctgacaatgtggcagatcccccaagagtttgtcaagctgcaggtgtctcaagaggaattcctttgtatgaaggtactcttgctgctcaacaccatacctctggagggcctgaggtcccaaacccagtttgaagagatgcgttcaagctatatccgagagctgataaaagcgatcggcttaagacagaaaggagtggtttccagtagccagagattttatcagctaaccaagctcctcgataatcttcacgatctcgtaaaacagttgcacctctactgtttgaacacattcatccagagccgggccctgtcagttgagtttcctgagatgatgagcgaagtgatcgctgctcaattgcccaagatacttgctgggatggtcaaacctttgctgttccataagaaatag

SEQ ID NO: 95956 - DNA, 1020 bp, Artificial Sequence
  derived and/or modified sequence
atggagggccagcacaactatctgtgtgccggacgtaacgattgcatagttgataaaattcgcaggaagaattgtcctgcttgtaggttgcgcaagtgttgccaggctggaatggttctcggcggaagaaaatttaagaagtttaataaggtgagggtggtaagggcactggatgctgtggccctgccccagcctgtgggagtgcctaatgagtcccaagctctgtcacagagatttactttttccccagggcaggacatacagctgatacctccattaataaatctccttatgagcatcgaacccgatgtcatttatgcaggtcatgacaacaccaagccagatactagttctagtctattgacttccttgaaccaactgggagaaagacaactgctctccgtggtaaaatggtctaaaagcttgcctgggtttcgcaacctacatatcgatgatcagataacccttatccagtacagctggatgagcctcatggtgttcggactgggctggcgcagctacaaacacgtctctggccagatgctctatttcgctccggatctgatcttgaacgagcagagaatgaaggaaagtagcttctatagcctatgcctaactatgtggcaaatccctcaagagttcgtgaagctgcaggtctctcaggaggagtttctatgtatgaaagtcctccttctgctcaatactattcctcttgaaggcctaaggagtcaaacgcaatttgaagagatgagaagtagttacattagggagcttatcaaggctattggacttcgacagaaaggtgtggttagctccagccagcggttttaccagctcacaaaattgctcgacaatttacatgacctggtgaagcagttgcacctgtactgcctgaataccttcatacaatctagggcattatccgtggagttccccgagatgatgtccgaagtgatcgcagcccagttgcccaagatccttgcaggcatggtaaagcccctcctctttcataaaaagtag

SEQ ID NO: 95957 - protein, 156 aa, Artificial Sequence
  derived and/or modified sequence
SLLLWFLLFLLLLPPLPVLLADPGAPTPAGLWTWLRNSLRPSPSFTHFLLTHGRWFWEFVNATFIREMLMRLVLTVRSNLIPSPPTYNSAHDYISWESFSNFFKTSGKMGPGFTKALGHGVDLGHIYGDNLERQYQLRLFKDGKLKYQVLDGEMYP

SEQ ID NO: 95958 - DNA, 471 bp, Artificial Sequence
  derived and/or modified sequence
agcctgctgctgtggttcctgctgttcctgctgctgctgccccccctgcccgtgctgctggccgaccccggcgcccccacccccgccggcctgtggacctggctgagaaacagcctgagacccagccccagcttcacccacttcctgctgacccacggcagatggttctgggagttcgtgaacgccaccttcatcagagagatgctgatgagactggtgctgaccgtgagaagcaacctgatccccagcccccccacctacaacagcgcccacgactacatcagctgggagagcttcagcaacttcttcaagaccagcggcaagatgggccccggcttcaccaaggccctgggccacggcgtggacctgggccacatctacggcgacaacctggagagacagtaccagctgagactgttcaaggacggcaagctgaagtaccaggtgctggacggcgagatgtacccctag

SEQ ID NO: 95959 - DNA, 471 bp, Artificial Sequence
  derived and/or modified sequence
agccttcttctgtggtttttgctgttcctgctactcttgccccctctccccgtcctactggcagatcccggagcgcccacaccagcgggcctgtggacgtggcttcgaaatagtctgaggccatctccgtcttttacgcattttctcctgactcatgggcggtggttttgggagtttgttaacgcaacctttatcagagaaatgctgatgcggctcgttttgactgtgaggagcaaccttatcccttccccacccacatataatagcgctcacgattacatttcatgggaaagcttttcaaatttcttcaaaaccagcggcaagatgggtcccggctttacaaaggcccttggccacggggttgacctcggccatatttatggggacaacttggaacgccagtaccagctgaggctgtttaaggatgggaagctcaagtaccaggtccttgatggggagatgtatccttag

SEQ ID NO: 95960 - DNA, 471 bp, Artificial Sequence
  derived and/or modified sequence
agcctgctgctgtggttcctgctcttcctgctgctgctgccccccctgcctgtgctgctggccgaccccggggcccccaccccagctggcctgtggacctggctgaggaacagcctgcggcccagccccagcttcacccacttcctgctgacccacggccgctggttctgggagtttgtgaatgccaccttcatccgggagatgctgatgaggctggtgctgactgtgcgcagcaacctgatccccagcccccccacctacaacagcgcccatgactacatctcctgggagagcttcagcaacttcttcaagaccagcggcaagatgggccctggcttcaccaaggccctgggccatggagtggacctgggccacatctatggagacaacctggagcggcagtaccagctgcggctcttcaaggatggcaagctgaagtaccaggtgctggatggagagatgtacccctag

SEQ ID NO: 95961 - DNA, 471 bp, Artificial Sequence
  derived and/or modified sequence
agcctgctgctgtggttcctgctgttcctgctgctgctgccccccctgcccgttctcctagccgatcctggggctccaacgcccgccggactgtggacctggctgaggaatagcctcagaccgtccccgtcttttacgcacttcctactcactcatgggaggtggttctgggagtttgtgaacgccacctttatcagggaaatgcttatgcgcttagtactgaccgttcgcagcaatctgattccatccccccccacctataattcagcccacgactacatctcctgggagagcttcagtaacttcttcaagactagtggtaagatggggcccggttttactaaggctctgggccacggtgtcgacctaggacatatctatggcgacaatctcgaaaggcagtaccagctgagactgttcaaggatggaaagttaaagtaccaggtgctggacggcgaaatgtatccctag

SEQ ID NO: 95962 - DNA, 471 bp, Artificial Sequence
  derived and/or modified sequence
agcctattgctttggtttttgttgtttctgctgctcctacctccactgcccgtgttgttagcagacccgggagctccgacaccggctggtctgtggacctggctccgcaactcactgaggccgtccccctcattcacccacttcctgctcacccatgggagatggttctgggagttcgtaaatgcaacgtttattagagaaatgctgatgcgtctggttcttaccgttagatctaatctgatcccaagcccccctacgtacaactccgcccacgattatatttcttgggaaagctttagcaatttctttaagaccagtgggaagatgggccctgggttcacgaaggccctgggccacggcgtggatttgggccatatttatggagataatctggagagacagtatcagctcagactttttaaagatggcaagctgaagtaccaggtgttagacggagagatgtatccatag

SEQ ID NO: 95963 - DNA, 468 bp, Artificial Sequence
  derived and/or modified sequence
agtctcttgctctggttcttgctgttcctgctcctgctcccgccgctccccgtcctgctcgcggacccaggggcgcccacgccagctggcctgtggacctggctccggaattcactgcggcccagcccctctttcacccacttcctgctcactcacgggcgctggttctgggagtttgtcaatgccaccttcatccgagagatgctcatgcgcctggtactcacagtgcgctccaaccttatccccagtccccccacctacaactcagcacatgactacatcagctgggagtctttctccaacttcttcaaaacttctggcaagatgggtcctggcttcaccaaggccttgggccatggggtagacctcggccacatttatggagacaatctggagcgtcagtatcaactgcggctctttaaggatgggaaactcaagtaccaggtgctggatggagaaatgtacccg

SEQ ID NO: 95964 - DNA, 133 bp, Artificial Sequence
  derived and/or modified sequence
cacccatctgtaggaccaggaagcctgatgtgggagagaacagcaggctaaatccagggttggtctctacagcagagggaatcacaagcctgttagcaagtgaagaaccaacactggcaagagtgtgaaggcc

SEQ ID NO: 95965 - DNA, 2889 bp, Artificial Sequence
  derived and/or modified sequence
atgctgagagacgtgatccaggagtacgacgagtacttccccgagatcatcgagagagccagctacaccctggagaagatgttcagagtgaacctgaaggagatcgacaagcagagcagcctgtacatcctgatcagcacccaggagagcagcgccggcatcctgggcaccaccaaggacacccccaagctgggcctgctgatggtgatcctgagcgtgatcttcatgaacggcaacaaggccagcgaggccgtgatctgggaggtgctgagaaagctgggcctgagacccggcgtgagacacagcctgttcggcgaggtgagaaagctgatcaccgacgagttcgtgaagcagaagtacctggagtacaagagagtgcccaacagcagaccccccgagtacgagttcttctggggcctgagaagctaccacgagaccagcaagatgaaggtgctgaagttcgcctgcagagtgcagaagaaggaccccaaggactgggccgtgcagtacagagaggccgtggagatggaggtgcaggccgccgccgtggccgtggccgaggccgaggccagagccgaggccagagcccagatgggcatcggcgaggaggccgtggccggcccctggaactgggacgacatggacatcgactgcctgaccagagaggagctgggcgacgacgcccaggcctggagcagattcagcttcgagatcgaggccagagcccaggagaacgccgacgccagcaccaacgtgaacttcagcagaggcgccagcaccagagccggcttcagcgacggcgccagcatcagcttcaacggcgcccccagcagcagcggcggcttcagcggcggccccggcatcaccttcggcgtggcccccagcaccagcgccagcttcagcaacaccgccagcatcagcttcggcggcaccctgagcaccagcagcagcttcagcagcgccgccagcatcagcttcggctgcgcccacagcaccagcaccagcttcagcagcgaggccagcatcagcttcggcggcatgccctgcaccagcgccagcttcagcggcggcgtgagcagcagcttcagcggccccctgagcaccagcgccaccttcagcggcggcgccagcagcggcttcggcggcaccctgagcaccaccgccggcttcagcggcgtgctgagcaccagcaccagcttcggcagcgcccccaccaccagcaccgtgttcagcagcgccctgagcaccagcaccggcttcggcggcatcctgagcaccagcgtgtgcttcggcggcagccccagcagcagcggcagcttcggcggcaccctgagcaccagcatctgcttcggcggcagcccctgcaccagcaccggcttcggcggcaccctgagcaccagcgtgagcttcggcggcagcagcagcaccagcgccaacttcggcggcaccctgagcaccagcatctgcttcgacggcagccccagcaccggcgccggcttcggcggcgccctgaacaccagcgccagcttcggcagcgtgctgaacaccagcaccggcttcggcggcgccatgagcaccagcgccgacttcggcggcaccctgagcaccagcgtgtgcttcggcggcagccccggcaccagcgtgagcttcggcagcgccctgaacaccaacgccggctacggcggcgccgtgagcaccaacaccgacttcggcggcaccctgagcaccagcgtgtgcttcggcggcagccccagcaccagcgccggcttcggcggcgccctgaacaccaacgccagcttcggctgcgccgtgagcaccagcgccagcttcagcggcgccgtgagcaccagcgcctgcttcagcggcgcccccatcaccaaccccggcttcggcggcgccttcagcaccagcgccggcttcggcggcgccctgagcaccgccgccgacttcggcggcacccccagcaacagcatcggcttcggcgccgcccccagcaccagcgtgagcttcggcggcgcccacggcaccagcctgtgcttcggcggcgcccccagcaccagcctgtgcttcggcagcgccagcaacaccaacctgtgcttcggcggcccccccagcaccagcgcctgcttcagcggcgccaccagccccagcttctgcgacggccccagcaccagcaccggcttcagcttcggcaacggcctgagcaccaacgccggcttcggcggcggcctgaacaccagcgccggcttcggcggcggcctgggcaccagcgccggcttcagcggcggcctgagcaccagcagcggcttcgacggcggcctgggcaccagcgccggcttcggcggcggccccggcaccagcaccggcttcggcggcggcctgggcaccagcgccggcttcagcggcggcctgggcaccagcgccggcttcggcggcggcctggtgaccagcgacggcttcggcggcggcctgggcaccaacgccagcttcggcagcaccctgggcaccagcgccggcttcagcggcggcctgagcaccagcgacggcttcggcagcagacccaacgccagcttcgacagaggcctgagcaccatcatcggcttcggcagcggcagcaacaccagcaccggcttcaccggcgagcccagcaccagcaccggcttcagcagcggccccagcagcatcgtgggcttcagcggcggccccagcaccggcgtgggcttctgcagcggccccagcaccagcggcttcagcggcggccccagcaccggcgccggcttcggcggcggccccaacaccggcgccggcttcggcggcggccccagcaccagcgccggcttcggcagcggcgccgccagcctgggcgcctgcggcttcagctacggctag

SEQ ID NO: 95966 - DNA, 2889 bp, Artificial Sequence
  derived and/or modified sequence
atgctgcgagatgttattcaggagtatgatgagtacttccccgagattatcgaacgcgcctcctatacactggaaaaaatgtttcgggtgaacctcaaggagatcgacaaacaaagctccctctacattctgataagtacgcaggagtcaagcgcgggcatcttgggtacaaccaaagacactcctaagctcggactcctgatggtcattctgagcgtcattttcatgaatgggaataaagccagtgaggcggtcatttgggaggtcctccgcaagctgggcttacgacctggcgtgagacatagcctgtttggcgaagtgcgcaagctgattaccgacgaattcgtaaaacagaagtatctggagtacaaacgagtgcccaattcaaggccacctgaatatgagttcttttggggactccggtcatatcacgaaactagcaaaatgaaagtgttgaaattcgcctgtagagtccaaaaaaaggaccctaaggattgggccgtgcagtaccgggaggccgtcgagatggaggttcaggctgccgccgtggccgtcgcggaagcggaagctcgggcagaggcgcgagcccagatgggaatcggggaggaagctgtcgccggcccatggaactgggatgatatggatatcgactgcctgaccagggaggaattgggagacgatgctcaggcctggtcacgtttctccttcgagatcgaagcccgggcccaggagaacgccgatgcaagcacgaatgtgaacttcagccgaggtgcgtcaaccagagccggcttttccgatggtgcaagtatttcatttaacggcgccccttcatctagcggggggtttagcggaggacctgggatcactttcggcgtcgcacccagcacatccgcctctttttcaaacaccgcgagcatttcctttggcggcaccttgtccacatcttccagcttttcgtctgccgcctccataagttttggctgtgcacattctacttctacaagttttagtagcgaggccagtatttctttcggcggaatgccgtgcacctccgcctcattcagtggcggagtgagctcttcttttagcggaccgctgtcaacatcagctactttctccggtggcgcgtctagtggctttggaggcactctcagcacaactgcgggattctcaggagttctgtctacctccaccagcttcggcagtgcgccaaccacttctacagtgtttagctccgcactgagtacatctactggcttcggtgggattctgtccacgagcgtctgctttggtgggtcacccagctcttcggggtctttcggaggtaccctgagcacttctatatgttttggaggttcgccttgtacctctactgggtttggcggtaccctcagtacctccgtgtcatttggcggctctagtagcaccagcgctaactttggcggcacactctcaacatccatctgctttgatgggtcgcccagtaccggcgcgggattcggcggggccttaaacactagtgcaagttttgggagtgtccttaatacttcaactggttttggcggagccatgtccactagcgctgactttgggggaacactgagcacctccgtctgttttggtgggtcccctggcaccagtgtaagttttggttcagcgttaaatacgaacgcagggtacgggggagccgtgtctacaaatactgattttgggggaacactttcaacctctgtgtgctttggtggatcacccagcaccagtgctggattcggtggtgcactgaataccaacgcttcctttgggtgtgccgtttctaccagcgctagcttctctggcgccgtgtcgacctcagcgtgctttagcggcgccccgattactaacccaggctttggtggagcattcagtaccagcgctgggtttgggggtgcgctcagtacggccgctgactttggaggcacacctagcaactctatcggctttggcgccgcacccagtacctccgtgtccttcggaggggcccatggcaccagcctttgcttcggcggggcgccaagcacttcactctgtttcggatcagccagcaacacaaatctgtgctttgggggccctccctcaaccagcgcatgcttcagtggcgctacatctccatccttttgcgatggcccgagtacctctacgggcttctctttcggcaacggactctcaaccaatgccggcttcggtggtgggctgaacacaagtgctggattcggtggagggctcggaacgagcgccggtttctctggtggactaagtacaagctctggttttgacgggggcctgggcacctctgccggattcggaggaggcccagggacatcaactgggtttgggggtggcttgggcacatcagcagggttctctggtggtctgggcactagcgcaggattcggcgggggcctggttacttctgatggatttggaggcggtttagggaccaatgccagctttggcagcacattgggcactagtgccggcttttccgggggcctaagtacatcagatggatttggcagccggcccaatgcatcttttgaccgcggattgtctaccataatcggcttcggcagcggctccaataccagtacgggatttactggggagccatccacttctaccggcttttcatcaggaccaagttccatcgtgggattctccggtggaccttcaaccggcgtggggttctgttccgggccgagcacatccgggttctctggcggaccttccacaggtgccggcttcggcggtggtcctaacactggggcagggttcggcggtgggccctccacctctgctgggttcggcagcggtgccgcctctctcggggcctgtggatttagctacggatag

SEQ ID NO: 95967 - DNA, 2889 bp, Artificial Sequence
  derived and/or modified sequence
atgctgagagatgtgatccaggagtatgatgagtacttccctgagatcatcgagcgggccagctacaccctggagaagatgttccgggtgaacctgaaggagattgacaagcagagcagcctgtacatcctgatcagcacccaggagagcagcgctggcatcctgggcaccaccaaggacacccccaagctgggcctgctgatggtgatcctgagcgtcatcttcatgaatggaaacaaggccagcgaggccgtcatctgggaggtgctgaggaagctgggcctgcggcctggggtgcgccacagcctgtttggagaggtgaggaagctgatcacagatgaatttgtgaagcagaagtacctggagtacaagagggtgcccaacagccggcccccagaatatgagttcttctggggcctgcggagctaccacgagaccagcaagatgaaggtgctgaagtttgcctgccgggtgcagaagaaggaccccaaggactgggccgtgcagtaccgggaggccgtggagatggaggtgcaggccgctgctgtggccgtggccgaggccgaggcccgggcagaggcccgggcccagatgggcatcggggaggaggccgtggccggcccctggaactgggatgacatggacatcgactgcctgacccgggaggagctgggagatgatgcccaggcctggagccgcttctcctttgaaattgaggcccgggcccaggagaatgctgatgccagcaccaacgtgaacttcagcagaggagccagcacccgggccggcttcagtgatggagccagcatctccttcaatggagcccccagcagcagcggcggcttcagcggcggccctggcatcaccttcggcgtggcccccagcaccagcgccagcttcagcaacacagccagcatcagctttggaggcaccctgagcaccagcagcagcttcagcagcgctgccagcatcagctttggctgtgcccacagcaccagcaccagcttcagcagcgaggccagcatcagctttggaggcatgccctgcaccagcgccagcttctctggaggagtgagcagcagcttcagcggccccctgagcaccagcgccaccttctctggaggagccagcagcggctttggaggcaccctgagcaccacagctggcttctctggagtgctgagcaccagcaccagctttggcagcgcccccaccaccagcaccgtcttcagcagcgccctgagcaccagcacaggctttggaggcatcctgagcacctctgtgtgcttcggcggcagccccagcagcagcggcagctttggaggcaccctgagcaccagcatctgcttcggcggcagcccctgcaccagcacaggctttggaggcaccctgagcacctctgtgtcctttggaggcagcagcagcaccagcgccaactttggaggcaccctgagcaccagcatctgctttgatggcagccccagcactggagctggctttggaggagccctgaacaccagcgccagctttggatctgtgctgaacaccagcacaggctttggaggagccatgagcaccagcgctgactttggaggcaccctgagcacctctgtgtgcttcggcggcagccctggcacctctgtgtcctttggcagcgccctgaacaccaatgccggctacggcggcgctgtgtccaccaacacagactttggaggcaccctgagcacctctgtgtgcttcggcggcagccccagcaccagcgctggctttggaggagccctgaacaccaatgccagctttggctgtgctgtgtccaccagcgccagcttctctggagctgtgtccaccagcgcctgcttcagcggggcccccatcaccaaccctggctttggaggagccttcagcaccagcgctggctttggaggagccctgagcacagctgctgactttggaggcacccccagcaacagcatcggctttggagctgcccccagcacctctgtgtcctttggaggagcccacggcaccagcctgtgcttcggcggggcccccagcaccagcctgtgcttcggcagcgccagcaacaccaacctgtgcttcggcggcccccccagcaccagcgcctgcttcagcggggccaccagccccagcttctgtgatggccccagcaccagcacaggcttctcctttggaaatggcctgagcaccaatgccggctttggaggcggcctgaacaccagcgctggctttggaggcggcctgggcaccagcgctggcttcagcggcggcctgagcaccagcagcggctttgatggcggcctgggcaccagcgctggctttggaggcggccctggcaccagcacaggctttggaggcggcctgggcaccagcgctggcttcagcggcggcctgggcaccagcgctggctttggaggcggcctggtgaccagtgatggctttggaggcggcctgggcaccaatgccagctttggcagcaccctgggcaccagcgctggcttcagcggcggcctgagcaccagtgatggcttcggcagccggcccaatgccagctttgaccggggcctgagcaccatcatcggcttcggcagcggcagcaacaccagcacaggcttcaccggggagcccagcaccagcacaggcttcagcagcggccccagcagcatcgtgggcttcagcggcggccccagcactggagtgggcttctgcagcggccccagcaccagcggcttcagcggcggccccagcactggagctggctttggaggcggccccaacacaggagctggctttggaggcggccccagcaccagcgctggctttggaagtggagctgccagcctgggcgcctgtggcttctcctatggatag

SEQ ID NO: 95968 - DNA, 2889 bp, Artificial Sequence
  derived and/or modified sequence
atgctgcgggacgtgatccaggagtacgacgagtacttccccgagataatcgagagggcatcttacaccttagagaagatgttccgcgtaaatctgaaggaaatcgacaagcagtcaagcttgtatatcctgattagcacccaagagagcagcgctggcatcctcgggacgacaaaggatactcccaaactgggcctgctcatggtgatcctttccgtcatctttatgaacggaaacaaggcttcagaagcagtgatatgggaggtgttgagaaagctcgggctccggcccggggtgaggcacagcctattcggagaggtgagaaaactgatcaccgacgaattcgtaaagcagaagtatcttgagtataaaagggttcccaacagcaggccaccagaatatgagttcttttggggtctcagatcctatcacgagacttcaaagatgaaagttctgaagttcgcatgccgggtacagaaaaaagacccaaaagattgggccgtccagtatcgtgaagcggttgagatggaagtgcaagcagcagcagttgccgtagccgaagcggaggccagggcagaggcccgggcgcagatggggattggagaggaagccgtggcgggtccgtggaactgggacgatatggatatcgattgcctgacccgcgaggaactcggagatgacgcgcaggcctggtctcgcttcagcttcgaaatcgaggcccgtgcccaagaaaacgcagacgccagtacgaacgtcaatttcagtcggggggcttctacaagagcaggattctcagacggtgcaagcataagctttaacggggctccaagctcaagcgggggcttcagcggaggaccaggcattacattcggagtcgctccgagcacttcagcctctttttcaaataccgccagtatcagttttggtgggaccctgtctacaagcagttcattctctagcgccgcttccatttccttcggctgcgcccacagtaccagtaccagcttcagcagtgaagcatcaatatccttcggcggtatgccctgcacctcagccagcttttcaggcggcgtgtcttcttcttttagcggacccctcagcacctccgcaaccttctctggtggcgccagctctggatttggcggcaccctttccacaacagctggcttttccggcgtgctcagcacgtctacttcttttggatccgcacccaccactagcacagtgttttcatccgcattgtccacgtccaccggcttcggcggcatcctctcaacgtctgtctgttttgggggtagtccgagcagttccggttcttttggggggacactgagcacctccatatgctttggcggcagtccgtgcacaagcacgggatttgggggcactctttcgacgagcgtcagttttggcggcagcagctccacatcagcaaatttcggaggcacactatccacctcaatctgtttcgacggctccccatctacaggcgccggatttggaggcgcactgaacacctccgcctcttttggaagcgtactgaacacgagtactggtttcggtggcgccatgtcgactagcgccgatttcggcggaacgcttagcacctcagtttgttttggcggctcccctgggacatcagtgtcatttggctccgccttaaacactaacgctgggtacgggggcgccgtcagcacgaacacagacttcggaggtactctcagcacctccgtctgctttggcggctccccctctaccagcgcaggttttggcggggccctgaatacaaatgctagctttgggtgtgccgttagcacctctgcatcattttcaggcgcagtctcaaccagcgcttgcttttctggggctccaatcaccaaccccgggttcggcggcgcattctccacgtctgcaggctttgggggcgctctatcaactgccgctgatttcggtggtacgccgtccaacagtatcggttttggggctgcccctagtacgtctgtgagctttgggggagcccatggtacttcactgtgtttcgggggtgccccgtcaacatccctgtgctttggatctgcatcaaataccaacttatgtttcggtgggcccccaagtacctcagcatgtttttctggcgctactagtcctagcttctgcgacgggccttcgacctccaccggatttagcttcggcaacggattgagtaccaatgccggatttgggggtggcctcaatactagcgctggttttggaggaggactggggacaagtgccggcttttcgggcggactgtcaacgtccagcggcttcgatgggggtctgggcacaagtgccggtttcggcggaggacccgggactagcacaggctttgggggcggcttaggaacctccgccggattttctggcggcctgggcacctctgctggcttcggcggcggcctagtgacgagcgacgggtttggaggcggcttggggacaaacgcctcctttggctctactctggggactagcgccgggttttccggaggattatcaacgtccgatggcttcggctctcgacccaacgcctcttttgaccggggtctaagtacaatcatcggcttcggttctggttccaatacatcgaccggcttcactggggaaccaagcacatccaccgggttcagctcaggacctagctccattgtggggttctcaggcgggccctcaacaggggtgggattttgttctggcccatctacttcgggattttcgggcggcccgtctacaggcgctggctttgggggaggtcctaatacgggagcagggtttggaggagggccatcaacatctgctggttttgggtcaggcgccgcgtccttaggggcctgtggcttcagctatggttag

SEQ ID NO: 95969 - DNA, 2889 bp, Artificial Sequence
  derived and/or modified sequence
atgttacgcgatgtcatccaggaatacgacgagtacttcccagagatcattgagcgtgccagttacaccctggagaaaatgttcagagtcaatctgaaagagatcgacaaacaatcttccctatatatactcatttccacccaggaaagcagcgccggaattctcggaacaacgaaggatactcccaaactaggactgttgatggtgatactctccgtgatttttatgaacggcaacaaggcatccgaagcagtgatctgggaagtgctgaggaagcttggcttgcgcccaggagtgaggcacagcttgtttggcgaagtgcgcaaactgatcactgatgaattcgtcaagcaaaagtatctcgaatacaagagagtgccaaactcacgccctccagagtatgagtttttctggggtctccgttcttatcacgagacttccaagatgaaggttctgaaatttgcttgccgggtccaaaagaaagatccaaaggactgggcagtgcaataccgcgaggccgtcgagatggaggtgcaagcagcagctgtggcagtggcggaggcagaggcacgagcagaggctcgtgcccagatgggaatcggggaagaagcggtggcaggcccttggaattgggacgacatggatattgattgtctcactcgcgaagagttaggtgacgacgcacaagcttggtctaggttctcttttgagatcgaggccagagcacaggagaatgccgatgcaagtacaaacgtcaacttctcaaggggcgcatccactcgcgctggattcagcgatggagcctccatttcattcaacggcgctcctagctcatctggaggttttagtggaggacccggtataacatttggggtggccccaagcacttccgcttccttctcaaacacagcgagtatcagttttggcggaaccctgtccacctctagctcattctcatcggctgcaagcatttccttcggctgtgcgcatagcacatcaacttctttctcatccgaggcctctataagcttcggaggcatgccttgcacctctgcctcgttttcaggcggagtgagcagcagcttctctggacccctcagcacctccgcgacgttcagcgggggagcatccagcggattcggtggaaccctgagcacaaccgcagggttctcaggagttctctccacttcgaccagctttgggagtgcacctacaactagtacagtgtttagtagcgctctttccaccagcactgggtttggtggcatcctctctacatctgtttgttttgggggatctccctccagcagcggttcttttggcggtaccctttccacctctatttgtttcgggggatccccgtgtaccagcactgggttcggcggaacactttctacctcagtcagttttggcggtagcagttctactagcgctaattttgggggtaccttgtcaactagcatttgtttcgacgggtctccttctaccggcgcaggcttcggtggtgctcttaacacctccgcctcgttcggctcggtattaaatacgagtaccgggttcggcggagccatgtccacatccgcagatttcgggggtacccttagtacaagcgtctgtttcggaggctctcccggtacttctgtgtcattcggctccgctctcaacaccaatgccggatacggcggtgccgtctcaactaacaccgatttcggcggtaccctgagtacctccgtgtgctttggaggtagcccttcgacttcagcgggattcggcggagcactgaatacaaatgcctcattcggttgcgctgtatccactagcgcgtcattcagtggcgctgtgtccacaagcgcctgtttttccggtgcaccaattacaaaccctgggtttggtggggcattcagcacttctgccggttttggaggagcgctcagcaccgctgcggacttcggcggaacgccatctaatagcattggtttcggggcagcgcctagcacctcagtttcctttgggggtgcacatggtacctccctgtgctttggcggagcccctagtacctccctgtgcttcgggtcagcatcgaacaccaacttgtgttttgggggtccgccatcaacatccgcatgttttagtggcgctacgagcccctccttttgtgacggaccttctaccagcacgggcttctcgttcggtaacgggctgtcgactaacgcaggctttggaggcggtctcaacacctcagcaggatttggcggtggtctggggacgagcgctgggttttctgggggactgagcacttctagcgggtttgatgggggactgggtaccagtgctgggtttgggggtggcccaggcacaagtacaggtttcggcggaggtctcgggacatccgcaggcttcagcgggggtcttggaacatctgcgggattcggcggaggcttggtgacctcagacggctttgggggaggcctcggaaccaacgcctccttcggctccactctggggaccagcgcgggattttcgggtggcctgtccaccagtgacggatttggatccaggccgaacgcatcttttgatcgcggtctgagcacaattatcgggtttggcagcggatcaaacacttccactggcttcactggcgagccgtcaaccagtaccggattttctagcggaccgagttctatcgtgggtttctctggtgggccaagtacaggcgtggggttctgctcaggtcccagtacgtccggattctcaggaggccctagcactggggcaggctttggagggggacccaacactggcgctgggttcggtgggggtcccagcacatcagctggatttgggtctggagccgcatcccttggggcttgcggcttttcatacggctag

SEQ ID NO: 95970 - protein, 357 aa, Artificial Sequence
  derived and/or modified sequence
MDRRNDYGYRVPLFQSKHLNGDERSGSNYRRIPWGRRPAPPRDVAILQERANKLVKYLLVKDQTKIPIKRSDMLRDVIQEYDEYFPEIIERASYTLEKMFRVNLKEIDKQSSLYILISTQESSAGILGTTKDTPKLGLLMVILSVIFMNGNKASEAVIWEVLRKLGLRPGVRHSLFGEVRKLITDEFVKQKYLEYKRVPNSRPPEYEFFWGLRSYHETSKMKVLKFACRVQKKDPKDWAVQYREAVEMEVQLQLWLWLRLKPGLSGSNTSTGFTGEPSTSTGFSSGPSSIVGFSGGPSTGVGFCSGPSTSGFSGGPSTGAGFGGGPNTGAGFGGGPSTSAGFGSGAASLGACGFSYG

SEQ ID NO: 95971 - protein, 1034 aa, Artificial Sequence
  derived and/or modified sequence
MDRRNDYGYRVPLFQSKHLNGDERSGSNYRRIPWGRRPAPPRDVAILQERANKLVKYLLVKDQTKIPIKRSDMLRDVIQEYDEYFPEIIERASYTLEKMFRVNLKEIDKQSSLYILISTQESSAGILGTTKDTPKLGLLMVILSVIFMNGNKASEAVIWEVLRKLGLRPGVRHSLFGEVRKLITDEFVKQKYLEYKRVPNSRPPEYEFFWGLRSYHETSKMKVLKFACRVQKKDPKDWAVQYREAVEMEVQAAAVAVAEAEARAEARAQMGIGEEAVAGPWNWDDMDIDCLTREELGDDAQAWSRFSFEIEARAQENADASTNVNFSRGASTRAGFSDGASISFNGAPSSSGGFSGGPGITFGVAPSTSASFSNTASISFGGTLSTSSSFSSAASISFGCAHSTSTSFSSEASISFGGMPCTSASFSGGVSSSFSGPLSTSATFSGGASSGFGGTLSTTAGFSGVLSTSTSFGSAPTTSTVFSSALSTSTGFGGILSTSVCFGGSPSSSGSFGGTLSTSICFGGSPCTSTGFGGTLSTSVSFGGSSSTSANFGGTLSTSICFDGSPSTGAGFGGALNTSASFGSVLNTSTGFGGAMSTSADFGGTLSTSVCFGGSPGTSVSFGSALNTNAGYGGAVSTNTDFGGTLSTSVCFGGSPSTSAGFGGALNTNASFGCAVSTSASFSGAVSTSACFSGAPITNPGFGGAFSTSAGFGGALSTAADFGGTPSNSIGFGAAPSTSVSFGGAHGTSLCFGGAPSTSLCFGSASNTNLCFGGPPSTSACFSGATSPSFCDGPSTSTGFSFGNGLSTNAGFGGGLNTSAGFGGGLGTSAGFSGGLSTSSGFDGGLGTSAGFGGGPGTSTGFGGGLGTSAGFSGGLGTSAGFGGGLVTSDGFGGGLGTNASFGSTLGTSAGFSGGLSTSDGFGSRPNASFDRGLSTIIGFGSGSNTSTGFTGEPSTSTGFSSGPSSIVGFSGGPSTGVGFCSGPSTSGFSGGPSTGAGFGGGPNTGAGFGGGPSTSAGFGSGAASLGACGFSYG

SEQ ID NO: 95972 - DNA, 3105 bp, Artificial Sequence
  derived and/or modified sequence
atggacagaagaaacgactacggctacagagtgcccctgttccagagcaagcacctgaacggcgacgagagaagcggcagcaactacagaagaatcccctggggcagaagacccgccccccccagagacgtggccatcctgcaggagagagccaacaagctggtgaagtacctgctggtgaaggaccagaccaagatccccatcaagagaagcgacatgctgagagacgtgatccaggagtacgacgagtacttccccgagatcatcgagagagccagctacaccctggagaagatgttcagagtgaacctgaaggagatcgacaagcagagcagcctgtacatcctgatcagcacccaggagagcagcgccggcatcctgggcaccaccaaggacacccccaagctgggcctgctgatggtgatcctgagcgtgatcttcatgaacggcaacaaggccagcgaggccgtgatctgggaggtgctgagaaagctgggcctgagacccggcgtgagacacagcctgttcggcgaggtgagaaagctgatcaccgacgagttcgtgaagcagaagtacctggagtacaagagagtgcccaacagcagaccccccgagtacgagttcttctggggcctgagaagctaccacgagaccagcaagatgaaggtgctgaagttcgcctgcagagtgcagaagaaggaccccaaggactgggccgtgcagtacagagaggccgtggagatggaggtgcaggccgccgccgtggccgtggccgaggccgaggccagagccgaggccagagcccagatgggcatcggcgaggaggccgtggccggcccctggaactgggacgacatggacatcgactgcctgaccagagaggagctgggcgacgacgcccaggcctggagcagattcagcttcgagatcgaggccagagcccaggagaacgccgacgccagcaccaacgtgaacttcagcagaggcgccagcaccagagccggcttcagcgacggcgccagcatcagcttcaacggcgcccccagcagcagcggcggcttcagcggcggccccggcatcaccttcggcgtggcccccagcaccagcgccagcttcagcaacaccgccagcatcagcttcggcggcaccctgagcaccagcagcagcttcagcagcgccgccagcatcagcttcggctgcgcccacagcaccagcaccagcttcagcagcgaggccagcatcagcttcggcggcatgccctgcaccagcgccagcttcagcggcggcgtgagcagcagcttcagcggccccctgagcaccagcgccaccttcagcggcggcgccagcagcggcttcggcggcaccctgagcaccaccgccggcttcagcggcgtgctgagcaccagcaccagcttcggcagcgcccccaccaccagcaccgtgttcagcagcgccctgagcaccagcaccggcttcggcggcatcctgagcaccagcgtgtgcttcggcggcagccccagcagcagcggcagcttcggcggcaccctgagcaccagcatctgcttcggcggcagcccctgcaccagcaccggcttcggcggcaccctgagcaccagcgtgagcttcggcggcagcagcagcaccagcgccaacttcggcggcaccctgagcaccagcatctgcttcgacggcagccccagcaccggcgccggcttcggcggcgccctgaacaccagcgccagcttcggcagcgtgctgaacaccagcaccggcttcggcggcgccatgagcaccagcgccgacttcggcggcaccctgagcaccagcgtgtgcttcggcggcagccccggcaccagcgtgagcttcggcagcgccctgaacaccaacgccggctacggcggcgccgtgagcaccaacaccgacttcggcggcaccctgagcaccagcgtgtgcttcggcggcagccccagcaccagcgccggcttcggcggcgccctgaacaccaacgccagcttcggctgcgccgtgagcaccagcgccagcttcagcggcgccgtgagcaccagcgcctgcttcagcggcgcccccatcaccaaccccggcttcggcggcgccttcagcaccagcgccggcttcggcggcgccctgagcaccgccgccgacttcggcggcacccccagcaacagcatcggcttcggcgccgcccccagcaccagcgtgagcttcggcggcgcccacggcaccagcctgtgcttcggcggcgcccccagcaccagcctgtgcttcggcagcgccagcaacaccaacctgtgcttcggcggcccccccagcaccagcgcctgcttcagcggcgccaccagccccagcttctgcgacggccccagcaccagcaccggcttcagcttcggcaacggcctgagcaccaacgccggcttcggcggcggcctgaacaccagcgccggcttcggcggcggcctgggcaccagcgccggcttcagcggcggcctgagcaccagcagcggcttcgacggcggcctgggcaccagcgccggcttcggcggcggccccggcaccagcaccggcttcggcggcggcctgggcaccagcgccggcttcagcggcggcctgggcaccagcgccggcttcggcggcggcctggtgaccagcgacggcttcggcggcggcctgggcaccaacgccagcttcggcagcaccctgggcaccagcgccggcttcagcggcggcctgagcaccagcgacggcttcggcagcagacccaacgccagcttcgacagaggcctgagcaccatcatcggcttcggcagcggcagcaacaccagcaccggcttcaccggcgagcccagcaccagcaccggcttcagcagcggccccagcagcatcgtgggcttcagcggcggccccagcaccggcgtgggcttctgcagcggccccagcaccagcggcttcagcggcggccccagcaccggcgccggcttcggcggcggccccaacaccggcgccggcttcggcggcggccccagcaccagcgccggcttcggcagcggcgccgccagcctgggcgcctgcggcttcagctacggctag

SEQ ID NO: 95973 - DNA, 3105 bp, Artificial Sequence
  derived and/or modified sequence
atggatcgcaggaatgattacggatacagggttccgctctttcagagtaagcatctgaatggtgatgagcgcagtggatcaaattatagacgcatcccctggggccggcgccctgcaccaccaagagacgtggctattctgcaagaacgtgctaataaacttgtgaaatatctgctggtcaaggaccagactaaaatacccattaagcggagtgacatgcttagagacgtgattcaggaatatgacgagtacttcccagagatcatcgagcgggcatcttacactctggagaagatgtttagagtgaacctgaaggaaattgacaaacagtctagtttatatatcttaatttcaactcaggaatcatcagccggcatcctagggaccaccaaagatacaccaaagttgggtctgcttatggtgattttatctgtgatctttatgaatgggaataaggctagtgaggctgtgatctgggaggtcctgcgcaagctgggcttacgtccgggagttaggcattcactgttcggggaagtccggaagcttattaccgatgaattcgtgaaacagaagtatctggagtataagcgcgttccaaatagtcggcctcccgagtacgaatttttctggggcctgagaagctatcacgagactagcaaaatgaaggttctgaagtttgcctgcagggttcagaaaaaggaccctaaggattgggctgtgcagtaccgggaagccgtggagatggaggtgcaggcagccgctgtagctgttgctgaagctgaggcccgtgcagaggcaagagcccaaatggggatcggcgaggaggcggtggccggaccctggaactgggacgacatggacattgactgccttaccagggaggagcttggggatgacgctcaagcatggagtaggttttctttcgaaattgaggctcgggcgcaggaaaacgcagacgccagcacgaatgttaatttcagccgcggggccagtacacgcgcaggcttctctgatggcgcctccatatcttttaacggcgctccatcttcctctggcggattttctggaggtccaggtattaccttcggggtagctcccagtacctcggcgtctttctcaaatacagcatcaatctccttcggtggtactttgagtaccagtagctccttctccagcgcggcctcaatcagcttcgggtgtgctcactctacatcaacctccttcagcagcgaagcttccatttccttcgggggtatgccatgtacttcagcctcctttagcggcggcgtgtcatcaagtttttcagggcccctttcaactagcgccacattctccggtggagcctccagtggattcggcggtactttgagtacaactgcagggttttctggagtactgagcacttccacatccttcgggtccgcacctaccaccagtactgtgtttagcagcgcactatctaccagcactggcttcggcggcatcctaagcacatctgtgtgctttggaggaagtccaagttccagcgggtcctttgggggtaccttgtctacttctatatgctttggggggtccccttgtacttcgacaggattcgggggaacattaagtactagtgttagtttcggagggagtagttctactagcgcaaatttcggcggcaccctcagcacctccatttgctttgacggctcccctagcacgggcgccggcttcgggggcgctctgaacacttctgcgtcatttgggtccgtcctaaatacatcaacagggttcgggggagcaatgtccacctcggccgatttcggtggaacactgtcaaccagcgtttgttttggaggatctccaggaacgtccgttagtttcggaagtgctttgaataccaatgctggctacggcggcgcagtctctaccaacacagacttcgggggcacactctctacttctgtctgctttggaggctcacccagcacctccgcaggctttggtggagcgctgaacaccaacgcttccttcggatgtgctgtgagcacaagcgcgagcttttccggagccgtgagcacgagtgcctgctttagcggcgcgcccattactaaccctggatttggtggcgctttctccacctctgcagggtttggcggcgctctctctaccgccgctgactttggggggaccccaagtaatagcattgggttcggggccgcaccatcgacatctgtatcctttgggggtgcacacggaacctctctgtgtttcggcggggctccaagtaccagcctgtgcttcgggtcggcttccaacactaacctgtgcttcggaggcccaccatccaccagcgcttgtttctctggcgccaccagcccttcattctgtgatggaccctctacctccactggatttagtttcggcaacgggctgagcactaacgctggttttggcggcggcctgaatacatccgccgggttcggtggcgggttaggcactagcgcagggttcagtgggggcctgagcacaagcagtgggttcgacgggggtcttggcacctccgccggcttcggaggagggcctggtacgagcaccggctttggaggcggcctcggcaccagcgcaggattttctggaggactggggacatccgcagggttcggcgggggccttgtgacttccgacgggttcggcggaggattgggaactaatgcctccttcggaagcaccctcggtacctcagccggtttttccggcgggctttccacgtctgacggatttggatctcggccaaatgcctccttcgatagagggctgtctacaattattggttttggatctggctcaaacacctcgacaggattcacaggcgagcccagcacgtcgactggcttttcttcaggacctagttccattgtaggcttcagcggtggccccagcacaggagtcggcttctgctccgggccaagtacctctggcttttcaggagggccgagtacaggcgcgggatttgggggtggccccaacacaggagctgggttcggtggcggcccctctacttccgccggctttggatctggggccgctagccttggcgcttgcggtttttcttacggctag

SEQ ID NO: 95974 - DNA, 3105 bp, Artificial Sequence
  derived and/or modified sequence
atggacagaagaaatgactatggctacagagtgcccctcttccagagcaagcacctgaatggagatgagaggagcggcagcaactaccgccgcatcccctggggccggcggcctgcccccccaagagatgtggccatcctgcaggagcgggccaacaagctggtgaagtacctgctggtgaaggaccagaccaagatccccatcaagagaagtgacatgctgagagatgtgatccaggagtatgatgagtacttccctgagatcatcgagcgggccagctacaccctggagaagatgttccgggtgaacctgaaggagattgacaagcagagcagcctgtacatcctgatcagcacccaggagagcagcgctggcatcctgggcaccaccaaggacacccccaagctgggcctgctgatggtgatcctgagcgtcatcttcatgaatggaaacaaggccagcgaggccgtcatctgggaggtgctgaggaagctgggcctgcggcctggggtgcgccacagcctgtttggagaggtgaggaagctgatcacagatgaatttgtgaagcagaagtacctggagtacaagagggtgcccaacagccggcccccagaatatgagttcttctggggcctgcggagctaccacgagaccagcaagatgaaggtgctgaagtttgcctgccgggtgcagaagaaggaccccaaggactgggccgtgcagtaccgggaggccgtggagatggaggtgcaggccgctgctgtggccgtggccgaggccgaggcccgggcagaggcccgggcccagatgggcatcggggaggaggccgtggccggcccctggaactgggatgacatggacatcgactgcctgacccgggaggagctgggagatgatgcccaggcctggagccgcttctcctttgaaattgaggcccgggcccaggagaatgctgatgccagcaccaacgtgaacttcagcagaggagccagcacccgggccggcttcagtgatggagccagcatctccttcaatggagcccccagcagcagcggcggcttcagcggcggccctggcatcaccttcggcgtggcccccagcaccagcgccagcttcagcaacacagccagcatcagctttggaggcaccctgagcaccagcagcagcttcagcagcgctgccagcatcagctttggctgtgcccacagcaccagcaccagcttcagcagcgaggccagcatcagctttggaggcatgccctgcaccagcgccagcttctctggaggagtgagcagcagcttcagcggccccctgagcaccagcgccaccttctctggaggagccagcagcggctttggaggcaccctgagcaccacagctggcttctctggagtgctgagcaccagcaccagctttggcagcgcccccaccaccagcaccgtcttcagcagcgccctgagcaccagcacaggctttggaggcatcctgagcacctctgtgtgcttcggcggcagccccagcagcagcggcagctttggaggcaccctgagcaccagcatctgcttcggcggcagcccctgcaccagcacaggctttggaggcaccctgagcacctctgtgtcctttggaggcagcagcagcaccagcgccaactttggaggcaccctgagcaccagcatctgctttgatggcagccccagcactggagctggctttggaggagccctgaacaccagcgccagctttggatctgtgctgaacaccagcacaggctttggaggagccatgagcaccagcgctgactttggaggcaccctgagcacctctgtgtgcttcggcggcagccctggcacctctgtgtcctttggcagcgccctgaacaccaatgccggctacggcggcgctgtgtccaccaacacagactttggaggcaccctgagcacctctgtgtgcttcggcggcagccccagcaccagcgctggctttggaggagccctgaacaccaatgccagctttggctgtgctgtgtccaccagcgccagcttctctggagctgtgtccaccagcgcctgcttcagcggggcccccatcaccaaccctggctttggaggagccttcagcaccagcgctggctttggaggagccctgagcacagctgctgactttggaggcacccccagcaacagcatcggctttggagctgcccccagcacctctgtgtcctttggaggagcccacggcaccagcctgtgcttcggcggggcccccagcaccagcctgtgcttcggcagcgccagcaacaccaacctgtgcttcggcggcccccccagcaccagcgcctgcttcagcggggccaccagccccagcttctgtgatggccccagcaccagcacaggcttctcctttggaaatggcctgagcaccaatgccggctttggaggcggcctgaacaccagcgctggctttggaggcggcctgggcaccagcgctggcttcagcggcggcctgagcaccagcagcggctttgatggcggcctgggcaccagcgctggctttggaggcggccctggcaccagcacaggctttggaggcggcctgggcaccagcgctggcttcagcggcggcctgggcaccagcgctggctttggaggcggcctggtgaccagtgatggctttggaggcggcctgggcaccaatgccagctttggcagcaccctgggcaccagcgctggcttcagcggcggcctgagcaccagtgatggcttcggcagccggcccaatgccagctttgaccggggcctgagcaccatcatcggcttcggcagcggcagcaacaccagcacaggcttcaccggggagcccagcaccagcacaggcttcagcagcggccccagcagcatcgtgggcttcagcggcggccccagcactggagtgggcttctgcagcggccccagcaccagcggcttcagcggcggccccagcactggagctggctttggaggcggccccaacacaggagctggctttggaggcggccccagcaccagcgctggctttggaagtggagctgccagcctgggcgcctgtggcttctcctatggatag

SEQ ID NO: 95975 - DNA, 3105 bp, Artificial Sequence
  derived and/or modified sequence
atggaccggcggaacgactacggctaccgggtgcccctgttccagtccaaacaccttaacggagacgaacgctctgggtctaactaccggcgaatcccttgggggaggcgccccgctccaccccgcgatgtagctattctgcaggaacgcgctaataagcttgttaaatatctgttggtgaaggatcagacaaaaattccaatcaaaaggagcgacatgcttagagatgtcatccaggagtatgacgagtacttccctgaaattatagagcgcgcgtcttataccctggaaaagatgttccgcgtaaacctgaaggaaatcgataaacagagctccctgtatatcctcatttccacccaggagtcatctgctgggattttgggaaccacgaaagacacacccaagctgggcctgctaatggtgatcctgtctgtgatttttatgaacggaaataaagcttctgaagccgtgatatgggaggtattacgaaagttggggctgcggccaggcgtgagacacagcttgttcggggaggtaaggaagctgatcactgatgagttcgttaagcagaaatatttggaatataagagagtgcctaactcaagaccacccgaatatgaattcttttggggactgaggtcttatcatgagaccagtaagatgaaggttttaaaatttgcctgccgggttcagaagaaagatcctaaggattgggcagtgcaataccgggaagccgttgaaatggaggttcaggccgccgccgtggcagtcgcagaggctgaggctagggccgaggctcgtgctcagatgggaatcggagaggaggccgtggctggcccatggaattgggacgacatggacatcgactgcctgactagggaggaactcggtgacgatgcccaagcctggtctagatttagttttgaaattgaggcccgggctcaggaaaacgctgatgcctctacaaacgtgaacttttctcggggcgccagtacccgcgcggggttctccgacggggcatccataagcttcaacggcgccccctcatcatcaggaggcttcagcggcggtcccggtatcacattcggggttgcgccatccacttccgcctccttttctaacactgcttcgatcagcttcggaggcactttatctacaagctcttccttcagtagtgctgcatccatctcattcggctgcgcacattcgacatcaacgtcgttctcttctgaggcgagtatttcattcggaggaatgccttgcaccagcgcctcattttccggcggagtgagcagctccttctccggaccgctctccactagcgccacgttttccggaggggcttcatcagggtttggcggcacgctgtctaccaccgccgggttttctggcgtcctgtccactagcactagctttggctcggctccaactacctcgacggtattttctagtgcgctgtccactagtacaggttttgggggcattctgtcaaccagtgtgtgtttcggaggcagtcctagctcttccggctccttcggtggaaccctgagtactagcatctgcttcggggggagcccctgtacaagcaccggcttcggcggaacactgtcaactagcgtgagtttcggaggctcttcatccaccagcgccaacttcgggggcactctgtcaactagcatctgcttcgatgggtctccttctaccggagctggctttgggggcgcacttaacactagtgcgtccttcggttctgtcctgaatacaagtaccggctttggtggtgctatgagtacatcagccgacttcgggggtaccctgtccacctccgtctgttttggcgggtccccagggaccagtgtgtctttcggatcagccttgaataccaatgctggctatggcggtgctgtgtctacaaatactgacttcggcggcacactgagtacctctgtgtgcttcggaggaagtccaagcacaagcgctggattcggaggtgctttaaacacaaacgctagtttcgggtgtgccgtatcaacctccgcatccttctctggcgctgtgtctacatctgcctgctttagcggtgctccaattacaaaccctgggtttgggggcgccttctccacaagtgcgggatttggcggggcgctgtctaccgctgccgatttcggagggacaccaagtaactcaataggttttggcgctgcgcccagcactagcgtttccttcgggggagctcacggcacttctctgtgttttggaggcgcacctagtacctctttgtgttttggctccgcctccaacactaacctgtgctttgggggcccgccttcaacttcagcatgcttctccggcgctactagtccttccttttgtgatggcccttctaccagtaccggattcagttttgggaatggtctgtcaacaaatgcaggttttggaggaggtctcaatacttctgcggggtttggaggcggcctcggcacctcagcaggcttctcgggagggcttagcacctcctctggctttgacggtggcctagggacaagcgccgggtttggcggcggtccaggtacgagtaccggatttggaggagggctgggcactagcgctggatttagtggtggtctgggtacatctgccggcttcggcggcggcttagtgacctcagacggattcggcggcggcctcgggaccaatgcatcattcggctcaaccttgggtacaagcgctggattttcggggggcctgtctacctccgacgggttcggaagccgcccgaacgccagtttcgatcgcgggctcagcacaatcatcggatttggctccggttccaatacttccacaggcttcaccggcgagcccagcacatctacgggcttctccagcgggccgtcatccatagtgggtttctccggcggtcccagcaccggcgtcggcttctgttctggtccttcaaccagtgggttttcaggcgggccctcgacaggggccggtttcggcggcggccctaacacgggcgccggcttcggcggggggccttcaacctctgcaggatttggcagcggggcggcaagcctgggtgcctgcgggttctcctatggttag

SEQ ID NO: 95976 - DNA, 3105 bp, Artificial Sequence
  derived and/or modified sequence
atggaccgtcgtaatgattacggttatcgcgtgccgctgttccaaagcaaacatcttaatggggacgaaaggtctgggtcaaattacagacgaatcccctggggcagacggccagcgcctccacgcgatgtcgcgattctccaggagcgagctaataagctggtcaagtatctgctagtcaaagaccagaccaagatcccaatcaaacgttcggatatgctgagggacgtgattcaagaatatgacgagtactttcccgaaatcattgagagagcctcatatactcttgagaaaatgtttcgagttaatctcaaggaaatagacaagcagagcagtctgtacatactgattagcactcaggaatcatcagcaggcattctggggacaacaaaggatactcccaagctcggtctgttaatggtgattctttctgttatctttatgaacggcaacaaggcctctgaggccgtgatatgggaggttcttcgcaaactgggactcagacccggtgtgagacactcattgttcggcgaggtgcgtaagctaattaccgacgagttcgtcaaacagaagtacctggagtacaagcgagtacctaactcgcgtccgccagaatacgagttcttctggggacttagaagctaccacgaaactagcaagatgaaggtcctgaaattcgcttgtcgagtgcagaagaaagaccccaaagactgggccgtacagtacagagaagccgtggagatggaggttcaggctgccgctgtggcagtggccgaggcagaggccagagccgaggcaagggcccagatgggcataggcgaggaagcagtggccggtccttggaactgggacgacatggacatcgattgcctaactagagaggagctaggtgatgacgctcaggcgtggtcaaggttcagctttgagatcgaggccagagcacaagagaacgcagacgcatctactaacgtcaatttctctcgcggtgcctctacacgggcaggcttctccgacggcgctagtattagcttcaacggcgcaccctcctcttcaggcggattctctggcggacccggtatcacatttggggtagctccttccacatcagcttccttctccaatactgcatcaataagctttggaggtaccctgtcaactagcagttcattctccagcgctgcctctatctcctttgggtgcgcgcacagtacatcaacctccttttcctcagaagccagcatcagcttcgggggtatgccctgcacaagcgcgtcgtttagtggcggtgtatccagttccttcagtggaccattatccaccagtgctacattcagcggcggtgcttccagcggattcggaggtacattgtcaactactgcaggcttcagcggagtgctctcaacatccacttcctttgggtctgcccctaccacttccaccgtatttagttcagccctgagcacatccactggcttcggtggaatcctgagtacatccgtgtgttttggaggctctccttcttccagcggctcatttggagggacactgtccacttctatctgcttcggaggcagcccctgtacatctaccggctttggtgggactctgtctacctccgtgagctttggcggaagcagctcgacatccgcgaattttgggggaaccctcagcacgagtatttgcttcgatggatccccatcaaccggagccggattcggtggcgctctcaacacttcagcctctttcggtagcgtgctgaatacgagcactggtttcggcggagctatgagcaccagtgcagattttggaggcacgctctcaacctccgtgtgctttggcggttctcctggcacttctgttagtttcggcagtgccctgaatacaaatgcagggtacggtggtgcggtcagtactaatactgacttcggcggaacactctccacaagtgtttgctttggtggctcaccatccacaagcgctggattcggcggagcacttaataccaacgcaagttttggatgcgccgtatccacatccgcaagctttagtggggctgtctcaacaagtgcctgttttagcggcgctcccatcaccaatcccggtttcggaggagctttcagtacttcagcgggatttgggggtgcactcagtaccgcagcagattttggcggtaccccgtctaactcaatcgggttcggggcagccccttcaacgagtgtgagtttcggaggcgctcatggcactagcctctgcttcgggggagccccatcaacatcgctctgtttcgggagtgccagcaataccaacttatgtttcgggggtccgccatctacaagtgcctgtttctcgggggctacgtcacctagcttttgtgatggtccatctaccagtactggttttagcttcggcaatggactgagcaccaacgctggcttcggtggtggcttaaacacatcggctggcttcggcggtggtctgggtacaagcgctggttttagcgggggactttcaacctcatcaggattcgatggcggattaggtacttcagcgggtttcggcggaggtcctgggactagcacaggattcggtggtggcctgggcacatcagctgggttctctggaggactcggtaccagtgccggatttgggggaggcttggttacgtcggacggattcggcggtggtctggggaccaatgcctcatttggctccactcttgggactagtgcgggtttctctggtggcctatccacctctgatgggtttgggagtagacccaatgccagcttcgaccgtggactcagcactatcataggatttggctcaggatcaaacacttctaccggattcactggcgagcccagcacttccaccgggttcagcagcggacctagtagcatcgtcggcttctcaggcggacccagcaccggcgttggtttttgcagtgggccatctacgtcagggttctcaggtggaccaagtactggcgctggcttcggcggtgggccaaacacaggagccggttttggcggagggccaagcactagcgcaggctttggtagtggcgcagcgtccctcggtgcctgcgggttttcctacgggtag

SEQ ID NO: 95977 - DNA, 3488 bp, Artificial Sequence
  derived and/or modified sequence
agacgccttctggattcaagaagacgaggtgagctgaggtacctggctttagtgaagaccctgtgggggcttcctggctgcggcttcgacgtgcctgactccacacgcccctaaggctcacctgttactcggcctcccagaaagatggataggagaaatgactacggatatagggtgcctctatttcagtccaagcatctgaatggggatgagagaagtggcagtaattacaggcggatcccatggggccggaggcctgcaccaccgcgagatgtggccattttacaagaaagggctaataagttggtgaaatacctgttggttaaggaccagacaaagatccccatcaaacgctcagacatgctgagggatgtcatccaagaatatgatgaatatttcccagaaatcattgaacgagcaagctacactctggagaagatgtttcgagtcaatctgaaagaaattgataagcaaagtagcttgtatattctcatcagcactcaggaatcctctgcaggcatactgggaacgaccaaggacacacccaagctgggtctcctcatggtgattctgagtgtcatttttatgaatggcaacaaggccagtgaggctgtcatctgggaggtgctgcgcaagttggggctgcgccctggggtgaggcattcactctttggggaagtgaggaagctcatcacagacgagtttgtgaagcagaagtacctggagtacaagagggtccctaacagcagaccacctgaatatgagttcttctggggcttgcgctcctaccacgagactagcaagatgaaagtcctcaagtttgcatgcagggtgcagaagaaagaccccaaggactgggctgtgcagtaccgcgaggcagtggagatggaagtccaagctgcagctgtggctgtggctgaggctgaagccagggctgaggcaagagcccaaatggggattggagaggaagctgtggctgggccctggaattgggatgacatggatatcgactgcctaacaagggaagagttaggcgatgatgctcaggcctggagcagattttcatttgaaattgaggccagagcccaagaaaatgcagatgccagcaccaacgtcaacttcagcagaggagctagtaccagggctggcttcagcgatggtgctagtattagcttcaatggtgcacccagctccagtggtggcttcagtggtggacctggcattacctttggtgttgcacccagcaccagtgccagcttcagcaatacagccagcattagctttggtggtacactgagcactagctccagcttcagcagcgcagccagcattagctttggttgtgcacacagcaccagcactagtttcagcagtgaagccagcattagctttggtggcatgccttgtaccagtgccagctttagtggtggagtcagctctagttttagtggcccactcagcaccagtgccactttcagtggtggagccagctctggctttggaggcacactcagcaccacggctggctttagtggtgtactcagcactagcaccagctttggcagtgcacccacaacgagcacagtcttcagtagtgcgcttagcaccagcactggctttggaggcatactcagcaccagtgtctgttttggtggctctcccagctccagtggtagctttggtggtacactcagtaccagtatctgcttcggtggctctccctgcaccagcactggctttggaggcacacttagcaccagtgtctcctttggtggctcttccagcaccagtgccaattttggtggtacactaagtaccagcatctgctttgatggctctcccagcactggtgctggctttggtggtgctctcaacaccagtgccagctttggcagtgtgctcaacaccagtactggttttggtggtgctatgagcaccagtgctgactttggcggtacactaagcaccagtgtctgctttggtggctctcctggcaccagtgtcagctttggcagtgcactcaacaccaatgctggttatggtggtgctgtcagcaccaacactgactttggtggtacactaagcaccagcgtctgttttggtggctctcccagcaccagtgctggctttggtggtgcactcaacaccaatgccagctttggctgtgccgtcagcaccagtgccagcttcagtggtgctgtcagcaccagtgcttgcttcagtggtgcaccaatcaccaaccctggctttggcggtgcatttagcaccagtgctggcttcggtggggcacttagtaccgctgctgacttcggtggtactcccagcaacagcattggctttggtgctgctcccagcaccagtgtcagctttggtggtgctcatggcaccagcctctgttttggtggagctcccagcaccagcctctgctttggcagtgcatctaatactaacctatgctttggtggccctcctagcaccagtgcctgctttagtggtgctaccagccctagtttttgtgatggacccagcaccagtaccggtttcagctttggcaatgggttaagcaccaatgctggatttggtggtggactgaacaccagtgctggctttggtggtggcctaggcaccagtgctggcttcagtggtggcctaagcacaagttctggctttgatggtgggctaggtaccagcgctggcttcggtggaggaccaggcaccagcactggttttggtggtggactgggcaccagtgctggcttcagtggcggactgggcaccagtgctggctttggtggtggactggtcactagtgatggctttggtggtggactgggcaccaatgctagtttcggcagcacacttggcaccagtgctggctttagtggtggcctcagcaccagcgatggctttggcagtaggcctaatgccagcttcgacagaggactgagtaccatcattggctttggcagtggttccaacaccagcactggctttactggcgaacccagcaccagcacgggcttcagtagtggacccagttctattgttggcttcagcggtggaccaagcactggtgttggcttctgcagtggaccaagcaccagtggcttcagcggtggaccgagcacaggagctggcttcggcggtggaccaaacactggtgctggctttggtggtggaccgagcaccagtgctggctttggcagtggagccgccagtcttggtgcctgtggcttctcgtatggctagtgaggtttcagatttattccccatgtttacagataccgctaataaattgcagtagtccttcccatggagccaaagtacatccttggaatctttgtccacacagcagtcaaggcagttatggccaatcagctgagggtgtcatgtgatggaaaaatctgtttgctgttcctgctttattgtttgctttctgtgtgctgtcatattttggtatcagagttacattaaatttgcaaaatgaa

SEQ ID NO: 95978 - DNA, 3352 bp, Artificial Sequence
  derived and/or modified sequence
agacacaaggagaggcttggagagagcagacgccttctggattcaagaagacgagtccaagcatctgaatggggatgagagaagtggcagtaattacaggcggatcccatggggccggaggcctgcaccaccgcgagatgtggccattttacaagaaagggctaataagttggtgaaatacctgttggttaaggaccagacaaagatccccatcaaacgctcagacatgctgagggatgtcatccaagaatatgatgaatatttcccagaaatcattgaacgagcaagctacactctggagaagatgtttcgagtcaatctgaaagaaattgataagcaaagtagcttgtatattctcatcagcactcaggaatcctctgcaggcatactgggaacgaccaaggacacacccaagctgggtctcctcatggtgattctgagtgtcatttttatgaatggcaacaaggccagtgaggctgtcatctgggaggtgctgcgcaagttggggctgcgccctggggtgaggcattcactctttggggaagtgaggaagctcatcacagacgagtttgtgaagcagaagtacctggagtacaagagggtccctaacagcagaccacctgaatatgagttcttctggggcttgcgctcctaccacgagactagcaagatgaaagtcctcaagtttgcatgcagggtgcagaagaaagaccccaaggactgggctgtgcagtaccgcgaggcagtggagatggaagtccaagctgcagctgtggctgtggctgaggctgaagccagggctgaggcaagagcccaaatggggattggagaggaagctgtggctgggccctggaattgggatgacatggatatcgactgcctaacaagggaagagttaggcgatgatgctcaggcctggagcagattttcatttgaaattgaggccagagcccaagaaaatgcagatgccagcaccaacgtcaacttcagcagaggagctagtaccagggctggcttcagcgatggtgctagtattagcttcaatggtgcacccagctccagtggtggcttcagtggtggacctggcattacctttggtgttgcacccagcaccagtgccagcttcagcaatacagccagcattagctttggtggtacactgagcactagctccagcttcagcagcgcagccagcattagctttggttgtgcacacagcaccagcactagtttcagcagtgaagccagcattagctttggtggcatgccttgtaccagtgccagctttagtggtggagtcagctctagttttagtggcccactcagcaccagtgccactttcagtggtggagccagctctggctttggaggcacactcagcaccacggctggctttagtggtgtactcagcactagcaccagctttggcagtgcacccacaacgagcacagtcttcagtagtgcgcttagcaccagcactggctttggaggcatactcagcaccagtgtctgttttggtggctctcccagctccagtggtagctttggtggtacactcagtaccagtatctgcttcggtggctctccctgcaccagcactggctttggaggcacacttagcaccagtgtctcctttggtggctcttccagcaccagtgccaattttggtggtacactaagtaccagcatctgctttgatggctctcccagcactggtgctggctttggtggtgctctcaacaccagtgccagctttggcagtgtgctcaacaccagtactggttttggtggtgctatgagcaccagtgctgactttggcggtacactaagcaccagtgtctgctttggtggctctcctggcaccagtgtcagctttggcagtgcactcaacaccaatgctggttatggtggtgctgtcagcaccaacactgactttggtggtacactaagcaccagcgtctgttttggtggctctcccagcaccagtgctggctttggtggtgcactcaacaccaatgccagctttggctgtgccgtcagcaccagtgccagcttcagtggtgctgtcagcaccagtgcttgcttcagtggtgcaccaatcaccaaccctggctttggcggtgcatttagcaccagtgctggcttcggtggggcacttagtaccgctgctgacttcggtggtactcccagcaacagcattggctttggtgctgctcccagcaccagtgtcagctttggtggtgctcatggcaccagcctctgttttggtggagctcccagcaccagcctctgctttggcagtgcatctaatactaacctatgctttggtggccctcctagcaccagtgcctgctttagtggtgctaccagccctagtttttgtgatggacccagcaccagtaccggtttcagctttggcaatgggttaagcaccaatgctggatttggtggtggactgaacaccagtgctggctttggtggtggcctaggcaccagtgctggcttcagtggtggcctaagcacaagttctggctttgatggtgggctaggtaccagcgctggcttcggtggaggaccaggcaccagcactggttttggtggtggactgggcaccagtgctggcttcagtggcggactgggcaccagtgctggctttggtggtggactggtcactagtgatggctttggtggtggactgggcaccaatgctagtttcggcagcacacttggcaccagtgctggctttagtggtggcctcagcaccagcgatggctttggcagtaggcctaatgccagcttcgacagaggactgagtaccatcattggctttggcagtggttccaacaccagcactggctttactggcgaacccagcaccagcacgggcttcagtagtggacccagttctattgttggcttcagcggtggaccaagcactggtgttggcttctgcagtggaccaagcaccagtggcttcagcggtggaccgagcacaggagctggcttcggcggtggaccaaacactggtgctggctttggtggtggaccgagcaccagtgctggctttggcagtggagccgccagtcttggtgcctgtggcttctcgtatggctagtgaggtttcagatttattccccatgtttacagataccgctaataaattgcagtagtccttcccatggagccaaagtacatccttggaatctttgtccacacagcagtcaaggcagttatggccaatcagctgagggtgtcatgtgatggaaaaatctgtttgctgttcctgctttattgtttgctttctgtgtgctgtcatattttggtatcagagttacattaaatttgcaaaatg

SEQ ID NO: 95979 - DNA, 864 bp, Artificial Sequence
  derived and/or modified sequence
atggctgatgacgaggattatgaggaggtagtcgaatactacaccgaggaggtggtgtacgaggaagtgcctggcgaaaccattacaaagatatacgagacaactacaacaaggacctccgactatgagcagtcagaaaccagcaaacccgctctggctcagcccgctttagcacagccagcaagtgcaaaacccgttgagcggaggaaagtgatacggaaaaaagtggacccttcaaaattcatgacaccatacattgcgcatagccaaaaaatgcaagaccttttctccccaaacaaatacaaagagaagtttgaaaaaacaaagggtcagccatatgcttcaaccacagatacacccgaactccggaggattaaaaaagtccaggatcagctatcggaagttaagtatcgcatggatggcgacgtggcaaaaacaatctgtcatgttgacgagaaagcaaaggatattgagcatgccaagaaagtgtcacagcaggtgtctaaggtactgtataaacagaattgggaagataccaaggataagtacctgctgccaccagatgcacctgagctggtgcaggctgtaaagaacactgccatgttcagcaagaaactgtacaccgaggactgggaggctgacaaatcactgttttatccatacaatgactcacctgaactgcgacgtgtcgctcaggcccaaaaggcgctaagtgacgtggcctacaagaagggcttggccgaacagcaggcccagtttacacccttggcggacccccctgatattgaatttgctaagaaggttacaaaccaagttagcaaacaaaaagaaaagaagaggaagaaaaaaaggaaaaaagtgtag

SEQ ID NO: 95980 - DNA, 1014 bp, Artificial Sequence
  derived and/or modified sequence
cagaagtacaaagaggattacgaaaacaagataaaggggaaatggtctgagactccttgtttcgaagttgcaaatgctcggatgaacgccgataacataagtacccggaagtatcaggaggacttcgagaacatgaaggatcaaatttacttcatgcagacggagacccccgaatataaaatgaataaaaaggccggggtggctgcgtcaaaagtgaagtataaggaagactacgaaaagaacaaagggaaggctgactataacgtgctacccgccagtgaaaaccctcagctgcgccagctcaaggccgccggggacgcactttccgataaactgtacaaagagaattacgagaagaccaaggccaagagcattaattattgcgagacaccaaaattcaaactcgatactgtgttgcagaacttcagtagtgataaaaagtacaaggactcatatctcaaagacatcctcggacattatgtaggatctttcgaagatccctaccatagtcattgcatgaaagtgactgctcaaaattccgacaaaaactacaaagctgagtacgaagaagacaggggaaaaggtttcttcccccagacaatcacccaagaatatgaagccataaaaaagctggaccaatgcaaagatcatacgtataaagtgcatcccgacaagacaaaattcacccaagtaactgatagccctgtactgctacaggcccaagttaacagcaagcagctgtcagatctgaattataaagccaaacatgaatccgagaagtttaaatgccacataccgcctgacaccccagcgttcatccagcacaaggttaacgcgtataatttgtccgacaatctgtacaaacaagattgggagaaaagtaaggcgaagaaatttgacatcaaagtggacgcaattcctctcttggctgccaaagctaatacaaagaataccagtgatgtgatgtataaaaaagattatgagaagaacaaagtgaaggttcagcaacggtag

SEQ ID NO: 95981 - DNA, 864 bp, Artificial Sequence
  derived and/or modified sequence
atggctgatgatgaagattatgaggaggtggtggagtactacacagaggaggtggtgtatgaggaggtgcctggagagaccatcaccaagatctatgagaccaccaccaccaggaccagtgactatgagcagagcgagaccagcaagccagccctggcccagcctgccctggcccagcctgccagcgccaagcctgtggagaggaggaaggtgatcaggaagaaggtggaccccagcaagttcatgaccccctacatcgcccacagccagaagatgcaggacctcttcagccccaacaagtacaaggagaagtttgagaagaccaagggccagccctatgccagcaccacagacaccccagagctgcggcgcatcaagaaggtgcaggaccagctgtctgaggtgaagtacaggatggatggagatgtggccaagaccatctgccacgtggatgagaaggccaaggacattgaacatgccaagaaggtgtcccagcaggtgtccaaggtgctgtacaagcagaactgggaggacaccaaggacaagtacctgctgcccccagatgcccctgagctggtgcaggccgtgaagaacacagccatgttcagcaagaagctgtacacagaggactgggaggccgacaagagcctcttctacccctacaatgacagccctgagctgcggcgggtggcccaggcccagaaggccctgagtgatgtggcctacaagaagggcctggccgagcagcaggcccagttcacccccctggccgaccccccagacatcgagtttgccaagaaggtgaccaaccaggtgtccaagcagaaggagaagaagaggaagaagaagaggaagaaggtgtag

SEQ ID NO: 95982 - DNA, 1014 bp, Artificial Sequence
  derived and/or modified sequence
cagaagtacaaggaggactatgagaacaagatcaagggcaagtggagcgagaccccctgctttgaggtggccaatgccaggatgaatgctgacaacatcagcaccaggaagtaccaggaggactttgagaacatgaaggaccagatctacttcatgcagacagagaccccagagtacaagatgaacaagaaggccggcgtggccgccagcaaggtgaagtacaaggaggactatgagaagaacaagggcaaggctgactacaacgtgctgcctgccagcgagaacccccagctgcggcagctgaaggctgctggagatgccctgagtgacaagctgtacaaggaaaattatgagaagaccaaggccaagagcatcaactactgtgagacccccaagttcaagctggacacagtgctgcagaacttcagcagtgacaagaagtacaaggacagctacctgaaggacatcctgggccactacgtgggcagctttgaggacccctaccacagccactgcatgaaggtgacagcccagaacagcgacaagaactacaaggccgagtatgaggaggaccggggcaagggcttcttcccccagaccatcacccaggagtatgaggccatcaagaagctggaccagtgcaaggaccacacctacaaggtgcacccagacaagaccaagttcacccaggtgacagacagccctgtgctgctgcaggcccaggtgaacagcaagcagctgagtgacctgaactacaaggccaagcatgagagcgagaagttcaagtgccacatccccccagacaccccagccttcatccagcacaaggtgaatgcctacaacctgagtgacaacctgtacaagcaggactgggagaagagcaaggccaagaagtttgacatcaaggtggatgccatccccctgctggccgccaaggccaacaccaagaacaccagtgatgtgatgtacaagaaggactatgagaagaacaaggtgaaggtgcagcagaggtag

SEQ ID NO: 95983 - DNA, 864 bp, Artificial Sequence
  derived and/or modified sequence
atggccgacgacgaggactacgaggaggtggtggagtactacaccgaagaggtcgtctacgaagaagtgccaggtgaaaccattactaaaatctatgagaccaccacaacgcgcacaagcgactacgaacagagcgaaaccagcaagcccgcactagcccagcccgcactggcacagcctgccagtgccaaacctgtggagagaaggaaagtcattagaaagaaggttgatccctccaagttcatgaccccatatattgcccactcacagaagatgcaggacctcttttcaccaaacaagtacaaagaaaagttcgagaaaaccaagggacagccctatgcatctactacagacacgcctgaactcagaaggatcaagaaggttcaggaccagctcagcgaagtcaagtatcgcatggacggcgatgtagctaagacgatctgtcatgtcgacgaaaaagctaaggatatagaacatgctaagaaagtatcacagcaagtgtcaaaagtcctgtacaagcagaattgggaggacacaaaagataagtacctcctgcccccagatgcgccagagctggtgcaagctgtcaaaaatacagccatgtttagcaagaagctctatacagaagactgggaggcggataagtcacttttctatccatacaacgatagtcccgagcttcggcgcgttgcccaggcccagaaggccctctcggacgtcgcctacaagaagggcctcgcagaacaacaagcacagttcaccccactggcagacccacccgatatagaattcgctaaaaaggtgacaaaccaggtgagtaaacagaaagaaaagaagaggaagaaaaaaagaaaaaaagtgtag

SEQ ID NO: 95984 - DNA, 1014 bp, Artificial Sequence
  derived and/or modified sequence
cagaagtacaaggaggactacgagaacaagatcaagggcaagtggtccgaaacaccttgcttcgaagttgctaacgcacgaatgaacgctgataacatctcaacacggaagtatcaagaggattttgaaaatatgaaggatcagatctacttcatgcaaaccgagacacccgagtacaagatgaataaaaaagctggggtggctgccagtaaggtcaagtacaaagaagactacgagaagaataaaggaaaggccgactacaatgtgctgccggcaagtgaaaacccccaactgaggcagcttaaagctgccggagatgccttatcagacaagctgtacaaagaaaattatgagaagacaaaagccaagagcataaactactgtgaaacccccaagttcaagctggacaccgtgttgcagaacttctccagcgataagaaatacaaggacagctatttaaaagacattcttggtcactacgtaggatcatttgaagatccctaccattctcactgcatgaaggtcaccgcccagaattccgataagaattacaaggccgaatacgaggaggatcggggcaagggctttttccctcaaacgatcacgcaggagtacgaggccataaaaaagcttgaccagtgtaaggaccacacttacaaggttcatcctgataagaccaagtttactcaagtgaccgattcacctgtgctactgcaagcccaggtaaactccaaacagctaagtgacttgaactataaggctaagcacgaatcggagaagtttaaatgccatatccccccggacactcctgcctttattcagcataaagtaaacgcctataacttgagtgataatctgtataaacaggattgggaaaaatctaaggctaagaagttcgacataaaagtcgacgcaatacctctcctggccgcaaaggccaacactaaaaacaccagcgatgttatgtacaagaaagactatgaaaagaataaggttaaggtgcagcagcgctag

SEQ ID NO: 95985 - DNA, 1051 bp, Artificial Sequence
  derived and/or modified sequence
gcttttgcctggggttctcaggaggggagagttgggagaggctttgctgctgaggaaatttatttggtagattgaaggtttgaacgagagctacagaaacgaaagaaaaagtctgtataagccaatggtgttcgggaagaaaataaccccattgccttgagtttgtaggtgccactactactctggaaaaatggcagatgacgaagactatgaggaggtggtggagtactacacagaagaagtggtttacgaagaggtgccgggagagacaataacaaaaatttatgagactacgacaacaaggacatctgactatgagcaatcagaaacttccaaaccagctctggcacagccagcactggcacagccagcatcagcaaagccggtggagaggaggaaggtcatccggaagaaagtggatccttcaaagttcatgaccccctacattgcacacagtcagaaaatgcaggatctttttagcccaaataaatacaaggagaagtttgagaaaacaaaaggacagccatacgccagcacaacagatactccagaacttcgcagaatcaaaaaagtacaagatcaactcagtgaggttaagtatcgaatggatggtgatgttgctaagactatatgtcacgtagatgaaaaagcaaaggatattgaacatgcaaagaaagtgtcgcagcaagtcagtaaggttttatacaagcagaactgggaagacaccaaggataagtacctgcttcctcctgatgcccctgaacttgtccaggccgttaagaacaccgccatgttcagcaagaaactgtacactgaagactgggaagcagacaaaagtttgttttacccctataatgatagcccggaactgaggagagttgcccaggcccagaaagctctcagtgatgttgcctacaaaaaaggtctcgctgaacagcaagctcaattcacgcctctggctgatcctccagatatagaatttgccaagaaagtaaccaatcaagtgagcaagcaaaaagagaaaaaaagaaaaaaaaaaagaaagaaagtg

SEQ ID NO: 95986 - DNA, 1012 bp, Artificial Sequence
  derived and/or modified sequence
gcaaaaatacaaagaagactatgaaaataaaatcaaaggcaaatggagtgagacaccttgctttgaagttgcaaatgccagaatgaatgctgataacattagcacaaggaaataccaggaagattttgaaaacatgaaagaccagatctacttcatgcagaccgaaacaccagagtataaaatgaataaaaaagctggtgtggcagctagcaaggtaaaatacaaagaagactatgaaaagaataaaggaaaagcagattataatgtgcttcctgcttcagagaacccacagcttaggcagctgaaggcagcaggagatgccctaagtgacaaactatacaaggaaaactatgaaaagacaaaagcaaagagcataaattactgcgagacccccaaattcaagctcgatactgttctgcagaacttcagtagtgataaaaaatataaagattcctacttaaaagatattttgggacattatgtaggcagcttcgaggatccataccattcacactgcatgaaagtcacagctcaaaacagtgataaaaactacaaagcagaatacgaagaagacagaggcaaaggcttcttccctcagaccataactcaagaatatgaagcaattaagaaactagatcagtgtaaagaccacacctacaaagtccatccagataagacaaaattcacccaagttacagactctcctgttctgctacaagcccaagtcaattccaaacaactgagtgacttaaattacaaagcaaaacatgaaagtgaaaagttcaagtgccatatcccccctgatactcctgcttttatccagcacaaagtcaatgcctataacttgagtgataatctttataagcaagactgggagaagagcaaagccaaaaagtttgacattaaagtggatgccattcccctgctggcagccaaagccaacaccaagaacaccagcgatgtgatgtacaagaaagactatgaaaaaaacaaagttaaagtgcagcaaaga

SEQ ID NO: 95987 - DNA, 864 bp, Artificial Sequence
  derived and/or modified sequence
atggctgatgacgaagactacgaggaggtggttgaatattatactgaggaggtagtttatgaggaagtgcctggcgaaaccattacaaaaatttatgaaacaaccacaaccaggacaagtgattacgagcagtccgaaacttctaaaccagccctcgcacagcccgctcttgcccaacctgcatccgccaaaccggtggagagacgtaaggtaataaggaaaaaagtggacccttcaaaattcatgactccctacattgcacactcccagaagatgcaggaccttttttcccctaataagtacaaggagaagttcgaaaagaccaaagggcagccttatgcctcaactacagatacgccagagctgcggcgtatcaagaaggtgcaggaccaactcagcgaggtaaaatatcggatggacggggacgttgccaagaccatttgccatgtcgacgaaaaggcaaaggacatcgagcatgccaaaaaggtcagccagcaagtgagcaaggtcctgtacaaacagaattgggaggacaccaaagataaatatctcctccctcctgacgccccagagctcgttcaagcagtgaaaaacactgccatgttctccaaaaagttgtatactgaagactgggaagccgacaaaagtctcttctatccttacaatgattccccggaactaaggagagttgcacaggcccagaaggcgctgtccgacgttgcctacaagaagggtctcgctgagcaacaggcccagttcacacccctggctgatcctcccgacattgagttcgctaaaaaggttacaaatcaggtctcaaaacagaaagaaaaaaaaaggaaaaagaaacgaaagaaagtgtag

SEQ ID NO: 95988 - DNA, 1014 bp, Artificial Sequence
  derived and/or modified sequence
cagaagtacaaggaggattatgagaataaaattaaaggcaaatggtccgaaacgccctgttttgaagtggctaacgccagaatgaacgccgataacatttccactcggaagtaccaggaggacttcgaaaacatgaaagaccagatctacttcatgcaaacagagacacccgaatacaaaatgaataagaaggccggtgtcgcagcctctaaagttaagtacaaggaagattacgaaaagaataaaggcaaagcggattataacgtcctgccggcttcggaaaacccacaactccgacagctcaaggcggctggtgacgccctcagcgataaactgtacaaagaaaattatgaaaaaactaaggccaaatccatcaattattgtgaaactcctaagttcaagcttgatactgtgctgcagaacttttcatccgataagaagtataaagattcttatcttaaggatattctgggccattacgtgggctcattcgaggatccttatcactcccattgcatgaaagttacggctcaaaatagtgacaagaactacaaagccgaatacgaggaagatcggggtaaaggtttctttcctcaaaccataactcaggagtatgaggccattaagaaattggaccagtgtaaagatcacacctataaagtccaccccgataagaccaagttcacccaagtcaccgattcacccgttctcctacaggcacaagtgaacagcaaacagttgagcgatctgaactacaaagcaaagcacgagtccgaaaagtttaagtgccatattcctccagataccccagctttcatacagcacaaggtgaatgcttacaatctgtcagataacctatataagcaggactgggaaaaatcaaaagcaaagaagtttgacattaaggtggacgccataccgcttcttgccgcaaaagcaaacacaaaaaacacatcagatgtcatgtacaaaaaggactatgagaaaaataaggtaaaggtgcagcagagatag

SEQ ID NO: 95989 - DNA, 864 bp, Artificial Sequence
  derived and/or modified sequence
atggccgacgacgaggactacgaggaggtggtggagtactacaccgaggaggtggtgtacgaggaggtgcccggcgagaccatcaccaagatctacgagaccaccaccaccagaaccagcgactacgagcagagcgagaccagcaagcccgccctggcccagcccgccctggcccagcccgccagcgccaagcccgtggagagaagaaaggtgatcagaaagaaggtggaccccagcaagttcatgaccccctacatcgcccacagccagaagatgcaggacctgttcagccccaacaagtacaaggagaagttcgagaagaccaagggccagccctacgccagcaccaccgacacccccgagctgagaagaatcaagaaggtgcaggaccagctgagcgaggtgaagtacagaatggacggcgacgtggccaagaccatctgccacgtggacgagaaggccaaggacatcgagcacgccaagaaggtgagccagcaggtgagcaaggtgctgtacaagcagaactgggaggacaccaaggacaagtacctgctgccccccgacgcccccgagctggtgcaggccgtgaagaacaccgccatgttcagcaagaagctgtacaccgaggactgggaggccgacaagagcctgttctacccctacaacgacagccccgagctgagaagagtggcccaggcccagaaggccctgagcgacgtggcctacaagaagggcctggccgagcagcaggcccagttcacccccctggccgacccccccgacatcgagttcgccaagaaggtgaccaaccaggtgagcaagcagaaggagaagaagagaaagaagaagagaaagaaggtgtag

SEQ ID NO: 95990 - DNA, 1014 bp, Artificial Sequence
  derived and/or modified sequence
cagaagtacaaggaggactacgagaacaagatcaagggcaagtggagcgagaccccctgcttcgaggtggccaacgccagaatgaacgccgacaacatcagcaccagaaagtaccaggaggacttcgagaacatgaaggaccagatctacttcatgcagaccgagacccccgagtacaagatgaacaagaaggccggcgtggccgccagcaaggtgaagtacaaggaggactacgagaagaacaagggcaaggccgactacaacgtgctgcccgccagcgagaacccccagctgagacagctgaaggccgccggcgacgccctgagcgacaagctgtacaaggagaactacgagaagaccaaggccaagagcatcaactactgcgagacccccaagttcaagctggacaccgtgctgcagaacttcagcagcgacaagaagtacaaggacagctacctgaaggacatcctgggccactacgtgggcagcttcgaggacccctaccacagccactgcatgaaggtgaccgcccagaacagcgacaagaactacaaggccgagtacgaggaggacagaggcaagggcttcttcccccagaccatcacccaggagtacgaggccatcaagaagctggaccagtgcaaggaccacacctacaaggtgcaccccgacaagaccaagttcacccaggtgaccgacagccccgtgctgctgcaggcccaggtgaacagcaagcagctgagcgacctgaactacaaggccaagcacgagagcgagaagttcaagtgccacatcccccccgacacccccgccttcatccagcacaaggtgaacgcctacaacctgagcgacaacctgtacaagcaggactgggagaagagcaaggccaagaagttcgacatcaaggtggacgccatccccctgctggccgccaaggccaacaccaagaacaccagcgacgtgatgtacaagaaggactacgagaagaacaaggtgaaggtgcagcagagatag

SEQ ID NO: 95991 - protein, 2583 aa, Artificial Sequence
  derived and/or modified sequence
  misc_feature (1)..(1): Xaa can be any naturally occurring amino acid
XSSITFSVKVEGRPVPTVHWLREEAERGVLWIGPDTPGYTVASSAQQHSLVLLDVGRQHQGTYTCIASNAAGQALCSASLHVSGLPKVEEQEKVKEALISTFLQGTTQAISAQGLETASFADLGGQRKEEPLAAKEALGHLSLAEVGTEEFLQKLTSQITEMVSAKITQAKLQVPGGDSDEDSKTPSASPRHGRSRPSSSIQESSSESEDGDARGEIFDIYVVTADYLPLGAEQDAITLREGQYVEVLDAAHPLRWLVRTKPTKSSPSRQGWVSPAYLDRRLKLSPEWGAAEAPEFPGEAVSEDEYKARLSSVIQELLSSEQAFVEELQFLQSHHLQHLERCPHVPIAVAGQKAVIFRNVRDIGRFHSSSFLQELQQCDTDDDVAMCFIKNQAAFEQYLEFLVGRVQAESVVVSTAIQEFYKKYAEEALLAGDPSQPPPPPLQHYLEQPVERVQRYQALLKELIRNKARNRQNCALLEQAYAVVSALPQRAENKLHVSLMENYPGTLQALGEPIRQGHFIVWEGAPGARMPWKGHNRHVFLFRNHLVICKPRRDSRTDTVSYVFRNMMKLSSIDLNDQVEGDDRAFEVWQEREDSVRKYLLQARTAIIKSSWVKEICGIQQRLALPVWRPPDFEEELADCTAELGETVKLACRVTGTPKPVISWYKDGKAVQVDPHHILIEDPDGSCALILDSLTGVDSGQYMCFAASAAGNCSTLGKILVQVPPRFVNKVRASPFVEGEDAQFTCTIEGAPYPQIRWYKDGALLTTGNKFQTLSEPRSGLLVLVIRAASKEDLGLYECELVNRLGSARASAELRIQSPMLQAQEQCHREQLVAAVEDTTLERADQEVTSVLKRLLGPKAPGPSTGDLTGPGPCPRGAPALQETGSQPPVTGTSEAPAVPPRVPQPLLHEGPEQEPEAIARAQEWTVPIRMEGAAWPGAGTGELLWDVHSHVVRETTQRTYTYQAIDTHTARPPSMQVTIEDVQAQTGGTAQFEAIIEGDPQPSVTWYKDSVQLVDSTRLSQQQEGTTYSLVLRHVASKDAGVYTCLAQNTGGQVLCKAELLVLGGDNEPDSEKQSHRRKLHSFYEVKEEIGRGVFGFVKRVQHKGNKILCAAKFIPLRSRTRAQAYRERDILAALSHPLVTGLLDQFETRKTLILILELCSSEELLDRLYRKGVVTEAEVKVYIQQLVEGLHYLHSHGVLHLDIKPSNILMVHPAREDIKICDFGFAQNITPAELQFSQYGSPEFVSPEIIQQNPVSEASDIWAMGVISYLSLTCSSPFAGESDRATLLNVLEGRVSWSSPMAAHLSEDAKDFIKATLQRAPQARPSAAQCLSHPWFLKSMPAEEAHFINTKQLKFLLARSRWQRSLMSYKSILVMRSIPELLRGPPDSPSLGVARHLCRDTGGSSSSSSSSDNELAPFARAKSLPPSPVTHSPLLHPRGFLRPSASLPEEAEASERSTEAPAPPASPEGAGPPAAQGCVPRHSVIRSLFYHQAGESPEHGALAPGSRRHPARRRHLLKGGYIAGALPGLREPLMEHRVLEEEAAREEQATLLAKAPSFETALRLPASGTHLAPGHSHSLEHDSPSTPRPSSEACGEAQRLPSAPSGGAPIRDMGHPQGSKQLPSTGGHPGTAQPERPSPDSPWGQPAPFCHPKQGSAPQEGCSPHPAVAPCPPGSFPPGSCKEAPLVPSSPFLGQPQAPPAPAKASPPLDSKMGPGDISLPGRPKPGPCSSPGSASQASSSQVSSLRVGSSQVGTEPGPSLDAEGWTQEAEDLSDSTPTLQRPQEQATMRKFSLGGRGGYAGVAGYGTFAFGGDAGGMLGQGPMWARIAWAVSQSEEEEQEEARAESQSEEQQEARAESPLPQVSARPVPEVGRAPTRSSPEPTPWEDIGQVSLVQIRDLSGDAEAADTISLDISEVDPAYLNLSDLYDIKYLPFEFMIFRKVPKSAQPEPPSPMAEEELAEFPEPTWPWPGELGPHAGLEITEESEDVDALLAEAAVGRKRKWSSPSRSLFHFPGRHLPLDEPAELGLRERVKASVEHISRILKGRPEGLEKEGPPRKKPGLASFRLSGLKSWDRAPTFLRELSDETVVLGQSVTLACQVSAQPAAQATWSKDGAPLESSSRVLISATLKNFQLLTILVVVAEDLGVYTCSVSNALGTVTTTGVLRKAERPSSSPCPDIGEVYADGVLLVWKPVESYGPVTYIVQCSLEGGSWTTLASDIFDCCYLTSKLSRGGTYTFRTACVSKAGMGPYSSPSEQVLLGGPSHLASEEESQGRSAQPLPSTKTFAFQTQIQRGRFSVVRQCWEKASGRALAAKIIPYHPKDKTAVLREYEALKGLRHPHLAQLHAAYLSPRHLVLILELCSGPELLPCLAERASYSESEVKDYLWQMLSATQYLHNQHILHLDLRSENMIITEYNLLKVVDLGNAQSLSQEKVLPSDKFKDYLETMELLEGQGAVPQTDIWAIGVTAFIMLSAEYPVSSEGARDLQRGLRKGLVRLSRCYAGLSGGAVAFLRSTLCAQPWGRPCASSCLQCPWLTEEGPACSRPAPVTFPTARLRVFVRNREKRRALLYKRHNLAQVR

SEQ ID NO: 95992 - protein, 538 aa, Artificial Sequence
  derived and/or modified sequence
MSSRLGAVPATSGPTTFKQQRSTRIVGAKNRTQCSIKDNSFQYTIPHDDSLSGSSSASSCEPVSDFPASFRKSTYWMKMRRIKPAATSHVEGSGGVSAKGKRKPRQEEDEDYREFPQKKHKLYGSLEEQWYLEIVDKGSVSCPTCQAVGRKTIEGLKKHMENCKQEMFTCHHCGKQLRSLAGMKYHVMANHNSLPILKAGDEIDEPSERERLRTVLKRLGKLRCMRESCSSSFTSIMGYLYHVRKCGKGAAELEKMTLKCHHCGKPYRSKAGLAYHLRSEHGPISFFPESGQPECLKEMNLESKSGGRVQRRSAKIAVYHLQELASAELAKEWPKRKVLQDLVPDDRKLKYTRPGLPTFSQEVLHKWKTDIKKYHRIQCPNQGCEAVYSSVSGLKAHLGSCTLGNFVAGKYKCLLCQKEFVSESGVKYHINSVHAEDWFVVNPTTTKSFEKLMKIKQRQQEEEKRRQQHRSRRSLRRRQQPGIELPETELSLRVGKDQRRNNEELVVSASCKEPEQEPVPAQFQKVKPPKTNHKRGRK

SEQ ID NO: 95993 - DNA, 1617 bp, Artificial Sequence
  derived and/or modified sequence
atgagcagcagactgggcgccgtgcccgccaccagcggccccaccaccttcaagcagcagagaagcaccagaatcgtgggcgccaagaacagaacccagtgcagcatcaaggacaacagcttccagtacaccatcccccacgacgacagcctgagcggcagcagcagcgccagcagctgcgagcccgtgagcgacttccccgccagcttcagaaagagcacctactggatgaagatgagaagaatcaagcccgccgccaccagccacgtggagggcagcggcggcgtgagcgccaagggcaagagaaagcccagacaggaggaggacgaggactacagagagttcccccagaagaagcacaagctgtacggcagcctggaggagcagtggtacctggagatcgtggacaagggcagcgtgagctgccccacctgccaggccgtgggcagaaagaccatcgagggcctgaagaagcacatggagaactgcaagcaggagatgttcacctgccaccactgcggcaagcagctgagaagcctggccggcatgaagtaccacgtgatggccaaccacaacagcctgcccatcctgaaggccggcgacgagatcgacgagcccagcgagagagagagactgagaaccgtgctgaagagactgggcaagctgagatgcatgagagagagctgcagcagcagcttcaccagcatcatgggctacctgtaccacgtgagaaagtgcggcaagggcgccgccgagctggagaagatgaccctgaagtgccaccactgcggcaagccctacagaagcaaggccggcctggcctaccacctgagaagcgagcacggccccatcagcttcttccccgagagcggccagcccgagtgcctgaaggagatgaacctggagagcaagagcggcggcagagtgcagagaagaagcgccaagatcgccgtgtaccacctgcaggagctggccagcgccgagctggccaaggagtggcccaagagaaaggtgctgcaggacctggtgcccgacgacagaaagctgaagtacaccagacccggcctgcccaccttcagccaggaggtgctgcacaagtggaagaccgacatcaagaagtaccacagaatccagtgccccaaccagggctgcgaggccgtgtacagcagcgtgagcggcctgaaggcccacctgggcagctgcaccctgggcaacttcgtggccggcaagtacaagtgcctgctgtgccagaaggagttcgtgagcgagagcggcgtgaagtaccacatcaacagcgtgcacgccgaggactggttcgtggtgaaccccaccaccaccaagagcttcgagaagctgatgaagatcaagcagagacagcaggaggaggagaagagaagacagcagcacagaagcagaagaagcctgagaagaagacagcagcccggcatcgagctgcccgagaccgagctgagcctgagagtgggcaaggaccagagaagaaacaacgaggagctggtggtgagcgccagctgcaaggagcccgagcaggagcccgtgcccgcccagttccagaaggtgaagccccccaagaccaaccacaagagaggcagaaagtag

SEQ ID NO: 95994 - DNA, 1617 bp, Artificial Sequence
  derived and/or modified sequence
atgtcatccaggctaggagcggtgcccgcaaccagcgggcccacaaccttcaagcaacagcggagcactcgtatcgttggtgctaagaaccgtactcaatgctctataaaggacaattcgttccagtacaccataccacacgatgattccttgagcggctcatcttccgcctccagttgcgagcctgtaagtgatttcccagcctcattcaggaaaagtacatattggatgaaaatgagaaggatcaaacccgctgccacctctcatgtggagggttcaggcggagtcagtgctaaaggcaagcgcaagccacgtcaggaagaggatgaggattatcgggagtttccccagaagaagcacaaactgtatggttccttggaagaacagtggtacctggagatcgtggacaaaggctccgtgtcctgcccgacctgccaggcagtgggccgcaagacaattgagggtctgaagaaacacatggaaaattgcaaacaagagatgttcacctgccaccattgtggcaaacagttgcgcagtctcgccgggatgaagtatcacgtgatggctaatcataactctctgccgatcttgaaagctggagatgagatcgatgaacccagcgagagggaacgactccgaacggttcttaaacgattgggcaagctgcgatgcatgcgcgaaagctgcagctcatccttcacaagtatcatgggttatctctaccacgtacggaagtgcggaaagggcgccgccgagctggagaagatgactttgaaatgccatcactgtggaaagccttacaggtcgaaagctggtcttgcttatcacttgagatcagagcacgggccgattagtttctttccagaatcaggacagcccgagtgtcttaaggaaatgaatctggaaagtaagtctggaggtcgagtgcagagacgttcagctaagatcgccgtctatcacttgcaggaactagcaagcgccgagctggctaaggagtggcccaagagaaaagtgctgcaagacttggttccagacgaccgcaagctgaagtataccaggccaggactcccgactttttcccaggaggtgctgcacaaatggaagacagacattaaaaaatatcatcggatccaatgcccgaatcagggatgtgaggcggtgtactcttcagtgagtggactcaaagctcatcttgggtcttgcaccttgggcaatttcgtcgcaggaaaatacaagtgtctgctctgtcagaaggagttcgtcagcgagagcggcgtgaagtaccacattaactctgtgcacgccgaagattggtttgtcgttaatccaacaactacaaagagtttcgagaaactcatgaagattaagcaaagacagcaggaagaggaaaaacgacggcaacagcataggtcacgccgctctctgaggagacggcagcagccagggatcgagcttccagagacagagctgagcttgcgtgtgggcaaggatcaacggcgaaacaatgaagaactagtagttagcgccagctgcaaagagcccgaacaggaaccagttccagcccagtttcagaaagtaaaaccccctaagactaaccataaacgaggacgcaagtag

SEQ ID NO: 95995 - DNA, 1617 bp, Artificial Sequence
  derived and/or modified sequence
atgagcagccggctgggcgctgtgcctgccaccagcggccccaccaccttcaagcagcagaggagcaccagaattgtgggcgccaagaacagaacccagtgcagcatcaaggacaacagcttccagtacaccatcccccatgatgacagcctgagcggcagcagcagcgccagcagctgtgagcctgtgtctgacttccctgccagcttcaggaagagcacctactggatgaagatgaggcgcatcaagccagctgccaccagccacgtggagggcagcggaggagtgtctgccaagggcaagaggaagccccggcaggaggaggatgaggactaccgggagttcccccagaagaagcacaagctgtatggcagcctggaggagcagtggtacctggagatcgtggacaagggctctgtgtcctgccccacctgccaggccgtgggcaggaagaccatcgagggcctgaagaagcacatggagaactgcaagcaggagatgttcacctgccaccactgcggcaagcagctgcggagcctggccggcatgaagtaccacgtgatggccaaccacaacagcctgcccatcctgaaggctggagatgaaattgatgagcccagcgagcgggagcggctgaggacagtgctgaagaggctgggcaagctgcgctgcatgagggagagctgcagcagcagcttcaccagcatcatgggctacctgtaccacgtgaggaaatgtgggaaaggagctgctgagctggagaagatgaccctgaagtgccaccactgcggcaagccctaccgcagcaaggccggcctggcctaccacctgcggagtgaacatggccccatctccttcttccctgagagcggccagcctgagtgcctgaaggagatgaacctggagagcaagagcggcggccgggtgcagaggagaagtgccaagattgctgtgtaccacctgcaggagctggccagcgctgagctggccaaggagtggcccaagaggaaggtgctgcaggacctggtgcctgatgacaggaagctgaagtacacccggcccggcctgcccaccttcagccaggaggtgctgcacaagtggaagacagacatcaagaagtaccaccgcatccagtgccccaaccagggctgtgaggccgtgtacagctctgtgtctggcctgaaggcccacctgggcagctgcaccctgggcaactttgtggccggcaagtacaagtgcctgctgtgccagaaggagtttgtgtctgagagcggcgtgaagtaccacatcaacagcgtgcatgctgaggactggtttgtggtgaaccccaccaccaccaagagctttgagaagctgatgaagatcaagcagaggcagcaggaggaggagaagaggcggcagcagcacaggagccgccgcagcctgcggcggcggcagcagcccggcatcgagctgcctgagacagagctgagcctgcgggtgggcaaggaccagaggaggaacaatgaggagctggtggtgtctgccagctgcaaggagcctgagcaggagcctgtgcctgcccagttccagaaggtgaagccacccaagaccaaccacaagaggggcaggaagtag

SEQ ID NO: 95996 - DNA, 1617 bp, Artificial Sequence
  derived and/or modified sequence
atgagcagccggctgggcgccgtgcccgccaccagcggccccaccactttcaagcagcaacgcagcacacgcatcgtaggtgctaaaaaccgaacacagtgctcaattaaagataatagctttcaatacaccattccgcatgatgactctttgagcgggtcctcctctgcttcttcctgtgagcccgtttcggactttccagcatcattccgaaaaagtacttactggatgaaaatgaggaggattaagcctgccgccacttcgcacgtggagggtagtggaggcgtgtctgcaaaaggcaaacgcaagccaaggcaagaggaagatgaggattatagagagttcccacagaaaaagcacaagctgtatggcagtctggaagagcagtggtacctcgaaatcgtggataaaggtagtgtctcatgtcccacgtgccaagccgtcgggcgcaagacaattgaggggctgaaaaagcacatggaaaattgcaagcaggaaatgtttacctgtcaccactgtggaaagcagctacgaagcctggcaggaatgaaataccacgttatggcaaaccataatagtctgcccattctgaaggccggggatgaaatcgacgagcccagcgagcgggagaggctgagaaccgtgttaaagcgactggggaaactaaggtgcatgagggaatcgtgttcatctagttttacctctatcatgggatacttataccacgtgagaaagtgtggtaagggggccgctgaattggagaaaatgactctgaagtgccaccactgtggtaagccgtatagatccaaggcagggctggcctaccacctaagatctgagcatgggcctattagcttctttcctgaatctggccagcccgagtgtctgaaggagatgaacctagagagcaagagtggaggtcgcgttcagcgccgctctgcaaaaatagctgtgtatcacctgcaggagctggcgagcgcagagctggccaaagaatggcctaagcggaaggtacttcaggacctagtccccgatgacaggaagctcaaatacacaagacctggtctgcctacctttagtcaagaagtattgcacaaatggaagaccgacatcaaaaaataccaccggattcaatgcccaaaccaggggtgcgaggccgtctactccagcgtcagtggtctgaaagcccatttgggaagctgcactttgggtaactttgtcgccggtaagtacaagtgtctgctgtgccagaaggaattcgtatcagaatctggagtgaagtaccatataaacagcgtgcatgctgaggactggtttgtggtgaacccaacaacgaccaagtcctttgagaagctaatgaagatcaagcagagacagcaggaggaagaaaagcggcggcagcagcataggagtcgccgtagcttgagacgacggcaacagccaggcatcgagttaccagaaaccgagttatctctccgcgtaggaaaggatcagagaagaaataatgaggagctggtggtttccgcctcatgtaaagagcccgaacaggagccagtgcccgcacagttccagaaagttaagcccccaaaaaccaatcacaagcgtggacggaaatag

SEQ ID NO: 95997 - DNA, 1617 bp, Artificial Sequence
  derived and/or modified sequence
atgagctcccgcctgggcgctgtgcccgcaacatccgggccaacaacctttaaacagcagagatccacgaggatcgtcggggctaagaaccgcactcagtgctctatcaaagataacagcttccagtacaccatacctcacgatgattccctgtctggctcctcaagtgcctccagctgcgagcctgtatctgattttccagctagttttcgaaagtccacctattggatgaaaatgagaaggattaaaccagccgctaccagccatgttgaaggctccggcggagtaagtgccaagggaaagaggaaaccacgacaggaagaggacgaggattatcgggagttcccccaaaagaaacataagctctatggctccctcgaggagcagtggtatttggaaatcgttgataaggggtcggtgtcatgccccacatgtcaggcggtgggtcggaagacgattgaaggactaaagaaacatatggaaaactgtaagcaggagatgttcacttgccaccattgcggaaagcagctacgatccttggccggaatgaagtaccatgtgatggcaaaccataattctctccccatccttaaggccggtgacgaaatagacgagccttctgagcgcgagcggctgagaacggtgctgaagcgactcggaaagctgcgctgcatgagggagagttgttccagttcattcacgtcaatcatgggctacctgtaccatgttagaaaatgcgggaagggggcagcagagctcgaaaagatgacgctaaaatgccaccattgtgggaagccttacaggagcaaggccggactagcatatcacctgcgttctgaacacgggccaatttcttttttccctgagagtgggcagccagaatgtctgaaggagatgaatttagaatcaaagtcaggcggaagagttcaaaggagaagtgcaaagatagccgtttatcacctccaggagctggcatctgctgaactcgctaaagagtggcccaagagaaaagtgttgcaggacctggtacctgatgaccggaagcttaaatacacgcggccaggcttaccaacattcagtcaggaagttctgcacaaatggaagacagacataaagaagtaccacagaatacaatgccccaatcagggctgcgaggccgtgtattctagcgtctcaggactgaaggcacatttgggctcttgtacacttgggaatttcgtcgccggaaagtacaagtgcctcttgtgccagaaagaattcgtgtccgaatcaggcgtgaagtatcacattaactccgtgcatgctgaagactggttcgtcgtaaatcctacaacgacgaaatctttcgagaagctgatgaagattaaacagcgccaacaggaggaggagaaaaggaggcaacagcaccggtcaagacgttccctccgaaggcggcaacaaccagggattgaactacctgaaaccgaactcagtctgagagtgggaaaagatcagcgccgaaacaacgaagagctcgttgtcagcgcctcctgcaaggaacctgagcaggagcccgtccctgcgcagttccaaaaggtaaagcctcctaagacaaaccacaaacggggacggaagtag

SEQ ID NO: 95998 - DNA, 2178 bp, Artificial Sequence
  derived and/or modified sequence
cttgggtgaaattgttaggcgtggagagggagtgatgtcttccagactcggtgctgtacccgccacttcgggacccacaacctttaagcagcagaggagcacgaggatcgtgggagctaagaacaggacccagtgctccataaaggataatagtttccagtacactatccctcatgatgactccttaagtggttcatcgtctgcatcttcgtgtgaaccagtgagtgattttccagcatctttccgaaaatctacctactggatgaagatgagaagaatcaagccagctgctacttctcatgtcgaagggtcaggtggagtatcagccaaggggaaaaggaaacccaggcaggaagaagatgaagactatcgagaatttcctcagaagaagcataagctttatggcagtttggaggagcaatggtacttagaaatcgttgataaaggcagtgtctcctgccctacctgccaggcagtggggaggaagaccatagagggtttaaagaaacacatggaaaactgcaagcaggaaatgtttacttgtcatcattgtgggaaacaacttcgttcactggcagggatgaagtatcatgtcatggcaaatcataatagtttgcccattttgaaagccggagatgaaatagatgagccaagtgagagggaaaggctccgaacagttctaaagagactgggaaagctcaggtgcatgcgtgagagttgctccagtagcttcaccagcatcatgggatatctctaccatgtcagaaaatgtggcaaaggggctgcagagctggaaaagatgaccctgaaatgtcaccactgtggaaaaccatataggtcgaaggctggacttgcatatcacctgaggtcagagcatgggcctatatccttctttccagagtcaggacagccagagtgcttaaaggagatgaacctagagtcaaagagtgggggccgagttcagagacgttctgccaagatagctgtataccacctacaggagctggcctctgctgaactggccaaggaatggcccaagaggaaggtgcttcaggacctggtacctgatgatcgaaagttaaaatatactcgtccagggctccctaccttcagccaggaagtactacataaatggaagacagatatcaagaaatatcatcgtattcagtgtcctaaccagggctgtgaggctgtctacagcagtgtatctggccttaaagctcacctgggctcttgtacattgggaaactttgtggctggaaaatacaaatgtcttctatgtcagaaagaatttgtgtcagagagtggtgtcaagtatcacatcaactccgtccatgctgaggactggttcgttgtaaacccaacaacaaccaaaagctttgaaaagctgatgaagataaagcagcggcagcaagaagaagaaaagcggaggcagcagcacaggagcagaaggtctctaagaaggcggcagcagcctggcattgagcttcccgagacagagctgagtcttagagtagggaaggatcagaggaggaataatgaggaactggtagtgtcagcctcctgtaaggaaccagagcaggagccagtgccagcacagttccagaaagtaaagcccccaaagactaatcataaacgaggaaggaaataggcagtcagtgtaaaagtgctcctaggaaagcagatgtgatgctgttgtcacggggacctgtgctgggaggactgagtgaagattctttcagctgtttgtgtaaggctgtgactttctcagctccttcctcctgtgtaaatttcactgtcttcccttcttacattttgattcccccctccccttttagtaggttttcctgctattcctcgtcaagtcctcttgtttttttatcttgcccaaagagctccctctcaaggccaactataggctcctcttgccctgtacaaaactaagaaacctctttggttgtcctttccttcctggggtatagaatgttcttggaagctccattgatttagtagctgctccatcatctagcttgtgaaaccattccaaactaattttttaaaaccataactgatttgtcattttgtatttgtgatataacaagtctagaagttagaactgttgtcattcacataataagattactctgtctccttgggaaaaaaactttatggaggctg

SEQ ID NO: 95999 - DNA, 1741 bp, Artificial Sequence
  derived and/or modified sequence
gagagcggaagtggcgttggtctggccggagcccttgggtgaaattgttaggcgtggagagggagtgatgtcttccagactcggtgctgtacccgcctagcaggacccagtgctccataaaggataatagtttccagtacactatccctcatgatgactccttaagtggttcatcgtctgcatcttcgtgtgaaccagtgagtgattttccagcatctttccgaaaatctacctactggatgaagatgagaagaatcaagccagctgctacttctcatgtcgaagggtcaggtggagtatcagccaaggggaaaaggaaacccaggcaggaagaagatgaagactatcgagaatttcctcagaagaagcataagctttatgggaggaagcaacggcctaaaactcagcccaatcccaaatcccaggcccgtcgtattcggaaggaaccaccagtttatgcagcaggaaatgtttacttgtcatcattgtgggaaacaacttcgttcactggcagggatgaagtatcatgtcatggcaaatcataatagtttgcccattttgaaagccggagatgaaatagatgagccaagtgagagggaaaggctccgaacagttctaaagagactgggaaagctcaggtgcatgcgtgagagttgctccagtagcttcaccagcatcatgggatatctctaccatgtcagaaaatgtggcaaaggggctgcagagctggaaaagatgaccctgaaatgtcaccactgtggaaaaccatataggtcgaaggctggacttgcatatcacctgaggtcagagcatgggcctatatccttctttccagagtcaggacagccagagtgcttaaaggagatgaacctagagtcaaagagtgggggccgagttcagagacgttctgccaagatagctgtataccacctacaggagctggcctctgctgaactggccaaggaatggcccaagaggaaggtgcttcaggacctggtacctgatgatcgaaagttaaaatatactcgtccagggctccctaccttcagccaggaagtactacataaatggaagacagatatcaagaaatatcatcgtattcagtgtcctaaccagggctgtgaggctgtctacagcagtgtatctggccttaaagctcacctgggctcttgtacattgggaaactttgtggctggaaaatacaaatgtcttctatgtcagaaagaatttgtgtcagagagtggtgtcaagtatcacatcaactccgtccatgctgaggactggttcgttgtaaacccaacaacaaccaaaagctttgaaaagctgatgaagataaagcagcggcagcaagaagaagaaaagcggaggcagcagcacaggagcagaagaggctcacaggacacctgcatgcccaaggcactccaccgtatgtgatcaacctggatccagcagtacatgaagttccctttcctgccaatattgatattcgtgatactgtaaagtataaagaagtaatgaaacaatatggacttggacccaatggcggcatagtgacctcactcaatctctttgctaccagatttgatcaggtgatgaaatttattgagaaggcccagaacatgtccaaatatgtgttgattgacacacctggacagattgaggtattcacctggtcagcttctgggacaattatcactgaagcccttgcatcctcatttccaacagttgtcatctatgtaat

SEQ ID NO: 96000 - DNA, 1473 bp, Artificial Sequence
  derived and/or modified sequence
atgaagatgagaagaatcaagcccgccgccaccagccacgtggagggcagcggcggcgtgagcgccaagggcaagagaaagcccagacaggaggaggacgaggactacagagagttcccccagaagaagcacaagctgtacggcagaaagcagagacccaagacccagcccaaccccaagagccaggccagaagaatcagaaaggagccccccgtgtacgccgccggcagcctggaggagcagtggtacctggagatcgtggacaagggcagcgtgagctgccccacctgccaggccgtgggcagaaagaccatcgagggcctgaagaagcacatggagaactgcaagcaggagatgttcacctgccaccactgcggcaagcagctgagaagcctggccggcatgaagtaccacgtgatggccaaccacaacagcctgcccatcctgaaggccggcgacgagatcgacgagcccagcgagagagagagactgagaaccgtgctgaagagactgggcaagctgagatgcatgagagagagctgcagcagcagcttcaccagcatcatgggctacctgtaccacgtgagaaagtgcggcaagggcgccgccgagctggagaagatgaccctgaagtgccaccactgcggcaagccctacagaagcaaggccggcctggcctaccacctgagaagcgagcacggccccatcagcttcttccccgagagcggccagcccgagtgcctgaaggagatgaacctggagagcaagagcggcggcagagtgcagagaagaagcgccaagatcgccgtgtaccacctgcaggagctggccagcgccgagctggccaaggagtggcccaagagaaaggtgctgcaggacctggtgcccgacgacagaaagctgaagtacaccagacccggcctgcccaccttcagccaggaggtgctgcacaagtggaagaccgacatcaagaagtaccacagaatccagtgccccaaccagggctgcgaggccgtgtacagcagcgtgagcggcctgaaggcccacctgggcagctgcaccctgggcaacttcgtggccggcaagtacaagtgcctgctgtgccagaaggagttcgtgagcgagagcggcgtgaagtaccacatcaacagcgtgcacgccgaggactggttcgtggtgaaccccaccaccaccaagagcttcgagaagctgatgaagatcaagcagagacagcaggaggaggagaagagaagacagcagcacagaagcagaagaagcctgagaagaagacagcagcccggcatcgagctgcccgagaccgagctgagcctgagagtgggcaaggaccagagaagaaacaacgaggagctggtggtgagcgccagctgcaaggagcccgagcaggagcccgtgcccgcccagttccagaaggtgaagccccccaagaccaaccacaagagaggcagaaagtag

SEQ ID NO: 96001 - DNA, 1473 bp, Artificial Sequence
  derived and/or modified sequence
atgaaaatgaggcgcatcaaacccgcggctacctcccatgtcgaagggagtgggggagtgtccgctaaggggaagcgaaaaccccgacaagaggaagacgaagattaccgcgagtttccacagaagaaacacaaattgtatggtaggaaacaacgtccaaagacacagcccaaccctaaatcgcaagccaggcgtattcgaaaagaaccacccgtttatgcagccggatccctggaggaacaatggtatctagaaattgtggataagggttccgtctcttgtcccacatgtcaagctgtgggcagaaagaccatagaaggcctgaaaaagcatatggaaaattgtaagcaggagatgttcacatgtcaccactgcggcaaacaacttaggtcactggctggaatgaagtaccatgttatggcaaatcataactccctcccaatcttgaaagccggtgatgagattgatgagcctagtgagagagaacggttgagaactgtattgaaaaggctcggcaaattacgatgtatgcgcgaatcatgcagtagtagctttacttccataatggggtacctgtatcatgtccgtaaatgcggaaagggggccgccgaattggagaaaatgacactgaaatgtcatcactgcgggaaaccctacaggagtaaggctgggctggcgtaccatcttcggagtgagcatggaccaatttcattttttcccgagtctggacagccggagtgtcttaaggagatgaacctggagagcaagagcggcggccgggttcaaaggcgatccgctaaaatcgccgtttaccacctgcaagagctagcctctgcggagttggccaaagagtggcccaagagaaaggtgttgcaggacctagttccagatgacagaaagctgaagtatacccggcctggactaccaactttcagtcaagaggtcctacataaatggaagacagatatcaagaagtaccatagaatccagtgtcccaatcaggggtgcgaggccgtgtacagcagtgtgtcgggacttaaggcccacctgggatcctgcacactggggaacttcgtggccggtaaatataaatgccttctttgtcagaaggaattcgtctcagaatccggagttaagtaccacattaactcagtccacgccgaggattggttcgtggtgaatccaaccacgactaagtcgtttgagaaactgatgaagatcaaacagcgccagcaggaggaagagaaacggcggcagcagcacaggtcaaggagatccctgcgacgtaggcagcagcctgggattgaactgcccgaaaccgagctttccctcagagtgggaaaggatcaaaggcgcaataacgaagagctggtagtatcggcatcttgcaaagagcctgaacaggaaccagtgccagcccagttccagaaagtcaagcctccaaagactaaccacaagagggggcgcaagtag

SEQ ID NO: 96002 - DNA, 1473 bp, Artificial Sequence
  derived and/or modified sequence
atgaagatgaggcgcatcaagccagctgccaccagccacgtggagggcagcggaggagtgtctgccaagggcaagaggaagccccggcaggaggaggatgaggactaccgggagttcccccagaagaagcacaagctgtatggcaggaagcagaggcccaagacccagcccaaccccaagagccaggcccggcgcatcaggaaggagccccctgtgtatgctgctggcagcctggaggagcagtggtacctggagatcgtggacaagggctctgtgtcctgccccacctgccaggccgtgggcaggaagaccatcgagggcctgaagaagcacatggagaactgcaagcaggagatgttcacctgccaccactgcggcaagcagctgcggagcctggccggcatgaagtaccacgtgatggccaaccacaacagcctgcccatcctgaaggctggagatgaaattgatgagcccagcgagcgggagcggctgaggacagtgctgaagaggctgggcaagctgcgctgcatgagggagagctgcagcagcagcttcaccagcatcatgggctacctgtaccacgtgaggaaatgtgggaaaggagctgctgagctggagaagatgaccctgaagtgccaccactgcggcaagccctaccgcagcaaggccggcctggcctaccacctgcggagtgaacatggccccatctccttcttccctgagagcggccagcctgagtgcctgaaggagatgaacctggagagcaagagcggcggccgggtgcagaggagaagtgccaagattgctgtgtaccacctgcaggagctggccagcgctgagctggccaaggagtggcccaagaggaaggtgctgcaggacctggtgcctgatgacaggaagctgaagtacacccggcccggcctgcccaccttcagccaggaggtgctgcacaagtggaagacagacatcaagaagtaccaccgcatccagtgccccaaccagggctgtgaggccgtgtacagctctgtgtctggcctgaaggcccacctgggcagctgcaccctgggcaactttgtggccggcaagtacaagtgcctgctgtgccagaaggagtttgtgtctgagagcggcgtgaagtaccacatcaacagcgtgcatgctgaggactggtttgtggtgaaccccaccaccaccaagagctttgagaagctgatgaagatcaagcagaggcagcaggaggaggagaagaggcggcagcagcacaggagccgccgcagcctgcggcggcggcagcagcccggcatcgagctgcctgagacagagctgagcctgcgggtgggcaaggaccagaggaggaacaatgaggagctggtggtgtctgccagctgcaaggagcctgagcaggagcctgtgcctgcccagttccagaaggtgaagccacccaagaccaaccacaagaggggcaggaagtag

SEQ ID NO: 96003 - DNA, 1473 bp, Artificial Sequence
  derived and/or modified sequence
atgaagatgcggcggatcaagcccgccgccaccagccacgtggaggggtctggaggagtgtccgctaagggaaaaaggaagcccaggcaggaagaggacgaggattacagagaatttccccagaagaagcataagctgtatggcagaaagcaaagaccgaaaacccaacccaaccctaagagtcaagcgaggagaattcgaaaggaaccaccggtatatgccgctgggtcactggaggaacagtggtacctggaaattgtcgataaaggctcggtgtcctgtcctacctgccaggctgtgggacggaagaccatagaaggcttgaagaagcacatggagaactgcaagcaagaaatgtttacttgccaccattgcggcaagcagctgagaagcttagccggcatgaaataccacgtgatggcaaatcataattcactaccaatactaaaagccggtgacgaaatcgatgagccttcagaacgggagaggcttcgaacggtcctcaagcgccttgggaagctccggtgtatgagggaatcatgttcaagcagtttcacttctatcatgggctatctgtatcacgtccgcaagtgcggtaaaggagcggctgagctagagaagatgacactgaaatgtcaccactgcggcaagccctatcgaagcaaggctggtctggcatatcacttaagaagtgagcacggccctattagcttctttccggagagcgggcaacccgagtgtcttaaagagatgaacttggagtctaagagtggaggcagagtacagaggcgcagcgccaagatcgccgtgtaccatcttcaggaattggcttctgcagaattagccaaagagtggcccaaacggaaggtcctgcaggatttggtgcccgatgacaggaagctgaagtatactcgcccgggcctgcctaccttttcacaggaagtgctccacaagtggaagacggatatcaagaagtaccacaggatacagtgcccaaaccaaggatgcgaggctgtctactcttccgtatctggactgaaggcccatctgggttcctgtacccttgggaactttgtagccggtaagtataaatgcctgctgtgccaaaaggagtttgtctcagagtctggggtgaagtaccatatcaactctgtgcacgctgaggattggtttgtggtgaaccccaccactaccaagtcttttgagaagcttatgaagatcaaacagcggcagcaggaagaagaaaaaaggcggcagcaacaccggtctcggagatctctgcgccggcgacaacagcctggtatcgagctgcctgagactgagctgagtcttcgagtcggcaaagatcaaagaagaaataacgaggaacttgttgtgagcgccagctgcaaggaacccgagcaggagcccgtcccagcgcagtttcagaaggtcaaacctcccaagacaaaccacaagcgggggaggaagtag

SEQ ID NO: 96004 - DNA, 1473 bp, Artificial Sequence
  derived and/or modified sequence
atgaagatgaggcggattaagcctgctgccacctcacacgtggaaggaagcgggggtgtgtccgcaaagggcaagcggaagccgagacaggaggaggacgaggattatagagagtttccccagaaaaagcacaagctctatggaaggaagcaaaggccaaagacccaacccaaccctaagagtcaagcacggagaatcagaaaggaacctccagtctacgccgctggttctctggaggagcaatggtacttggaaatcgtcgacaaaggcagcgtgtcctgccccacctgccaggctgtggggaggaagacaatcgaaggtctgaagaaacacatggagaactgtaaacaggaaatgttcacctgccatcactgcggcaaacagctcaggagtctcgcgggaatgaaatatcatgtaatggcaaaccacaatagcctgcctattctcaaagctggggatgagattgacgagccatctgagagggagcgcctcaggacagtgttgaagcgactcggcaagctgcgatgtatgcgcgagtcctgcagctcaagctttacttccattatgggttacctctaccatgtgaggaaatgtggaaagggcgctgccgagctcgagaaaatgactctcaagtgtcaccactgcggaaagccttataggagtaaagcagggcttgcgtaccatctgcgctccgagcacgggcctatcagctttttcccggagtcagggcagccagaatgcctgaaggagatgaacctggaatccaaatcaggaggcagagtccagcggaggagcgccaaaatcgcagtctaccacctgcaagaactggctagcgctgagctggcaaaagagtggccaaagagaaaggtgttgcaagatctggttcccgatgaccggaaactgaaatacacacggccaggtctccctacgttttcccaggaggtattacacaaatggaagaccgatatcaagaagtatcacaggatacagtgtcctaatcaggggtgcgaagctgtttatagctcagtaagtggacttaaggctcacctgggctcttgcacgctggggaactttgtggctggcaagtataagtgtttactgtgtcagaaagagttcgtctccgaaagcggtgtcaaatatcacattaactccgttcacgccgaagattggtttgtcgtgaacccaactactactaagagctttgagaaactcatgaaaatcaagcaacgccagcaagaggaagaaaagaggcggcagcaacatcgtagccggcgttcattgcgaagaagacagcagcctggcattgagctgccagagacggagctttcactgagagtcggaaaagatcaaagaaggaataatgaggaacttgttgtgtcagcttcttgcaaagaacccgagcaggaaccagtccccgctcagtttcagaaagtcaaaccacctaagaccaaccacaaaaggggccgaaaatag

SEQ ID NO: 96005 - DNA, 1158 bp, Artificial Sequence
  derived and/or modified sequence
atgagcaagggccaggtggagtaccagcccagaggcaagggcaaccccggcagaaagaagatgaagaccatcgagaacttcctgagaagaagcatcagcttcatgggcggcagcaacggcctgaagctgagccccatccccaaccccagacccgtggtgttcggcagaaaccaccagttcatgcagcaggagatgttcacctgccaccactgcggcaagcagctgagaagcctggccggcatgaagtaccacgtgatggccaaccacaacagcctgcccatcctgaaggccggcgacgagatcgacgagcccagcgagagagagagactgagaaccgtgctgaagagactgggcaagctgagatgcatgagagagagctgcagcagcagcttcaccagcatcatgggctacctgtaccacgtgagaaagtgcggcaagggcgccgccgagctggagaagatgaccctgaagtgccaccactgcggcaagccctacagaagcaaggccggcctggcctaccacctgagaagcgagcacggccccatcagcttcttccccgagagcggccagcccgagtgcctgaaggagatgaacctggagagcaagagcggcggcagagtgcagagaagaagcgccaagatcgccgtgtaccacctgcaggagctggccagcgccgagctggccaaggagtggcccaagagaaaggtgctgcaggacctggtgcccgacgacagaaagctgaagtacaccagacccggcctgcccaccttcagccaggaggtgctgcacaagtggaagaccgacatcaagaagtaccacagaatccagtgccccaaccagggctgcgaggccgtgtacagcagcgtgagcggcctgaaggcccacctgggcagctgcaccctgggcaacttcgtggccggcaagtacaagtgcctgctgtgccagaaggagttcgtgagcgagagcggcgtgaagtaccacatcaacagcgtgcacgccgaggactggttcgtggtgaaccccaccaccaccaagagcttcgagaagctgatgaagatcaagcagagacagcaggaggaggagaagagaagacagcagcacagaagcagaagaggcagccaggacacctgcatgcccaaggccctgcacagaatgtag

SEQ ID NO: 96006 - DNA, 1158 bp, Artificial Sequence
  derived and/or modified sequence
atgtctaaaggacaggttgagtaccagcctcgcggcaagggcaaccccgggcgaaagaaaatgaagactattgagaattttctgcgcagatctatctctttcatgggcggaagcaacggactcaagctttctccgattcctaaccctcgtcccgtagtgtttggccgcaatcatcaatttatgcagcaggagatgtttacctgtcaccactgcggaaaacagctgcggagtctggccgggatgaaataccacgttatggctaatcacaactcccttcccatactcaaggctggagacgaaatcgatgaaccttccgaaagagaacgactgcgcactgtgcttaagcgcctcgggaagttgcgttgtatgagggaatcctgttcgagttcctttacatccattatgggttatttgtaccacgtcaggaagtgtggcaagggagccgctgagctggaaaagatgactctcaaatgtcatcactgcggaaagccctacaggagtaaggccggtctggcttatcatctccgctcggagcatgggccgatcagcttctttccagagtcaggccaacctgaatgtttgaaagaaatgaatcttgaatcaaagtcagggggacgcgtccagaggagatcagccaaaattgccgtgtatcacctgcaggaactcgcctcagccgagctcgcaaaagagtggcctaaaagaaaagtgctccaggatctggtgccagacgacagaaagctgaagtatacccggcccggcctgcccacttttagccaggaggtcctgcacaagtggaagacagatatcaaaaaataccaccgcatacaatgcccaaaccagggatgcgaagctgtgtacagtagcgtgagcggtctaaaagcacatcttgggtcttgcaccctgggcaatttcgttgcaggaaagtacaagtgtctcttgtgtcagaaggagttcgtcagcgagtctggagtgaagtatcatataaactccgtccacgccgaggactggtttgtggtaaatccaacaaccaccaaatcttttgaaaagctgatgaaaataaagcagaggcagcaggaagaagagaagcggcggcagcagcatcgcagcagaagaggatctcaggacacctgtatgcccaaggctctgcatcgcatgtag

SEQ ID NO: 96007 - DNA, 1158 bp, Artificial Sequence
  derived and/or modified sequence
atgagcaagggccaggtggagtaccagccccggggcaaaggaaatcctggcaggaagaagatgaagaccatcgagaacttcctgcggcgcagcatctccttcatgggcggcagcaatggcctgaagctgagccccatccccaaccccaggcctgtggtgtttggaagaaaccaccagttcatgcagcaggagatgttcacctgccaccactgcggcaagcagctgcggagcctggccggcatgaagtaccacgtgatggccaaccacaacagcctgcccatcctgaaggctggagatgaaattgatgagcccagcgagcgggagcggctgaggacagtgctgaagaggctgggcaagctgcgctgcatgagggagagctgcagcagcagcttcaccagcatcatgggctacctgtaccacgtgaggaaatgtgggaaaggagctgctgagctggagaagatgaccctgaagtgccaccactgcggcaagccctaccgcagcaaggccggcctggcctaccacctgcggagtgaacatggccccatctccttcttccctgagagcggccagcctgagtgcctgaaggagatgaacctggagagcaagagcggcggccgggtgcagaggagaagtgccaagattgctgtgtaccacctgcaggagctggccagcgctgagctggccaaggagtggcccaagaggaaggtgctgcaggacctggtgcctgatgacaggaagctgaagtacacccggcccggcctgcccaccttcagccaggaggtgctgcacaagtggaagacagacatcaagaagtaccaccgcatccagtgccccaaccagggctgtgaggccgtgtacagctctgtgtctggcctgaaggcccacctgggcagctgcaccctgggcaactttgtggccggcaagtacaagtgcctgctgtgccagaaggagtttgtgtctgagagcggcgtgaagtaccacatcaacagcgtgcatgctgaggactggtttgtggtgaaccccaccaccaccaagagctttgagaagctgatgaagatcaagcagaggcagcaggaggaggagaagaggcggcagcagcacaggagccggcggggcagccaggacacctgcatgcccaaggccctgcacaggatgtag

SEQ ID NO: 96008 - DNA, 1158 bp, Artificial Sequence
  derived and/or modified sequence
atgagcaagggccaggtggagtaccagccccggggcaagggcaacccagggagaaaaaaaatgaagaccatagagaattttcttcgccggagtatttcatttatggggggaagtaacgggttgaaactgtcaccaataccaaaccccagacctgtagtgtttggaagaaaccaccaattcatgcagcaggagatgttcacatgtcatcattgcggcaaacagctgagaagtttagcaggaatgaaatatcatgtgatggctaatcacaattcgctgccgatcctcaaagccggggacgaaattgatgagccctctgagcgggagcgtttaagaaccgtgttaaaacgccttggcaagctccggtgcatgagggagtcttgcagttcaagctttactagtataatggggtatctgtaccacgttagaaagtgcggaaaaggggctgcagaactggagaaaatgacgctcaaatgtcaccattgcggcaaaccctaccgatccaaggcaggcctggcctatcatctccgctccgaacacgggcccataagtttctttccagaaagcggacagccagaatgtctgaaggagatgaatctcgagtctaagagtggcggcagagtgcagaggcgctctgccaaaattgccgtttaccaccttcaagaacttgcctcagctgagttggccaaggagtggccaaaaaggaaggtcctccaagacctggtgcctgatgaccggaaactgaaatatactcgccccggcttgcccaccttctcacaagaggttctgcacaagtggaagactgacatcaaaaagtaccacagaatccaatgccctaaccagggttgcgaagctgtgtatagcagcgtgtccggccttaaggcccacctgggatcttgcactctggggaacttcgttgccggaaagtataagtgcttactctgtcagaaggagttcgtgtctgaatcaggggtgaagtatcacattaatagtgtacatgctgaggattggttcgtagtcaaccctacaacgactaaatcgttcgaaaaactgatgaaaatcaagcagcgacaacaggaagaagaaaaaaggcgccagcagcaccgcagtagaagaggatctcaggacacatgtatgcccaaggccttgcatcggatgtag

SEQ ID NO: 96009 - DNA, 1158 bp, Artificial Sequence
  derived and/or modified sequence
atgtccaaggggcaggttgagtaccagcccagggggaaagggaacccaggccgaaaaaaaatgaagacgatcgaaaactttttgcggaggtccattagcttcatgggcggatccaatggactcaaattgtctccaattcccaatcctcggcctgtcgtcttcggcaggaaccaccagttcatgcagcaggaaatgtttacctgtcaccattgcgggaaacagttgagatcactggcgggtatgaagtaccacgtgatggctaaccacaatagcctgccgatcctcaaggctggagatgagatcgacgagccttcagaacgggagcgtctgaggacagttttgaaaagacttggaaagttacgctgcatgcgggagtcgtgttccagcagcttcaccagcattatgggttatctgtaccatgtgcgcaaatgcgggaagggggctgcggagctagaaaagatgaccctaaaatgccaccactgcggaaagccttaccgcagtaaggcagggctagcctatcatctccggagcgaacacggcccaatttctttcttccctgaatcaggccagcctgagtgtctgaaagagatgaatctcgaatccaaatccggcggaagagttcaacgaaggtcggctaagatcgccgtgtaccatctgcaggagctggcttccgccgagctggccaaggaatggcccaagcggaaggtcctccaggatctggtccctgatgaccgcaaactaaagtatacacgccctggtttgcccacattctctcaagaagttctgcataagtggaaaacagacattaagaagtaccaccggatccagtgtcccaatcaaggttgtgaagccgtatatagctcagtgagcgggctcaaggctcatctggggagttgcactttggggaacttcgttgcaggaaaatacaagtgcctcttatgccagaaggagttcgtgtcagagtctggcgtaaagtaccacatcaattccgtgcacgcagaagattggttcgtggttaacccaaccacaaccaagagcttcgaaaagttaatgaagatcaagcaaaggcaacaggaagaagaaaagcgaaggcagcagcatagaagtcgccgaggttcacaggatacatgtatgcctaaagcccttcaccggatgtag

SEQ ID NO: 96010 - DNA, 303 bp, Artificial Sequence
  derived and/or modified sequence
tgcgagacccccagactgcccgagatcgccctgagagccctgcccagacccggcgtgagcagcctgggcaccatcctgtgcgtgcccagcgtgcccgtgggccccatcgtgctgaccagcgccacccccgagagcagcagattcaccagacccgcccccagcaccgtgcccgaggcccacagacacagcagaatcctgagactggcccccgtgccctgcagatgctacagaccccccgcccccgcccacaccagcagaagcaccagcctgttctacgagagccccagcaccttcaacgtgtag

SEQ ID NO: 96011 - protein, 537 aa, Artificial Sequence
  derived and/or modified sequence
MRKPRLMNPCCYYPCQHQGICVRFGLDRYQCDCTRTGYSGPNCTIPGLWTWLRNSLRPSPSFTHFLLTHGRWFWEFVNATFIREMLMRLVLTVRSNLIPSPPTYNSAHDYISWESFSNVSYYTRILPSVPKDCPTPMGTKGKKQLPDAQLLARRFLLRRKFIPDPQGTNLMFAFFAQHFTHQFFKTSGKMGPGFTKALGHGVDLGHIYGDNLERQYQLRLFKDGKLKYQVLDGEMYPPSVEEAPVLMHYPRGIPPQSQMAVGQEVFGLLPGLMLYATLWLREHNRVCDLLKAEHPTWGDEQLFQTTRLILIGETIKIVIEEYVQQLSGYFLQLKFDPELLFGVQFQYRNRIAMEFNHLYHWHPLMPDSFKIGGGRNMDHHILHVAVDVIRESREMRLQPFNEYRKRFGMKPYTSFQELVGEKEMAAELEELYGDIDALEFYPGLLLEKCHPNSIFGESMIEIGAPFSLKGLLGNPICSPEYWKPSTFGGEVGFNIVKTATLKKLVCLNTKTCPYVSFRVPDASQDDGPAVERPSTEL

SEQ ID NO: 96012 - DNA, 1614 bp, Artificial Sequence
  derived and/or modified sequence
atgagaaagcccagactgatgaacccctgctgctactacccctgccagcaccagggcatctgcgtgagattcggcctggacagataccagtgcgactgcaccagaaccggctacagcggccccaactgcaccatccccggcctgtggacctggctgagaaacagcctgagacccagccccagcttcacccacttcctgctgacccacggcagatggttctgggagttcgtgaacgccaccttcatcagagagatgctgatgagactggtgctgaccgtgagaagcaacctgatccccagcccccccacctacaacagcgcccacgactacatcagctgggagagcttcagcaacgtgagctactacaccagaatcctgcccagcgtgcccaaggactgccccacccccatgggcaccaagggcaagaagcagctgcccgacgcccagctgctggccagaagattcctgctgagaagaaagttcatccccgacccccagggcaccaacctgatgttcgccttcttcgcccagcacttcacccaccagttcttcaagaccagcggcaagatgggccccggcttcaccaaggccctgggccacggcgtggacctgggccacatctacggcgacaacctggagagacagtaccagctgagactgttcaaggacggcaagctgaagtaccaggtgctggacggcgagatgtacccccccagcgtggaggaggcccccgtgctgatgcactaccccagaggcatccccccccagagccagatggccgtgggccaggaggtgttcggcctgctgcccggcctgatgctgtacgccaccctgtggctgagagagcacaacagagtgtgcgacctgctgaaggccgagcaccccacctggggcgacgagcagctgttccagaccaccagactgatcctgatcggcgagaccatcaagatcgtgatcgaggagtacgtgcagcagctgagcggctacttcctgcagctgaagttcgaccccgagctgctgttcggcgtgcagttccagtacagaaacagaatcgccatggagttcaaccacctgtaccactggcaccccctgatgcccgacagcttcaagatcggcggcggcagaaacatggaccaccacatcctgcacgtggccgtggacgtgatcagagagagcagagagatgagactgcagcccttcaacgagtacagaaagagattcggcatgaagccctacaccagcttccaggagctggtgggcgagaaggagatggccgccgagctggaggagctgtacggcgacatcgacgccctggagttctaccccggcctgctgctggagaagtgccaccccaacagcatcttcggcgagagcatgatcgagatcggcgcccccttcagcctgaagggcctgctgggcaaccccatctgcagccccgagtactggaagcccagcaccttcggcggcgaggtgggcttcaacatcgtgaagaccgccaccctgaagaagctggtgtgcctgaacaccaagacctgcccctacgtgagcttcagagtgcccgacgccagccaggacgacggccccgccgtggagagacccagcaccgagctgtag

SEQ ID NO: 96013 - DNA, 1614 bp, Artificial Sequence
  derived and/or modified sequence
atgaggaagccccgactgatgaatccctgctgctactacccctgtcagcatcagggcatctgtgtgagattcggtttagatcggtatcaatgcgattgtactcgtactggctatagtggcccaaactgcacaatcccaggcctctggacatggctacgcaactctctgcgccccagtccttctttcacccactttctccttacacacggccggtggttctgggaatttgtcaatgctacctttataagggaaatgctgatgaggttggtgctgactgtgcgatcgaaccttatacccagtccccccacatacaattccgctcacgactacatctcatgggagagcttttctaacgtgagctactacaccaggattctgccctccgtgcctaaggattgtcccaccccaatgggcactaaaggcaaaaaacagctgcccgacgcccaattgctcgcacggaggttccttctccggcggaagttcatcccagatccgcaggggactaacctgatgttcgcgttcttcgcgcaacatttcacacaccaattctttaaaacttctggtaagatgggacctggttttaccaaagccttgggtcacggcgtcgatctaggtcatatctatggagacaatctggagaggcaataccagcttcgcctgttcaaagatggtaagcttaaatatcaggtgttagatggcgagatgtaccccccctccgtggaagaagcccctgtgttaatgcactaccctagaggtataccgcctcaatctcagatggctgtgggacaggaggtgttcggcctcctcccaggactgatgctgtacgctacactctggttgagggagcataaccgcgtgtgtgacttgctcaaggctgaacatcccacttggggtgatgagcaacttttccaaactacacgccttatactaatcggcgagaccattaagattgtcattgaggagtacgtacaacagctgagcgggtactttctccagcttaaatttgatccagaattactattcggcgtccaattccaatatagaaatagaatcgctatggagttcaaccatctgtatcactggcatccactgatgccggatagcttcaagataggcggcggcaggaacatggaccaccatatccttcacgtcgcggtggacgtcatccgggaaagtagagaaatgaggctacaacccttcaacgagtacagaaaaaggtttggaatgaagccttacacctcattccaggagctggtgggggaaaaggagatggcagctgaactggaagagttgtacggggacatcgacgcactggaattctacccaggcttgctcctcgagaaatgtcatcccaacagcatttttggtgagtcaatgattgagatcggagctcctttcagcctgaagggcctcctgggcaaccctatctgctcaccagagtactggaagccaagtacctttggcggggaggtaggattcaatatcgtcaagaccgctactctcaaaaagctcgtgtgtctgaatacaaagacctgtccatacgtgtcattccgcgtgcctgacgcctcacaggacgacggcccggccgtagaacgaccatctactgaattatag

SEQ ID NO: 96014 - DNA, 1614 bp, Artificial Sequence
  derived and/or modified sequence
atgaggaagccccggctgatgaacccctgctgctactacccctgccagcaccagggcatctgtgtgcgcttcggcctggaccgctaccagtgtgactgcaccaggacaggctacagcggccccaactgcaccatccctggcctgtggacctggctgaggaacagcctgcggcccagccccagcttcacccacttcctgctgacccacggccgctggttctgggagtttgtgaatgccaccttcatccgggagatgctgatgaggctggtgctgactgtgcgcagcaacctgatccccagcccccccacctacaacagcgcccatgactacatctcctgggagagcttcagcaatgtgtcctactacacccgcatcctgcccagcgtgcccaaggactgccccacccccatgggcaccaagggcaagaagcagctgcctgatgcccagctgctggcccggcgcttcctgctgcggaggaagttcatcccagacccccagggcaccaacctgatgtttgccttctttgcccagcacttcacccaccagttcttcaagaccagcggcaagatgggccctggcttcaccaaggccctgggccacggcgtggacctgggccacatctacggggacaacctggagcggcagtaccagctgcggctcttcaaggatggcaagctgaagtaccaggtgctggatggagagatgtacccaccttctgtggaggaggcccctgtgctgatgcactacccccggggcatccccccccagagccagatggctgtgggccaggaggtgtttggcctgctgcccggcctgatgctgtatgccaccctgtggctgcgggagcacaacagagtgtgtgacctgctgaaggccgagcaccccacctggggagatgagcagctgttccagaccaccaggctcatcctgattggagagaccatcaagatcgtgattgaggagtatgtgcagcagctgagcggctacttcctgcagctgaagtttgatcctgagctgctgtttggagtgcagttccagtacagaaacagaattgccatggagttcaaccacctgtaccactggcaccccctgatgccagacagcttcaagattggaggcggcaggaacatggaccaccacatcctgcacgtggccgtggatgtgatccgggagagccgggagatgaggctgcagcccttcaatgagtacaggaagagatttggcatgaagccctacaccagcttccaggagctggtgggggagaaggagatggctgctgagctggaggagctgtatggagacattgatgccctggagttctacccaggcctgctgctggagaagtgccaccccaacagcatctttggagagagcatgattgagatcggggcccccttcagcctgaagggcctgctgggcaaccccatctgcagccctgagtactggaagcccagcacctttggaggagaggtgggcttcaacatcgtgaagacagccaccctgaagaagctggtgtgcctgaacaccaagacctgcccctacgtgtccttccgggtgcctgatgccagccaggatgatggccctgctgtggagcggcccagcacagagctgtag

SEQ ID NO: 96015 - DNA, 1614 bp, Artificial Sequence
  derived and/or modified sequence
atgcggaagccccggctgatgaacccctgctgctactacccctgccaacatcaggggatctgcgtaagatttggactggatcgatatcaatgtgactgcacccgtactggatattcaggacccaactgtactatccctgggctctggacgtggctgcggaattcattgagacccagtccgtccttcacccactttctcctaacacatggcaggtggttctgggaatttgtgaacgcaacttttatccgcgagatgcttatgaggcttgtgctaactgttaggagtaatctgatcccctcccccccaacctataacagcgcacacgactacattagttgggaaagcttctctaacgtcagctattacaccagaattctgcccagcgttccgaaggactgccctacaccaatggggaccaaaggaaagaaacagctgcctgacgctcagttactggcacgccgctttttacttcgccgaaaatttatccctgacccccaaggtacaaacttgatgtttgcttttttcgcccagcattttactcatcaattttttaagacctcggggaagatgggacctggatttaccaaagccctgggccacggcgtggacctcggccacatctacggcgacaatcttgagcgccagtaccagcttcggttatttaaggatggaaagctcaaataccaggtgttggatggagaaatgtacccaccatctgtggaagaggctcctgtgctgatgcattaccccagaggcataccgccccagtcccaaatggctgtgggtcaggaggttttcgggttactccccggtttgatgctgtacgccactctgtggctgagggagcacaatcgagtctgcgacctactgaaggctgaacatcccacctggggcgacgaacagctcttccagacgacgaggcttattctgattggagagaccatcaagatcgtgattgaagaatacgtacagcagttaagcgggtacttccttcagcttaagttcgacccagaactgctttttggtgtgcagttccaataccggaatcggattgctatggaattcaatcatctatatcattggcacccacttatgcccgattcattcaaaatcgggggtggccgcaatatggatcaccatattctgcacgtggctgtcgacgttatccgagagtctcgcgaaatgaggctgcaaccattcaacgagtatcgcaagcgtttcggtatgaaaccttacacctcattccaagagcttgtcggtgagaaggagatggccgccgaactggaggagctttatggggatatcgacgccctggagttttaccccgggttgcttctggagaagtgccatccaaattcaattttcggtgagtcaatgatcgaaattggtgcccctttctctctgaagggactgctaggcaaccctatttgcagccccgagtattggaagccctccacattcgggggggaggttggattcaatatcgtgaagaccgctactctcaagaaactcgtgtgtcttaatactaaaacttgcccatatgttagcttccgcgtgcccgacgccagccaggacgatggacctgccgtggagcggccttctacagagctgtag

SEQ ID NO: 96016 - DNA, 1614 bp, Artificial Sequence
  derived and/or modified sequence
atgaggaagccccgtctgatgaatccctgttgctactatccatgtcagcaccagggcatatgtgtcagattcgggctggaccggtaccagtgcgattgcactaggactggttactctggcccaaactgtacaatacctggcctatggacctggttaaggaacagcctgagaccttctccaagtttcacacacttcctcttgacccacgggcgatggttctgggaatttgtcaacgccacctttatcagggagatgctgatgcgcctggtcctgacggttcgctctaatttgatacctagtccccctacctataatagtgcccacgactacatatcctgggagtctttcagtaatgtcagttactatacacgtatactgccatctgtgccaaaagactgtccgacgcccatgggcaccaaaggaaagaaacagctgcccgatgcccagctgttggcccgaaggtttctcctgaggagaaaatttattccagatccccagggaaccaatctgatgtttgccttttttgcccaacatttcactcaccagttttttaaaacatcaggcaagatggggcctggattcacgaaggccctcgggcacggggtagacctggggcatatctatggagataacctcgagaggcaatatcagctgcgtctattcaaggatggtaaactgaaatatcaggtgctggatggcgagatgtatcccccttcagtggaggaggccccagttctgatgcactacccgagagggatcccccctcagtcacagatggccgtcgggcaagaggtgtttggactcttgcccggactgatgctgtatgccaccctctggttacgcgaacacaacagagtgtgtgatttattaaaggcggagcaccctacctggggggacgaacagttgtttcagaccaccagacttattctgatcggggagactattaaaattgttattgaggaatacgtccagcaactgagcggatatttcctgcagctgaagtttgaccccgagctcctgttcggcgtccaattccagtacaggaaccgaatcgcaatggaatttaatcatctgtatcattggcatccgctgatgcccgattctttcaagatcggtggaggcaggaatatggatcatcatatcctacacgtcgcggttgacgttatacgggagtcgcgtgaaatgagactgcagccattcaatgagtaccggaagcgatttgggatgaagccatacacaagttttcaggaacttgtaggggagaaggaaatggccgcagaactggaagagctctatggggacatcgacgcactcgagttctaccctggcctattactggagaagtgtcaccccaactcgatcttcggcgaaagcatgatagagataggcgcacccttctctcttaagggccttttagggaatccaatctgctcccctgaatattggaaaccctccacctttggcggtgaagttggcttcaacatagtgaagacggctactctcaaaaaactggtctgtctcaacacaaagacatgtccatacgtgtcattccgggtcccggatgcttctcaggacgacggccctgcagtggagagaccctccacagaactttag

SEQ ID NO: 96017 - DNA, 2312 bp, Artificial Sequence
  derived and/or modified sequence
atctaggaaaccatcagcaggccaggctggactgccccatttctagccccctttcttctctgcagactgccctgtttctagccccttttcttctctacccttttctgtagagtgcgttagacccattttacagaaggggactctgagaccctttcttctctgcggggcagggtatgtggttcagacgagccgcttccatccccagttctgtccctaagccctgggtgacctcagcattgagcatcgtctctgagcctcagtttcctgtctatatctagtgccaccaggcatcagaaacggagtctcttgctctggttcttgctgttcctgctcctgctcccgccgctccccgtcctgctcgcggacccaggggcgcccacgccaggggcctctttgggaggaagccgcaggcaccaagggaaatgagttccctttctccagcctctaaccgtctgggaacccatcctgattcccattgccagtggagaaggtctcccctggtgaagacttcgggagaacatgggagatggaaatacatttaggagccgggatgcttcatctggggtttaagagatccccattgagcaaatgaggaaaccgaggctcatgaatccctgttgttactatccatgccagcaccagggcatctgtgtccgcttcggccttgaccgctaccagtgtgactgcacccgcacgggctattccggccccaactgcaccatccctggcctgtggacctggctccggaattcactgcggcccagcccctctttcacccacttcctgctcactcacgggcgctggttctgggagtttgtcaatgccaccttcatccgagagatgctcatgcgcctggtactcacagtgcgctccaaccttatccccagtccccccacctacaactcagcacatgactacatcagctgggagtctttctccaacgtgagctattacactcgtattctgccctctgtgcctaaagattgccccacacccatgggaaccaaagggaagaagcagttgccagatgcccagctcctggcccgccgcttcctgctcaggaggaagttcatacctgacccccaaggcaccaacctcatgtttgccttctttgcacaacacttcacccaccagttcttcaaaacttctggcaagatgggtcctggcttcaccaaggccttgggccatggggtagacctcggccacatttatggagacaatctggagcgtcagtatcaactgcggctctttaaggatgggaaactcaagtaccaggtgctggatggagaaatgtacccgccctcggtagaagaggcgcctgtgttgatgcactacccccgaggcatcccgccccagagccagatggctgtgggccaggaggtgtttgggctgcttcctgggctcatgctgtatgccacgctctggctacgtgagcacaaccgtgtgtgtgacctgctgaaggctgagcaccccacctggggcgatgagcagcttttccagacgacccgcctcatcctcataggggagaccatcaagattgtcatcgaggagtacgtgcagcagctgagtggctatttcctgcagctgaaatttgacccagagctgctgttcggtgtccagttccaataccgcaaccgcattgccatggagttcaaccatctctaccactggcaccccctcatgcctgactccttcaagatcggtgggggcaggaacatggaccaccacatcctgcatgtggctgtggatgtcatcagggagtctcgggagatgcggctgcagcccttcaatgagtaccgcaagaggtttggcatgaaaccctacacctccttccaggagctcgtaggagagaaggagatggcagcagagttggaggaattgtatggagacattgatgcgttggagttctaccctggactgcttcttgaaaagtgccatccaaactctatctttggggagagtatgatagagattggggctcccttttccctcaagggtctcctagggaatcccatctgttctccggagtactggaagccgagcacatttggcggcgaggtgggctttaacattgtcaagacggccacactgaagaagctggtctgcctcaacaccaagacctgtccctacgtttccttccgtgtgccggatgccagtcaggatgatgggcctgctgtggagcgaccatccacagagctctgaggggcaggaaagcagcattctggaggggagagctttgtgcttgtcattccagagtgctgaggccagggctgatggtcttaaatgctcattttctggtttggcatggtgag

SEQ ID NO: 96018 - protein, 217 aa, Artificial Sequence
  derived and/or modified sequence
VTQGPQGLRASGRSCVGPFLSHLGRDRTPGVLTELRCVVPARLTALERSRKPRGRGRGRYITLLPVPEADPILERVPQPEFCSCVNSISTLEPVSRCQRLSELYLRRNRIPSLAELFYLKGLPRLRVLWLAENPCCGTSPHRYRMTVLRTLPRLQKLDNQAVTEEELSRALSEGEEITAAPEREGTGHGGPKLCCTLSSLSSAAETGRDPLDSEEEA

SEQ ID NO: 96019 - DNA, 654 bp, Artificial Sequence
  derived and/or modified sequence
gtcactcaggggccccagggcctgagggcgtcagggagatcttgtgtcggcccctttctatcccaccttggaagggatcgaacccctggggtcctgactgagctccggtgcgtggtgcccgctagactcacagcgctggagcggagtagaaaacctcgagggcgcggacggggccggtatattaccctattacccgtgcccgaggcagacccaattttagaacgggttccacagcctgaattttgctcctgcgtgaactccatctctacactcgagcctgtatcacggtgtcaacgtctttctgaactctacctgaggagaaatagaatcccatctctggccgagttgttctatcttaagggactgccccggctgcgggtgttgtggctggctgaaaacccttgctgtgggacaagtccacataggtacaggatgacagtccttcggacgttgcctagactgcagaaactcgataaccaggctgtaaccgaggaagaactttcaagagcactcagtgagggcgaagaaattaccgcggcacctgagagggaggggactggccacgggggtccgaaactttgttgcactctttcctcactgtcctctgctgccgagactggccgagatccactagatagcgaagaagaagcatag

SEQ ID NO: 96020 - DNA, 654 bp, Artificial Sequence
  derived and/or modified sequence
gtcacccagggcccccagggcctgcgggccagcggccgcagctgtgtgggccccttcctgagccacctgggccgggacaggaccccaggagtgctgacagagctgcgctgtgtggtgcctgcccggctgacagccctggagaggagcaggaagccccggggccggggccggggccgctacatcaccctgctgcctgtgcctgaggccgaccccatcctggagcgggtgccccagcctgagttctgcagctgtgtgaacagcatcagcaccctggagcctgtgagccgctgccagaggctgtctgagctgtacctgcggaggaaccgcatccccagcctggccgagctgttctacctgaagggcctgccccggctgcgggtgctgtggctggccgagaacccctgctgcggcaccagcccccaccgctacaggatgacagtgctgcggaccctgccccggctgcagaagctggacaaccaggccgtgacagaggaggagctgagccgggccctgtctgagggggaggagatcacagctgcccctgagcgggagggcaccggccacggcggccccaagctgtgctgcaccctgagcagcctgagcagcgctgctgagaccggccgggaccccctggacagcgaggaggaggcctag

SEQ ID NO: 96021 - DNA, 654 bp, Artificial Sequence
  derived and/or modified sequence
gtgacccagggcccccagggcctgcgggccagcggccggagctgcgtcggaccatttttgtctcacctcgggagggatcgcacccctggcgtgctgaccgaattaaggtgcgtggtgcctgccaggctaaccgccctggagagatcaagaaagcctcgggggagagggagagggcggtatatcaccttgttacccgtacctgaggccgatcccattctggagcgtgtgccacagcctgaattctgctcttgtgtgaattccatatccactcttgaaccagttagccgctgccaaaggcttagtgagctctacttgaggcggaatcggatcccttccctcgccgagctgttctacttaaaaggtttgccgcgtctgcgtgtgctgtggctggcagaaaatccatgttgtgggaccagccctcataggtatcggatgaccgtcctgaggacacttccgcgccttcaaaagctggacaatcaggccgtaacagaggaggagctgtcaagagcactgagtgagggggaggagatcacagctgccccagaacgcgaaggcaccgggcacggagggcccaagctctgttgcacactatcaagtctgtcgtccgccgcagagaccggacgggaccctctggactccgaagaggaggcctag

SEQ ID NO: 96022 - DNA, 654 bp, Artificial Sequence
  derived and/or modified sequence
gtgacacaggggcctcaggggttacgggcaagtggcaggagctgcgttgggcctttcctgagccacctaggacgcgatcggacaccaggtgtgctcacagagttgagatgcgtggtccccgcacggcttacagcgcttgagcggtcgagaaagcccagaggcagggggcgtggcaggtacattactctccttccagtgccggaagccgaccctatcctggagagagtccctcagcccgagttttgctcctgtgtaaattccatcagcaccctcgaacccgtgagcaggtgtcaaaggctgtctgagctgtaccttcgcagaaatagaatcccttcattggcagagctgttctatctgaaggggctaccacgtttgagggtgctatggcttgccgaaaacccatgctgtggcactagcccccataggtaccggatgaccgtgctccgtacgctccctagattacagaaactggataatcaggccgtgaccgaggaggaactctcccgtgccctgagtgagggggaagagattactgccgctccagagcgtgagggaactggtcatgggggaccaaaactctgttgtacactgtcctccctttcctcggcagctgagacagggcgtgacccactggatagtgaagaggaggcatag

SEQ ID NO: 96023 - DNA, 654 bp, Artificial Sequence
  derived and/or modified sequence
gtgacccagggcccccagggcctgagagccagcggcagaagctgcgtgggccccttcctgagccacctgggcagagacagaacccccggcgtgctgaccgagctgagatgcgtggtgcccgccagactgaccgccctggagagaagcagaaagcccagaggcagaggcagaggcagatacatcaccctgctgcccgtgcccgaggccgaccccatcctggagagagtgccccagcccgagttctgcagctgcgtgaacagcatcagcaccctggagcccgtgagcagatgccagagactgagcgagctgtacctgagaagaaacagaatccccagcctggccgagctgttctacctgaagggcctgcccagactgagagtgctgtggctggccgagaacccctgctgcggcaccagcccccacagatacagaatgaccgtgctgagaaccctgcccagactgcagaagctggacaaccaggccgtgaccgaggaggagctgagcagagccctgagcgagggcgaggagatcaccgccgcccccgagagagagggcaccggccacggcggccccaagctgtgctgcaccctgagcagcctgagcagcgccgccgagaccggcagagaccccctggacagcgaggaggaggcctag

SEQ ID NO: 96024 - protein, 375 aa, Artificial Sequence
  derived and/or modified sequence
MKLTRKMVLTRAKASELHSVRKLNCWGSRLTDISICQEMPSLEVITLSVNSISTLEPVSRCQRLSELYLRRNRIPSLAELFYLKGLPRLRVLWLAENPCCGTSPHRYRMTVLRTLPRLQKLDNQAVTEEELSRALSEGEEITAAPEREGTGHGGPKLCCTLSSLSSAAETGRDPLDSEEEATGAQDERGLKPPSRGQFPSLSARDASSSHRGRVSGGPLGAAAASAHCTHCTETVGREHGASQGPVGREHGASQGLEELCPRGSCVCGSVNAHTRVTRAPHGAVLAPQPLLLSWSVECGPGPCWAEGNRSHVEEVPHTRPQAGLLCSDSPSVPNVLTAILLLLRELDAEGLEAVQQTVGSRLQALRGEEVQEHAE

SEQ ID NO: 96025 - DNA, 1128 bp, Artificial Sequence
  derived and/or modified sequence
atgaagctgacccgtaagatggtgctaacgcgcgctaaagccagcgagctacacagcgtaaggaaactcaattgctggggatctcggctcaccgacatctccatctgtcaggagatgccatccttagaagtgatcaccctgtcagtaaatagcatctccacccttgagccagtgagcagatgccagcgcctgtcggaactctacctgcggagaaatcgcatccccagcctggcggagctgttctacctaaagggactgccccggctgcgagtcctctggctggccgaaaatccctgttgcggaacatctcctcatcgttaccgcatgaccgtgctcaggactcttccccggctccaaaaactggataaccaagctgtcacagaggaagagctgtcccgcgccctgagcgagggtgaggagatcaccgctgcccccgagagggagggcaccggtcacggggggcccaaactgtgctgcactctctcatcactgagcagtgcggctgagacaggacgagatccccttgattcagaggaggaggctacaggagcccaagatgaaaggggactaaaaccaccatcccggggtcagttcccatccctgtctgcacgcgacgcgagtagctctcacagaggcagggtttctggcggcccactgggcgccgcagcggcctctgcccattgtacccattgcaccgagactgtggggagggaacacggcgcgtctcagggtcccgtcgggagagaacacggtgcctcacaaggcctcgaggagctctgtcccaggggttcctgtgtctgtggcagcgtgaatgcccacacccgcgtcacccgagcaccacatggagcggtccttgcacctcagccgcttttgctatcttggtcagtggagtgcggccctggcccctgttgggctgaaggcaatcggtctcatgtggaggaggtcccacacactaggccgcaggccggactcctgtgttccgacagcccatcagtgcctaacgttctgaccgcaatacttctgctgctgcgtgagctggatgcagaaggattggaggccgtgcaacagaccgttggtagtaggctgcaggctctccgcggagaggaagttcaggagcacgcagagtag

SEQ ID NO: 96026 - DNA, 1128 bp, Artificial Sequence
  derived and/or modified sequence
atgaagctgaccaggaagatggtgctgacccgggccaaggccagcgagctgcacagcgtgaggaagctgaactgctggggcagccggctgacagacatcagcatctgccaggagatgcccagcctggaggtgatcaccctgtctgtgaacagcatcagcaccctggagcctgtgagccgctgccagaggctgtctgagctgtacctgcggaggaaccgcatccccagcctggccgagctgttctacctgaagggcctgccccggctgcgggtgctgtggctggccgagaacccctgctgcggcaccagcccccaccgctacaggatgacagtgctgcggaccctgccccggctgcagaagctggacaaccaggccgtgacagaggaggagctgagccgggccctgtctgagggggaggagatcacagctgcccctgagcgggagggcaccggccacggcggccccaagctgtgctgcaccctgagcagcctgagcagcgctgctgagaccggccgggaccccctggacagcgaggaggaggccaccggggcccaggatgagcggggcctgaagccacccagccggggccagttccccagcctgagcgccagagatgccagcagcagccaccggggccgggtgtctgggggccccctgggcgctgctgctgccagcgcccactgcacccactgcacagagaccgtgggccgggagcacggggccagccagggccctgtgggccgggagcacggggccagccagggcctggaggagctgtgcccccggggcagctgtgtgtgtggctctgtgaatgcccacaccagggtgacccgggcccctcatggagctgtgctggccccccagcccctgctgctgtcctggagcgtggagtgtggccctggcccctgctgggccgagggcaacagaagccacgtggaggaggtgccccacacccggccccaggccggcctgctgtgcagcgacagccccagcgtgcccaacgtgctgacagccatcctgctgctgctgcgggagctggatgctgagggcctggaggccgtgcagcagacagtgggcagccggctgcaggccctgcggggggaggaggtgcaggagcacgccgagtag

SEQ ID NO: 96027 - DNA, 1128 bp, Artificial Sequence
  derived and/or modified sequence
atgaagctgacccggaagatggtgctgacccgggccaaggccagcgagctgcacagcgtgaggaagcttaactgctggggctcacggctcacagacatatcaatctgtcaagagatgccttcccttgaagttattaccctgtccgtgaacagtatatctacactggagcccgtgagtcgctgtcagaggttatccgagttgtatctccgcagaaaccggataccctccctcgcggagctgttttacctcaaggggttgccaagactgagagtgttatggttggccgaaaatccttgctgcggtacatcccctcatcggtaccgcatgacagtgcttcgcaccctgcctaggctgcagaagctcgataaccaagcagtcaccgaggaggagctcagccgcgctctgagcgagggagaggagataacggcagcccccgagagggaggggactggccatggcggacctaagctatgttgtacacttagctcccttagctcggccgcagagacaggacgggatcccttggatagtgaggaggaagccacaggggctcaggatgagcgaggattaaagcccccctccagagggcagttcccaagtctgtccgcccgtgatgcctcctctagccaccgaggacgggtatcaggtggcccactcggcgccgccgcagccagtgctcattgtacacactgtaccgagaccgtcggccgcgaacatggagcctctcagggtccagtcggacgggagcacggggcttcccaaggcctcgaggagttgtgcccgcggggatcctgcgtgtgcgggtcggtcaacgcccacaccagagtcacaagagcgccccatggtgctgtgttagccccccaacccttacttctttcgtggagcgtggaatgtggtccgggtccatgctgggctgaagggaaccgtagccatgtagaagaagttccccatacacgtccccaggctgggttgctatgcagcgactctccgagcgttcccaacgtcttaaccgccattctgctcctgctgcgtgaactcgatgctgagggcctagaagcagtccagcaaacagttgggagcaggttacaggccctgcggggcgaggaggtccaagagcacgcggaatag

SEQ ID NO: 96028 - DNA, 1128 bp, Artificial Sequence
  derived and/or modified sequence
atgaaactgacgagaaagatggtcctgaccagagcgaaagcttctgagctccacagtgtccgcaaactgaactgctgggggtctaggcttaccgatatatctatctgccaagaaatgcccagcctggaggtgatcaccttaagcgttaattcaataagtactcttgaaccagttagccgctgccagaggttgagcgagctgtacctgagaaggaatcgtattccctccctggctgagctgttttacctgaagggtctccccaggctgcgcgtgctgtggctggccgagaacccctgctgtggtactagtcctcacagataccgaatgaccgtgctgcgaaccctgccccgactgcagaaactcgataaccaggcagtgacagaggaggaactttcgagagccttgagcgaaggcgaggaaataactgcggctcctgagagggagggcactgggcacggcggtcctaagctgtgttgcactctctcatcgctcagttctgccgcagaaacagggagggaccccctcgattccgaagaggaagcgaccggggctcaggacgagcgtgggttaaaacctccttccagaggacagtttccttccctctccgcgcgtgacgcaagcagtagtcacaggggccgagtatccggtggccctctcggcgctgccgctgcctctgctcactgcacccactgcaccgagactgtaggcagagaacacggagcctctcaaggccctgtggggagggagcacggtgcctcgcaaggcttggaagaactgtgtccccgtggttcctgtgtgtgtggcagtgtgaacgctcatacaagggtgactcgagcgccacacggggcagtcctggcacctcagcccctcctgctgtcctggtctgtggagtgcgggccaggcccatgctgggctgagggcaatcgctcacacgtcgaagaggtgccccacacgcgtcctcaggcgggactgttatgtagtgactcccccagcgtgccgaacgtgctgaccgcaatcctccttttgctcagggagttggatgctgaaggactcgaggcggtccagcagaccgtcggtagtagactccaggcgctgaggggcgaagaggtccaggagcacgcagaatag

SEQ ID NO: 96029 - DNA, 1634 bp, Artificial Sequence
  derived and/or modified sequence
agcagagccaacgtgtcagcggcgcccaagcggccccagcgggctcgcgtcgccccgctctcctcaccgagccgccaatcggctcaggatccgcccctgacgacgcgggccccgcccctggagacacgcgccgcgcagtcgtcacccgcccgggatcaggaggccgggggcgcccgccggtcgggcctgggcggccgccatgaagctgacgcggaagatggttctgacccgggccaaggcctcggagctgcacagcgtgcgcaagctcaactgctggggcagccgcctcacagatatctccatttgccaggagatgcccagcctggaggtgatcacgctcagtgtcaacagcatctccaccctggagcctgtgagccggtgccagcgcctgagtgagctgtacctgcggaggaaccgcatccccagcctggctgagctcttctacctgaaggggctgccgcgtctgcgggtgctgtggctggccgagaacccgtgctgcggcaccagcccccaccgctaccgcatgaccgtgctgcgcaccctgccgcgcctacagaagctggacaaccaggctgtgacggaggaggagctgtcccgtgcactgagtgagggagaggagatcactgcggccccagagagagagggcacaggccacggcggccccaagctatgctgcacactgagctccctcagctccgctgctgagactggccgggacccgctggacagcgaggaggaggcaaccggcgcccaggatgaacgtggcctgaagccgccttcccggggccagtttccttccctctcagccagggatgcctcgagcagccacaggggcagggtgagtggcgggccgctaggggccgcggctgcctctgcccactgcacccactgcacagaaaccgtggggagggagcatggagcctcacagggccccgtggggagggagcatggagcctcacagggccttgaagagctgtgccccagggggagctgcgtgtgcgggtctgtgaatgcgcacacacgtgtaacacgtgccccgcacggagccgtcctggcccctcagcctctcctgctgtcctggtctgtggaatgtgggcccgggccctgctgggctgagggcaacaggagtcacgtggaagaggtgccacacacgcgtccacaggcggggctcctctgctcagattctccgagtgtgccgaacgtcctgactgccatcctgctgctgctgcgggagctggatgcagaggggctggaggccgtgcagcagactgtgggcagccggctgcaggccctgcgtggggaagaggtgcaggagcacgccgagtgaccgcaggacctgaacgccgctccagcctccacggggaccccagcgtcttccccagcccccgggagctggagggtggctgccatggccgcagccccggccccacacaaaagcctccccggtttgccacatcggccgagggcaggagtgggtgttaggtactggctaaccggggcggtggagatgcctgtctacaccagtcctgtccccaggactccccttctgtggtctggaggttctaggctggcctgggctcttaaagggaggattttgcaggctgtcctccctaataaaagattttcccaaggtt

SEQ ID NO: 96030 - DNA, 1128 bp, Artificial Sequence
  derived and/or modified sequence
atgaagctgaccagaaagatggtgctgaccagagccaaggccagcgagctgcacagcgtgagaaagctgaactgctggggcagcagactgaccgacatcagcatctgccaggagatgcccagcctggaggtgatcaccctgagcgtgaacagcatcagcaccctggagcccgtgagcagatgccagagactgagcgagctgtacctgagaagaaacagaatccccagcctggccgagctgttctacctgaagggcctgcccagactgagagtgctgtggctggccgagaacccctgctgcggcaccagcccccacagatacagaatgaccgtgctgagaaccctgcccagactgcagaagctggacaaccaggccgtgaccgaggaggagctgagcagagccctgagcgagggcgaggagatcaccgccgcccccgagagagagggcaccggccacggcggccccaagctgtgctgcaccctgagcagcctgagcagcgccgccgagaccggcagagaccccctggacagcgaggaggaggccaccggcgcccaggacgagagaggcctgaagccccccagcagaggccagttccccagcctgagcgccagagacgccagcagcagccacagaggcagagtgagcggcggccccctgggcgccgccgccgccagcgcccactgcacccactgcaccgagaccgtgggcagagagcacggcgccagccagggccccgtgggcagagagcacggcgccagccagggcctggaggagctgtgccccagaggcagctgcgtgtgcggcagcgtgaacgcccacaccagagtgaccagagccccccacggcgccgtgctggccccccagcccctgctgctgagctggagcgtggagtgcggccccggcccctgctgggccgagggcaacagaagccacgtggaggaggtgccccacaccagaccccaggccggcctgctgtgcagcgacagccccagcgtgcccaacgtgctgaccgccatcctgctgctgctgagagagctggacgccgagggcctggaggccgtgcagcagaccgtgggcagcagactgcaggccctgagaggcgaggaggtgcaggagcacgccgagtag

SEQ ID NO: 96031 - DNA, 465 bp, Artificial Sequence
  derived and/or modified sequence
atgcaccccgagcccctgctgaacagcacccagagcgccccccaccacttccccgacagcttccaggccacccccttctgcttcaaccagagcctgatccccggcagccccagcaacagcagcatcctgagcggcagcctggactacagctacagccccgtgcagctgcccagctacgcccccgagaactacaacagccccgccagcctggacaccagaacctgcggctacccccccgaggaccacagctaccagcacctgagcagccacgcccagtacagctgcttcagcagcgccaccaccagcatctgctactgcgccagctgcgaggccgaggacctggacgccctgcaggccgccgagtacttctaccccagcaccgactgcgtggacttcgcccccagcgccgccgccaccagcgacttctacaagagagagaccaactgcgacatctgctacagctag

SEQ ID NO: 96032 - DNA, 324 bp, Artificial Sequence
  derived and/or modified sequence
atgcaccccgagcccctgctgaacagcacccagagcgccccccaccacttccccgacagcttccaggccacccccttctgcttcaaccagagcctgatccccggcagccccagcaacagcagcatcctgagcggcagcctggactacagctacagccccgtgcagctgcccagctacgcccccgagaactacaacagccccgccagcctggacaccagaacctgcggctacccccccgaggaccacagctaccagcacctgagcagccacgcccagtacagctgcttcagcagcgccaccaccagcatctgctactgcgcctag

SEQ ID NO: 96033 - DNA, 465 bp, Artificial Sequence
  derived and/or modified sequence
atgcaccctgaacctctgctcaactccacgcagtcagcaccacatcacttcccggattcgttccaggctacacccttttgtttcaatcagtcacttatccccgggtcccccagtaattctagtattctctcaggttcgttagactattcttactcgcccgtccaactgccgtcttacgcccctgaaaactacaattcacctgccagtttggacaccagaacatgtggttacccaccggaggaccactcctatcagcacctgtctagccatgcccagtattcatgcttcagctctgcgaccacgagcatctgttattgtgctagctgtgaggccgaagatctggacgctctgcaggcggccgaatacttctatccatcgacagattgtgttgatttcgcgccctctgccgcagctactagtgatttttataaacgcgaaactaactgcgatatttgctactcctag

SEQ ID NO: 96034 - DNA, 465 bp, Artificial Sequence
  derived and/or modified sequence
atgcatccagagcctttgctcaacagcacgcaaagtgctcctcatcactttcccgattcatttcaggcaacacccttctgtttcaaccagtcacttattcccggatcgcctagtaacagtagtattctgtcaggctctttagattactcctatagccccgtgcagctcccctcatatgctcctgagaactacaacagtcccgcctcactggatacgcgaacctgcggttatccaccagaggaccactcttatcagcatctaagttcacacgcacagtattcttgtttttccagcgccacaacatcaatctgctattgtgcctcttgtgaggccgaggacctggatgctttacaggcagcagagtacttctatcccagcacagactgtgtcgactttgccccaagcgccgctgcaacttcagacttttataaacgcgagaccaattgtgacatctgctattcatag

SEQ ID NO: 96035 - DNA, 324 bp, Artificial Sequence
  derived and/or modified sequence
atgcacccagagcccctgttaaactctacccagagtgcacctcatcattttcctgactctttccaggcgacaccgttctgttttaaccaatctttgatacctggaagcccctctaacagctccatcctaagcgggtccctggactatagttattcaccagtgcaacttccatcatatgccccagagaactataattctcctgcctccctagatactagaacgtgtggatacccgcctgaagaccatagctatcaacaccttagcagccatgcgcagtatagctgcttcagctcagccacgacttccatttgttactgcgcgtag

SEQ ID NO: 96036 - DNA, 465 bp, Artificial Sequence
  derived and/or modified sequence
atgcaccctgagcccctgctgaacagcacccagagcgccccccaccacttcccagacagcttccaggccacccccttctgcttcaaccagagcctcatccctggcagccccagcaacagcagcatcctgagcggcagcctggactacagctacagccctgtgcagctgcccagctatgcccctgagaactacaacagccctgccagcctggacaccaggacctgtggctacccacctgaggaccacagctaccagcacctgagcagccacgcccagtacagctgcttcagcagcgccaccaccagcatctgctactgtgccagctgtgaggccgaggacctggatgccctgcaggccgctgagtacttctaccccagcacagactgtgtggactttgcccccagcgctgctgccaccagtgacttctacaagcgggagaccaactgtgacatctgctacagctag

SEQ ID NO: 96037 - DNA, 324 bp, Artificial Sequence
  derived and/or modified sequence
atgcaccctgagcccctgctgaacagcacccagagcgccccccaccacttcccagacagcttccaggccacccccttctgcttcaaccagagcctcatccctggcagccccagcaacagcagcatcctgagcggcagcctggactacagctacagccctgtgcagctgcccagctatgcccctgagaactacaacagccctgccagcctggacaccaggacctgtggctacccacctgaggaccacagctaccagcacctgagcagccacgcccagtacagctgcttcagcagcgccaccaccagcatctgctactgtgcctag

SEQ ID NO: 96038 - DNA, 465 bp, Artificial Sequence
  derived and/or modified sequence
atgcaccccgagcccctgctgaacagcacccagagcgccccccaccattttcctgattcctttcaggccacacccttttgttttaatcagtctctcatcccagggtcaccgtccaactcgagcatcctgagcggaagtctggattatagttacagccctgtccaactgccaagctacgcccccgagaattacaactcaccggcctccttggatactcggacgtgtggctatccgcctgaggaccatagctatcagcacctgtcctcccatgcccaatatagctgcttcagctccgccaccacaagtatttgttactgtgcttcctgtgaggcagaagatttagacgctctccaggccgcagagtatttttacccatctactgactgtgtcgactttgccccttccgctgccgccaccagcgacttttacaagcgcgaaaccaactgtgatatttgttattcatag

SEQ ID NO: 96039 - DNA, 465 bp, Artificial Sequence
  derived and/or modified sequence
atgcaccccgagcccctgctgaacagcacccagagcgccccccaccactttcccgattcatttcaggcaactcccttttgctttaaccaatcactgatacccgggtccccatcgaattccagcatcctctcagggtcgcttgattacagctacagcccggtgcagcttccatcatatgcacccgagaactataatagtccggcgagcctggacacacggacttgcggctacccacctgaagaccacagttatcagcatctttcgtcccacgcacaatatagttgtttcagcagcgctaccacctccatctgttattgtgccagctgtgaggcagaggacctcgacgccctgcaagccgcggaatacttttatcccagtaccgactgtgtcgacttcgcaccatctgcagcagctacgagcgacttttataagagagaaacgaactgtgatatttgctactcatag

SEQ ID NO: 96040 - DNA, 324 bp, Artificial Sequence
  derived and/or modified sequence
atgcaccccgagcccctgctgaacagcacccagagcgccccccaccatttccctgattcttttcaggccactccattttgttttaaccagagtctgattcctggttcgcccagcaattctagtattcttagcggctccctagattattcatacagtcctgtgcagctgccaagttacgcccccgagaattataattccccagcaagcttggacacacggacttgcggatacccccccgaggaccatagctatcagcacctttcgagccacgcacaatattcatgcttcagttccgctaccacttccatttgttactgcgcttag

SEQ ID NO: 96041 - DNA, 465 bp, Artificial Sequence
  derived and/or modified sequence
atgcacccagagcctctcttgaacagtactcaatccgcaccccaccactttcccgatagtttccaggcgactcctttctgcttcaatcagagtctgatccccggaagcccttctaatagtagtattctgagcggatctctggactactcttactcccccgtgcagctgcctagttacgctccagagaattataattcccctgctagcctggatacacggacatgcggctaccctcctgaagaccatagctatcagcacctttcttcccatgcacagtactcctgcttcagctccgcaactacctccatctgctactgtgcttcctgtgaagctgaagacctcgatgctctgcaagctgccgagtacttttaccccagtactgactgcgtggactttgctccgagtgcagccgctacctctgatttctataagcgggagaccaactgcgacatctgttacagttag

SEQ ID NO: 96042 - DNA, 465 bp, Artificial Sequence
  derived and/or modified sequence
atgcatccagaaccacttctgaattcgacacagtctgcacctcaccactttcccgattcgtttcaggctacccctttttgttttaatcagtccttaatccccggatcccccagtaacagttctattctctctgggtctctggactatagttatagtccggtgcagttgcccagttacgcccctgagaactataactccccagcctcactggacacccggacctgtgggtatcctccagaagaccactcatatcagcacttgagctcgcatgcccaatatagttgcttcagctcggcaaccacaagcatctgctattgcgctagctgtgaagcagaggatctcgacgccctgcaggcggcagagtatttttatccaagcaccgactgtgttgactttgctccaagcgccgctgctacttctgatttttataaaagggaaacgaactgtgacatctgctacagttag

SEQ ID NO: 96043 - DNA, 324 bp, Artificial Sequence
  derived and/or modified sequence
atgcatccggagccacttctaaactctacacagtcagccccacaccacttccccgacagtttccaggcaaccccgttctgcttcaaccagtcactgatccccggaagcccttctaactcctctatcctctcaggcagcttagattatagttattctcctgtacagctgccaagttacgccccagaaaattacaatagtccagcaagtttagatactaggacttgcggctatccgccagaggatcacagctaccaacacctatccagccatgcccagtactcatgcttctccagcgctacaacctctatttgttactgtgcttag

SEQ ID NO: 96044 - DNA, 1332 bp, Artificial Sequence
  derived and/or modified sequence
agaggggaagaaggggagagtaggagcgggggcgaaggagggaggagggcaagatggagcgcggaaaaggcggagaaaagggacgagggagagcgggcagaaggcaaagacagaagggagcgagggagggagttcctcgggcctggcccctttactaggtcagtctggcaggtacctcgccggcccaggacggggctggccaaacctcaccgcttgctcccgggctggcttccagaccaagggcacgcagaggtcggagcctgcccagaagccacacctggccagaaaaaccgaaggtgtatcaaggtgtccgagtgaagatcacagtgaaggagctgctgcagcaaagacgggcacaccaggcggcctccgggggaacccggtccggaggcagcagtgtccacctttcagacccagttgcaccatcttctgcaggactgtattttgagcctgaaccaatttcttccacgcccaattatttgcaacggggagaattttccagttgtgtttcatgtgaagaaaactcaagctgcctcgaccagatctttgattcctaccttcagacagagatgcacccggagcctttgctcaattccacacaaagtgctccacaccatttcccagacagcttccaggccacccctttctgctttaaccagagcctgatcccaggatcaccttcaaattcctccattctctctggctccttagactacagttactcgccagtgcagctgccttcatatgctccagagaattacaattcccctgcttctctggacaccagaacctgtggctaccccccagaagaccattcctaccaacacttgtcctcacacgcccagtacagctgcttctcctcggccaccacctccatctgctactgcgcatcgtgtgaggcagaggacttggatgctctccaggcagcagagtacttctacccgagcacagactgtgtggactttgccccctcagcagccgccaccagtgatttctataagagggaaacaaactgtgacatctgctatagttaatagaaattacagtaattcagaacatggcatgggtatatctatttttctaccacgtctagatgacactgcaaaatatgcaacttggtaacacaatatcccaagcacagtttacatgtcactatttccaattttctgatgctaagcattcatatgaagtcctcagacccggtcacagcgccactcctactttgtatgctcatagtttaaatttttgtaggaaactttcaattgttttactttttgtataacgaacaaatgctgtctccttttttactaataaataattttgtattactaa

SEQ ID NO: 96045 - DNA, 1998 bp, Artificial Sequence
  derived and/or modified sequence
atgggcgacatcctggcccacgagagcgagctgctgggcctggtgaaggagtacctggacttcgccgagttcgaggacaccctgaagaccttcagcaaggagtgcaagatcaagggcaagcccctgtgcaagaccgtgggcggcagcttcagagacagcaagagcctgaccatccagaaggacctggtggccgccttcgacaacggcgaccagaaggtgttcttcgacctgtgggaggagcacatcagcagcagcatcagagacggcgacagcttcgcccagaagctggagttctacctgcacatccacttcgccatctacctgctgaagtacagcgtgggcagacccgacaaggaggagctggacgagaagatcagctacttcaagacctacctggagaccaagggcgccgccctgagccagaccaccgagttcctgcccttctacgccctgcccttcgtgcccaaccccatggtgcaccccagcttcaaggagctgttccaggacagctggacccccgagctgaagctgaagctgatcaagttcctggccctgatcagcaaggccagcaacacccccaagctgctgaccatctacaaggagaacggccagagcaacaaggagatcctgcagcagctgcaccagcagctggtggaggccgagagaagaagcgtgacctacctgaagagatacaacaagatccaggccgactaccacaacctgatcggcgtgaccgccgagctggtggacagcctggaggccaccgtgagcggcaagatgatcacccccgagtacctgcagagcgtgtgcgtgagactgttcagcaaccagatgagacagagcctggcccacagcgtggacttcaccagacccggcaccgccagcaccatgctgagagccagcctggcccccgtgaagctgaaggacgtgcccctgctgcccagcctggactacgagaagctgaagaaggacctgatcctgggcagcgacagactgaaggccttcctgctgcaggccctgagatggagactgaccaccagccaccccggcgagcagagagagaccgtgctgcaggcctacatcagcaacgacctgctggactgctacagccacaaccagagaagcgtgctgcagctgctgcacagcaccagcgacgtggtgagacagtacatggccagactgatcaacgccttcgccagcctggccgagggcagactgtacctggcccagaacaccaaggtgctgcagatgctggagggcagactgaaggaggaggacaaggacatcatcaccagagagaacgtgctgggcgccctgcagaagttcagcctgagaagacccctgcagaccgccatgatccaggacggcctgatcttctggctggtggacgtgctgaaggaccccgactgcctgagcgactacaccctggagtacagcgtggccctgctgatgaacctgtgcctgagaagcaccggcaagaacatgtgcgccaaggtggccggcctggtgctgaaggtgctgagcgacctgctgggccacgagaaccacgagatccagccctacgtgaacggcgccctgtacagcatcctgagcgtgcccagcatcagagaggaggccagagccatgggcatggaggacatcctgagatgcttcatcaaggagggcaacgccgagatgatcagacagatcgagttcatcatcaagcagctgaacagcgaggagctgcccgacggcgtgctggagagcgacgacgacgaggacgaggacgacgaggaggaccacgacatcatggaggccgacctggacaaggacgagctgatccagccccagctgggcgagctgagcggcgagaagctgctgaccaccgagtacctgggcatcatgaccaacaccggcaagaccagaagaaagggcctggccaacgtgcagtggagcggcgacgagcccctgcagagacccgtgacccccggcggccacagaaacggctaccccgtgtag

SEQ ID NO: 96046 - DNA, 2451 bp, Artificial Sequence
  derived and/or modified sequence
atgggcgacatcctggcccacgagagcgagctgctgggcctggtgaaggagtacctggacttcgccgagttcgaggacaccctgaagaccttcagcaaggagtgcaagatcaagggcaagcccctgtgcaagaccgtgggcggcagcttcagagacagcaagagcctgaccatccagaaggacctggtggccgccttcgacaacggcgaccagaaggtgttcttcgacctgtgggaggagcacatcagcagcagcatcagagacggcgacagcttcgcccagaagctggagttctacctgcacatccacttcgccatctacctgctgaagtacagcgtgggcagacccgacaaggaggagctggacgagaagatcagctacttcaagacctacctggagaccaagggcgccgccctgagccagaccaccgagttcctgcccttctacgccctgcccttcgtgcccaaccccatggtgcaccccagcttcaaggagctgttccaggacagctggacccccgagctgaagctgaagctgatcaagttcctggccctgatcagcaaggccagcaacacccccaagctgctgaccatctacaaggagaacggccagagcaacaaggagatcctgcagcagctgcaccagcagctggtggaggccgagagaagaagcgtgacctacctgaagagatacaacaagatccaggccgactaccacaacctgatcggcgtgaccgccgagctggtggacagcctggaggccaccgtgagcggcaagatgatcacccccgagtacctgcagagcgtgtgcgtgagactgttcagcaaccagatgagacagagcctggcccacagcgtggacttcaccagacccggcaccgccagcaccatgctgagagccagcctggcccccgtgaagctgaaggacgtgcccctgctgcccagcctggactacgagaagctgaagaaggacctgatcctgggcagcgacagactgaaggccttcctgctgcaggccctgagatggagactgaccaccagccaccccggcgagcagagagagaccgtgctgcaggcctacatcagcaacgacctgctggactgctacagccacaaccagagaagcgtgctgcagctgctgcacagcaccagcgacgtggtgagacagtacatggccagactgatcaacgccttcgccagcctggccgagggcagactgtacctggcccagaacaccaaggtgctgcagatgctggagggcagactgaaggaggaggacaaggacatcatcaccagagagaacgtgctgggcgccctgcagaagttcagcctgagaagacccctgcagaccgccatgatccaggacggcctgatcttctggctggtggacgtgctgaaggaccccgactgcctgagcgactacaccctggagtacagcgtggccctgctgatgaacctgtgcctgagaagcaccggcaagaacatgtgcgccaaggtggccggcctggtgctgaaggtgctgagcgacctgctgggccacgagaaccacgagatccagccctacgtgaacggcgccctgtacagcatcctgagcgtgcccagcatcagagaggaggccagagccatgggcatggaggacatcctgagatgcttcatcaaggagggcaacgccgagatgatcagacagatcgagttcatcatcaagcagctgaacagcgaggagctgcccgacggcgtgctggagagcgacgacgacgaggacgaggacgacgaggaggaccacgacatcatggaggccgacctggacaaggacgagctgatccagccccagctgggcgagctgagcggcgagaagctgctgaccaccgagtacctgggcatcatgaccaacaccggcaagaccagaagaaagggcctggccaacgtgcagtggagcggcgacgagcccctgcagagacccgtgacccccggcggccacagaaacggctaccccgtggtggaggaccagcacacccccccccagaccgcccagcacgccagaaacggccacccccaggccctgcccgccgcccacgaggccgtgtacagagagggcaagcccagcacccccgagagctgcgtgagcagcagcagcgccatcatcgccaagcccggcgagtggctgcccagaggcagacaggaggagcccagacccgcccccacccccagacagcccagagaggccccccaggaccccggcaacggcgtgaccaccagagagtgcgccagcgccttcacctgcaagcccagagccccctgcacccccgagatgctggactggaacccccccaaggccaaggccagcgtgctggcccccctgttcagcagctgcggcccccagcaggccagcagacccggcagcaccgccagcagcaccagaggcctgcccagcaaggagacccaccccaagtag

SEQ ID NO: 96047 - DNA, 1998 bp, Artificial Sequence
  derived and/or modified sequence
atgggagacatacttgctcacgaaagcgagcttctcggattagtcaaggaatatctagacttcgccgagtttgaagacacgttgaagactttttcaaaagaatgcaagatcaaggggaagcccctgtgtaagaccgtcggcggctccttcagagatagcaagtccctcaccatccagaaagaccttgttgcagccttcgacaatggagaccagaaggtattctttgacctatgggaggaacacatttcaagcagtattcgggatggcgattcttttgcacagaaactcgagttctacctgcacattcattttgctatctaccttcttaagtacagcgttggtcgacccgataaagaagagctagatgagaagatttcctattttaagacatacctggagactaaaggggctgccctgtctcagaccactgaatttctacccttttacgcccttcctttcgtccctaaccctatggtccacccctcttttaaggagctgtttcaagactcttggactccagagttgaaactcaagctgattaagttcttggccctgatctcaaaagccagcaatactcctaaactgctgacgatctacaaggagaatggtcagagtaataaagaaatattgcagcaattgcatcagcagctggtggaagccgaacgccgatccgtaacgtatcttaagaggtacaacaagatccaggccgattaccataatttgattggagtcacggccgaacttgtcgactcactagaggctaccgtcagtggtaagatgatcacccctgaatacctccagtcggtttgtgttcgcctgttctcaaaccagatgcggcagagcttggcgcatagcgtggactttacgaggcctgggactgcatcaacaatgctccgcgcaagtttagcaccagtcaagttaaaggatgtccctctgctgccgtcgctagattatgagaagcttaagaaggatctcatcctcgggagtgacagactcaaagcctttctccttcaggctctccgttggcgactgacaacgtctcaccccggcgagcagcgcgagaccgtccttcaagcgtatatttcaaacgatctgctcgactgttattcacataaccagagatccgtgctgcagcttctccatagcacttccgatgtggtccgccaatacatggcaagactgatcaatgcctttgctagcttggccgaaggtagactttatctcgcacagaatacaaaagtgctccagatgctcgaaggtagacttaaggaagaggacaaggacataattacgagagaaaacgtgctgggagccctccagaaattctctctcaggagacctctccagaccgctatgattcaggacggactcatcttttggttggttgatgtcctgaaggacccagactgtttgtctgattataccctcgaatacagcgttgctctgttaatgaacctctgtttgaggtccacaggaaagaacatgtgtgctaaagtggcaggattagttcttaaggtcctgagcgatttgctggggcatgaaaaccacgaaattcagccgtatgtgaacggagcactgtactcaatcttgtctgtgccatcaatacgcgaagaggcgagggcgatgggaatggaggatatcttgcggtgcttcataaaagaaggcaatgcggagatgatccgccagattgagttcattatcaagcagcttaattctgaagagctgcctgatggggtcttggagtccgacgatgacgaagacgaggatgatgaagaggatcatgatatcatggaggccgacttggacaaggatgagctgattcaaccacagctgggagagctgtctggcgagaagttattgaccaccgagtatctgggaattatgaccaacacaggaaaaactaggcgaaaaggtctggcaaacgtccagtggtctggcgatgaaccgcttcagaggccagtgacaccaggaggacacaggaacggctatcccgtttag

SEQ ID NO: 96048 - DNA, 2451 bp, Artificial Sequence
  derived and/or modified sequence
atgggtgatatactcgcccatgaatcagaactcctcgggctagtcaaggagtatctggatttcgccgaatttgaagataccctgaagacgttcagcaaagagtgcaagattaagggaaaacctctgtgcaagacggtgggtgggagcttccgcgactcgaaatccttgacaatccaaaaagacctggtcgccgctttcgacaacggcgatcagaaggttttcttcgatctctgggaagagcatatttcatcttcaattagggacggagatagctttgctcagaaattggagttctaccttcacatccatttcgctatctacctgttgaagtacagcgtgggcagacctgacaaagaagagcttgacgagaagatatcttattttaaaacctacctcgaaacaaaaggggctgctcttagtcaaaccaccgaatttcttccattctacgctctgcccttcgttcccaaccctatggttcatcctagtttcaaagagctctttcaggattcttggaccccagaattgaagttgaaattgatcaagttccttgccttaatttccaaagcgtccaatacccctaagttgttgacgatctataaagagaacggccagagcaacaaggagattttacagcaactgcatcagcagctcgtggaagcagaacgccggagtgtcacgtatctgaagcgctacaataaaattcaggccgattatcacaatctgattggtgttacagccgagctagttgactctttggaagccacggtcagcggcaaaatgatcacgcccgaatacctccaatcagtgtgcgtgcggctgttctcaaatcagatgcgtcaatccctcgcccactctgtggattttactcggcccggcaccgctagcacgatgcttcgcgcgtcgctggcaccagtgaaactgaaggacgttcctctgctaccttcgctcgactatgaaaagctgaaaaaggacctgattctgggaagcgatagactcaaagccttcctcctccaggctctccgctggaggctcaccaccagtcacccaggagaacagagagaaaccgtgctgcaggcttacatctccaatgatcttctggattgctacagccataaccaaaggagcgtgctccagttacttcattctacctcagatgtggttcgtcaatacatggcccgcctgattaatgcgttcgcttctcttgctgagggtagactgtacttagcacagaatacaaaagtactgcagatgttggagggccggctcaaagaggaagacaaggacatcatcacccgggaaaacgtgctgggagcactccagaagttcagcttgcgtcgccccctgcagacagcaatgattcaggatgggctaatcttttggttggtcgacgtgctcaaagaccccgattgcctgagtgactatactctcgaatattccgttgcgctacttatgaacttatgtttgagatcgacaggcaagaatatgtgtgccaaggttgccggcctggtcctgaaggtgctcagtgatttgctcgggcacgaaaatcacgaaattcagccctacgtgaacggagcactgtacagtattcttagtgtgccttccattcgtgaagaagcccgggcgatgggtatggaagatatcctgcggtgttttatcaaagaaggtaacgcagagatgattcgccaaattgaattcatcatcaaacaactgaattcagaggaactacccgacggcgtgctcgaaagtgatgacgacgaggacgaggacgatgaagaggaccatgacataatggaagcagacttggataaggatgagctcatacaacctcagcttggcgagctgtctggtgagaagttacttactactgagtacctcggaattatgaccaatacaggcaagacaaggcgaaagggcctcgcaaatgtgcagtggagcggagatgagcctctgcagaggccggtgacaccaggaggccatcgcaatggataccccgtggtggaggaccagcacacaccacctcaaaccgcccaacacgcgagaaatgggcacccacaagccttgccagcagctcacgaagccgtgtatcgagagggcaaaccttctacccctgagtcctgcgtctcttcttccagcgcgattattgctaaacccggcgagtggcttccacgcggccgccaggaggaaccacgccctgcacccactcctagacagcctagagaagccccccaagaccctggcaacggggtgaccactagagagtgtgcatccgcctttacttgtaagcctcgcgccccctgcactcctgaaatgttggattggaatcctcctaaggcgaaggcctccgtgttggcaccactgttctccagctgcggaccccagcaggctagccgcccagggtccactgcttcttctacccgaggactcccttccaaggagacgcaccctaagtag

SEQ ID NO: 96049 - DNA, 1998 bp, Artificial Sequence
  derived and/or modified sequence
atgggagacatcctggcccatgaaagtgagctgctgggcctggtgaaggagtacctggactttgctgagtttgaggacaccctgaagaccttcagcaaggagtgcaagatcaagggcaagcccctgtgcaagacagtgggcggcagcttccgggacagcaagagcctgaccatccagaaggacctggtggccgcctttgacaacggggaccagaaggtgttctttgacctgtgggaggagcacatcagcagcagcatcagagatggagacagctttgcccagaagctggagttctacctgcacatccactttgccatctacctgctgaagtacagcgtgggccgcccagacaaggaggagctggatgagaagatctcctacttcaagacctacctggagaccaagggagctgccctgagccagaccacagagttcctgcccttctacgccctgccctttgtgcccaaccccatggtgcaccccagcttcaaggagctgttccaggacagctggaccccagagctgaagctgaagctgatcaagttcctggccctgatcagcaaggccagcaacacccccaagctgctgaccatctacaaggaaaatggccagagcaacaaggagatcctgcagcagctgcaccagcagctggtggaggccgagcggcgctctgtgacctacctgaagcgctacaacaagatccaggccgactaccacaacctgattggagtgacagctgagctggtggacagcctggaggccaccgtgtctgggaagatgatcaccccagagtacctgcagagcgtgtgtgtgcggctcttcagcaaccagatgaggcagagcctggcccacagcgtggacttcaccaggcctggaacagccagcaccatgctgcgggccagcctggcccctgtgaagctgaaggatgtgcccctgctgcccagcctggactatgagaagctgaagaaggacctgatcctgggcagtgaccggctgaaggccttcctgctgcaggccctgcgctggaggctgaccaccagccaccctggagagcagcgggagaccgtgctgcaggcctacatcagcaatgacctgctggactgctacagccacaaccagaggtctgtgctgcagctgctgcacagcaccagtgatgtggtgcggcagtacatggcccggctcatcaatgcctttgccagcctggccgagggccgcctgtacctggcccagaacaccaaggtgctgcagatgctggagggccgcctgaaggaggaggacaaggacatcatcaccagagaaaatgtgctgggcgccctgcagaagttcagcctgcggcggcccctgcagacagccatgatccaggacggcctcatcttctggctggtggatgtgctgaaggaccctgactgcctgagtgactacaccctggagtacagcgtggccctgctgatgaacctgtgcctgcggagcacaggcaagaacatgtgtgccaaggtggccggcctggtgctgaaggtgctgagtgacctgctgggccacgagaaccacgagatccagccctacgtgaatggagccctgtacagcatcctgtctgtgcccagcatccgggaggaggcccgggccatgggcatggaggacatcctgcgctgcttcatcaaggagggcaatgctgagatgatccggcagatcgagttcatcatcaagcagctgaacagcgaggagctgcctgatggagtgctggagagtgatgatgatgaagatgaagatgatgaggaggaccatgacatcatggaggccgacctggacaaggatgagctgatccagccccagctgggggagctgtctggagagaagctgctgaccacagagtacctgggcatcatgaccaacacaggcaagaccaggaggaagggcctggccaacgtgcagtggagcggagatgagcccctgcagaggcctgtgacccctgggggccacagaaatggctaccctgtgtag

SEQ ID NO: 96050 - DNA, 2451 bp, Artificial Sequence
  derived and/or modified sequence
atgggagacatcctggcccatgaaagtgagctgctgggcctggtgaaggagtacctggactttgctgagtttgaggacaccctgaagaccttcagcaaggagtgcaagatcaagggcaagcccctgtgcaagacagtgggcggcagcttccgggacagcaagagcctgaccatccagaaggacctggtggccgcctttgacaacggggaccagaaggtgttctttgacctgtgggaggagcacatcagcagcagcatcagagatggagacagctttgcccagaagctggagttctacctgcacatccactttgccatctacctgctgaagtacagcgtgggccgcccagacaaggaggagctggatgagaagatctcctacttcaagacctacctggagaccaagggagctgccctgagccagaccacagagttcctgcccttctacgccctgccctttgtgcccaaccccatggtgcaccccagcttcaaggagctgttccaggacagctggaccccagagctgaagctgaagctgatcaagttcctggccctgatcagcaaggccagcaacacccccaagctgctgaccatctacaaggaaaatggccagagcaacaaggagatcctgcagcagctgcaccagcagctggtggaggccgagcggcgctctgtgacctacctgaagcgctacaacaagatccaggccgactaccacaacctgattggagtgacagctgagctggtggacagcctggaggccaccgtgtctgggaagatgatcaccccagagtacctgcagagcgtgtgtgtgcggctcttcagcaaccagatgaggcagagcctggcccacagcgtggacttcaccaggcctggaacagccagcaccatgctgcgggccagcctggcccctgtgaagctgaaggatgtgcccctgctgcccagcctggactatgagaagctgaagaaggacctgatcctgggcagtgaccggctgaaggccttcctgctgcaggccctgcgctggaggctgaccaccagccaccctggagagcagcgggagaccgtgctgcaggcctacatcagcaatgacctgctggactgctacagccacaaccagaggtctgtgctgcagctgctgcacagcaccagtgatgtggtgcggcagtacatggcccggctcatcaatgcctttgccagcctggccgagggccgcctgtacctggcccagaacaccaaggtgctgcagatgctggagggccgcctgaaggaggaggacaaggacatcatcaccagagaaaatgtgctgggcgccctgcagaagttcagcctgcggcggcccctgcagacagccatgatccaggacggcctcatcttctggctggtggatgtgctgaaggaccctgactgcctgagtgactacaccctggagtacagcgtggccctgctgatgaacctgtgcctgcggagcacaggcaagaacatgtgtgccaaggtggccggcctggtgctgaaggtgctgagtgacctgctgggccacgagaaccacgagatccagccctacgtgaatggagccctgtacagcatcctgtctgtgcccagcatccgggaggaggcccgggccatgggcatggaggacatcctgcgctgcttcatcaaggagggcaatgctgagatgatccggcagatcgagttcatcatcaagcagctgaacagcgaggagctgcctgatggagtgctggagagtgatgatgatgaagatgaagatgatgaggaggaccatgacatcatggaggccgacctggacaaggatgagctgatccagccccagctgggggagctgtctggagagaagctgctgaccacagagtacctgggcatcatgaccaacacaggcaagaccaggaggaagggcctggccaacgtgcagtggagcggagatgagcccctgcagaggcctgtgacccctgggggccacagaaatggctaccctgtggtggaggaccagcacaccccaccccagacagcccagcacgccagaaatggccacccccaggccctgcctgctgcccatgaagctgtgtaccgggagggcaagcccagcaccccagagagctgtgtgagcagcagcagcgccatcatcgccaagccaggagagtggctgccccggggccggcaggaggagcccaggcctgcccccaccccccggcagccccgggaggccccccaggaccctggaaatggagtgaccaccagagaatgtgccagcgccttcacctgcaagccccgggccccctgcaccccagagatgctggactggaacccccccaaggccaaggcctctgtgctggcccccctcttcagcagctgtggcccccagcaggccagccggcccggcagcacagccagcagcacccggggcctgcccagcaaggagacccaccccaagtag

SEQ ID NO: 96051 - DNA, 1998 bp, Artificial Sequence
  derived and/or modified sequence
atgggcgacatcctggcccacgagagcgagctgctgggcctggtgaaggagtatctggattttgccgagttcgaggacacacttaagacattttccaaggaatgcaaaatcaagggaaaaccattgtgcaaaacagtgggcggtagcttcagggattctaaatcactgaccattcagaaggatctggtggccgcctttgataatggggaccagaaggttttttttgatctttgggaggagcacatcagctccagtatccgggatggggatagttttgcccagaaactcgagttctatctgcacatacacttcgctatctatcttctaaaatacagcgtgggacgtccagacaaggaggagttggacgagaaaatctcctactttaaaacctatttagaaaccaagggcgcggccctcagccagacgaccgaatttctgccattttacgccctgcctttcgtccccaatcccatggtgcacccctcctttaaagagctgtttcaggattcttggactcctgagttgaaactgaagttgattaaattcctagcactcatctcgaaggcctcaaacactccaaagctgctgacaatctataaggagaatggacagtcaaacaaagagatcctgcagcagctccaccagcaactggtggaagcagaacgtcgaagcgtgacatacctgaagaggtataataaaattcaggccgattatcacaatctcataggagtcactgctgaactcgttgactctttggaagcgaccgtctccgggaagatgattacgccagagtacctccaaagcgtctgcgttcgattgttctcaaaccagatgcgacagtcattagcccactcagtagacttcaccagaccagggacagctagcacaatgctgcgcgcctccttggcaccagtcaaactgaaggatgtccccctgctaccgtccttagactacgagaagttaaaaaaggacttgatcttggggtcagacaggctgaaagcgtttctcctgcaggcactgcggtggcggctcacaacatcacatcctggggagcagagagagaccgtattacaagcctatataagcaacgacttgctcgattgttactctcataaccaaaggtccgtgctccagttgctccactccacgtctgatgttgtgcggcaatacatggcccgtttgatcaatgcatttgccagcctggctgagggccggctgtacttagctcagaatacaaaagtactccagatgctcgaggggcggctgaaggaggaggataaggatatcatcactagagagaacgttttgggcgctctgcagaaattctcacttcgacgcccccttcagaccgcaatgattcaggacgggctgatcttttggctagttgacgtgcttaaagacccggactgtctttcagactacaccttagagtattcagtcgcccttctgatgaacctctgcctccgctctactgggaaaaacatgtgtgctaaagtcgctgggctggtactcaaggtcctcagcgatttgctgggccatgagaatcatgaaatacaaccctatgtgaatggagcgctttatagtattctttcagtgcccagcatcagagaggaagctcgcgcaatggggatggaggatattcttcggtgcttcatcaaggagggaaacgcggagatgataagacaaatcgaatttattatcaaacaacttaatagcgaggagttacctgacggcgtactcgaatctgacgatgacgaagacgaggatgatgaagaagatcacgacataatggaggccgaccttgacaaggatgagctcatccagccacagctgggcgaactatcgggagagaaactactgacaacagaataccttggaattatgaccaacacaggtaagacccgccgcaaaggtctcgcaaacgtgcaatggtccggcgacgaaccactgcaaagacctgtgacccctggcggacaccgcaatgggtacccagtttag

SEQ ID NO: 96052 - DNA, 2451 bp, Artificial Sequence
  derived and/or modified sequence
atgggcgacatcctggcccacgagagcgagctgctgggcctggtgaaggagtacctggatttcgcagaatttgaggacaccctcaagaccttcagcaaagagtgcaagattaaaggcaagccattatgtaagactgtgggcggatcatttcgtgactctaagagcctgactatccaaaaagacttagtagcagcctttgataacggggaccagaaagtattctttgatctgtgggaggaacatatctctagtagcataagagatggagatagctttgcccagaagctggagttttatctgcacattcactttgccatttacctactgaagtactcggtgggaaggcccgacaaggaagagctagacgagaaaatctcatattttaaaacctacctggagaccaagggagccgcccttagccagacgaccgagtttctgcccttctatgccttacctttcgtgccaaatcccatggtccaccctagctttaaagaattgtttcaggatagttggacacccgagctgaagctgaagctcattaagtttttggcactgatttccaaggcatcaaatactcctaagctgctgaccatctacaaagaaaacggccagtcaaataaagagattctgcagcagctacaccaacagctggttgaggcagaacgccgcagtgttacttacctaaaacggtacaataagatccaggcagactatcacaacttaatcggggtgactgcagagctggtggattcgttggaagccacagtgtctggcaaaatgatcactcctgaatatttgcaaagtgtctgcgttagactattctctaaccagatgcggcagagcctagcccacagcgtagattttacccgccctgggaccgcctctacaatgctgagagcctcattggcaccagttaagcttaaggacgtccctctgcttcccagcctggattacgaaaagctaaagaaagatctgatcctaggttccgacaggttgaaggcctttctgctgcaggcactgcgatggcgcctgactacctcacatcccggtgagcagcgtgagacagtccttcaggcttatattagcaacgacctccttgattgctattcgcataatcagcgtagtgtcctgcagttactccacagtacttccgatgttgtacggcagtacatggcacggttgatcaacgcattcgccagtctggctgagggacggctgtatctcgcgcagaacacaaaggtgctgcagatgctggaaggtcggttgaaagaagaagacaaagatattattacccgcgagaatgtcctgggggctctccaaaagttcagcctgcgtaggccgctacagacagcaatgatccaggacgggttgatcttctggctcgtagatgttcttaaggatcctgattgtttatccgattacacactggaatattctgtcgctttacttatgaatctctgtttgcggtcaactgggaagaatatgtgtgctaaagttgccggcctggtactaaaagtgttgtccgacctcttggggcacgaaaaccacgagattcaaccctacgtgaacggggccctttattcgatcttatctgtgccttccattcgcgaggaggccagagccatgggcatggaagacattctgaggtgcttcataaaggaaggcaacgcagagatgatacgccagatagagttcattatcaagcagctgaattctgaagaattgccggatggggtactagagtcagatgacgacgaggacgaagacgatgaagaggatcacgacatcatggaggccgatctggataaggatgagctgatccaaccacagttgggtgaactgtcaggtgagaagcttttgaccacagagtacctgggaattatgacaaataccggcaagacaagacgcaaaggcctggccaacgtgcagtggtccggggacgagccgctgcaacggcccgtgacacccggcggccacaggaacggatacccagtcgtggaggaccagcacacccctcctcagacagcacagcacgcccgcaacggccatccacaggccctgccagcagcccatgaagcggtctatcgtgaggggaagccatctacacccgagtcttgcgtgagtagttctagcgccatcatcgccaaacctggcgagtggctccctcgcgggcgacaagaggaacctagacccgccccgaccccccgacagcctagggaggctccccaggaccctgggaatggcgtgaccacacgagagtgtgcaagtgccttcacatgcaaaccacgggccccctgtacccctgagatgttggactggaatccccccaaagccaaggccagcgtgttggcccctctcttcagcagctgcggcccccaacaagcaagtcggcccggaagcaccgcatctagcaccaggggacttccaagtaaagaaacgcaccctaaatag

SEQ ID NO: 96053 - DNA, 1998 bp, Artificial Sequence
  derived and/or modified sequence
atgggtgatatccttgctcatgagtctgagctcctcggacttgtaaaggaatacttagactttgccgaattcgaagatacactgaaaacgttttcgaaggagtgtaaaataaaagggaaaccgctgtgcaaaaccgttggaggatccttccgagacagcaaaagcctgactattcaaaaagatctcgtggctgcattcgacaacggggaccagaaagtgttttttgacctgtgggaggagcacattagttctagcatcagggatggagattcatttgcccagaaactggagttttacctccatattcattttgctatttacctgctaaagtattcagtgggccgaccagataaggaggagttggatgagaagatttcatacttcaagacctatctggaaacaaagggcgcagccttgagtcagacaacagagtttctgccattttacgcgcttccatttgtccccaacccaatggtacatccctcattcaaagagctgttccaggacagttggacacccgaattgaaactcaagctgatcaagtttctggctctcatatctaaggcatccaatacaccaaagctgctgactatttacaaggagaacggacaaagcaacaaggaaattctgcaacagctccaccagcaactggtagaagccgaaaggcgctccgtgacatacctcaagcgctataataagatccaggcggactatcacaacctcataggcgttactgctgagcttgttgactcccttgaggcgaccgtctcagggaagatgataacccccgagtatctgcagtccgtctgcgtaagactgttctccaatcaaatgaggcagagcctggcacactcagtggattttacgaggcccggtaccgcttctactatgcttagggcctcactagccccagtcaaactcaaagatgtcccgttactgccgagtctagactatgagaagctgaaaaaagatttgatcctcggcagcgaccggctgaaggcctttctgctccaagctctgcggtggagactaactacaagccatcccggagaacagcgcgagaccgtgctccaagcctacatcagtaatgacctcctggactgctactctcacaaccagagatctgtgctacaactgctccactccaccagcgacgttgtaagacagtacatggctcggctgatcaatgcctttgcctctttggccgagggtagactgtacctggcacagaacacaaaggtcctccagatgctggaaggtagactgaaggaggaagacaaggatattatcacgcgcgagaacgtccttggggcactacagaagttctcgctccgtcgtccacttcaaactgccatgatacaggatggtctgatcttttggcttgtagatgtgctgaaggacccagattgcctttcagactatacgcttgaatactcagtggccctgttaatgaacctgtgtttgcggagtaccggcaagaacatgtgtgcgaaagtcgccggtctggttcttaaggtgctcagcgacctcctggggcatgagaatcacgaaatccagccatatgtgaatggtgctctgtacagtatcctgagtgtgccttcaatccgtgaggaggctagggcaatgggtatggaagatatcctgcgctgttttatcaaagaaggcaatgcggagatgattcgccagatcgagtttatcatcaaacagctgaatagtgaggagctgcccgacggagtcctggagtccgatgacgacgaagacgaggatgacgaagaagaccacgatattatggaggcagacttagataaggacgaattgattcagccacagcttggagaactgtccggcgaaaaactgctgaccacagagtacctggggattatgacaaacactggaaaaacccggaggaaagggcttgctaacgtgcaatggagcggagatgagccactccaacggcctgtgacccccggaggacaccgcaacggatacccggtgtag

SEQ ID NO: 96054 - DNA, 2451 bp, Artificial Sequence
  derived and/or modified sequence
atgggcgacatcttagctcacgaaagcgaactgctaggcttggtaaaagagtacctggacttcgcagagttcgaggacactctcaagaccttctccaaagaatgcaaaatcaagggaaaaccactctgtaagaccgtcggcggatcatttcgagacagtaaatctctgactatccagaaggacctggtggcagcgttcgataatggtgaccagaaggtcttttttgatctgtgggaggagcacattagctccagtatccgcgacggtgatagcttcgcacagaagctggaattctatctccacatccattttgcgatttatttactgaaatattcagtggggagacccgataaggaagaattagacgagaagatttcttacttcaagacatacctagaaacaaagggtgcagccctgtcccaaacaactgagtttctacccttctacgcactgccattcgtgcctaatccgatggtgcatccgagctttaaagaactgttccaggactcttggacaccggagctgaaactgaaactcatcaagttcttggcccttatcagcaaagcgtctaacaccccaaagctgctgactatctacaaggagaacgggcaatcgaataaggaaatcttgcagcagctgcatcagcagttagtcgaagcagagcggcgtagcgtaacttatctaaagcggtacaacaagattcaggccgactatcacaacttgataggcgtcaccgcagaactggtggacagtctagaggccactgtctcggggaagatgatcactcccgaatacctgcagtcagtttgcgtcaggctgttcagcaaccagatgcggcaaagccttgctcattccgttgatttcactcgacccggaaccgcgagcactatgctccgagcaagcttagcccctgtgaagttaaaggacgtcccattgttgccatctttagactatgaaaagctgaaaaaagacttgatcttgggctctgacaggctgaaggcttttttattgcaggccctccgctggcggctgacaacgtcgcacccgggtgaacaaagggagacggttctacaggcatatattagcaatgacctgcttgactgctatagccataatcagagaagtgtgctgcagttgttgcactccacatcggacgtcgtgagacagtatatggcacggctgatcaacgctttcgcaagcttggccgagggacgactttacctggcccaaaataccaaagtcctccagatgctcgaagggagactgaaggaggaagacaaagatattattacacgggaaaacgttttgggcgctctgcagaaattttctttaagacgaccgctgcagacggccatgattcaagatggtctgatcttctggttggtcgacgttttgaaggatcccgactgcctctctgactacactctggagtattcagtggccctgcttatgaatctttgcctccgctcaacgggcaaaaatatgtgcgcaaaagtagctggactggtactgaaagtgctcagtgatctcctcggacatgagaaccacgaaatccagccttacgtcaacggggcattatactccatcctgtccgtgcccagcattcgtgaagaagccagagcaatggggatggaggatattctgagatgctttatcaaggaaggtaatgccgagatgatccggcaaatcgagttcatcatcaaacagctgaacagcgaggaactaccagacggagtcttggagtcagatgatgatgaggacgaggacgacgaggaagatcatgatatcatggaagcagatctggataaagacgaactgatacaaccgcaactgggcgagctgtctggcgagaaactgctgacaacagaatatttaggcattatgaccaacacgggtaagacacgcagaaagggactggccaatgtacagtggtctggggacgaaccccttcagagaccggttacgccaggtggccaccggaatggttatccagtggtggaagatcaacacacaccgcctcagacggcacagcatgctaggaacggacatccacaggccctgcctgctgctcacgaagcggtttatcgagaagggaagccttccacccctgagtcttgtgtctcatctagctcagcgatcattgccaaacctggggaatggctgccaagaggccgacaggaggaacccaggcccgctccaacgcccagacagccacgcgaagccccacaggacccgggtaatggcgtgaccacaagggagtgcgccagtgcattcacttgcaagcctcgggctccatgtacaccagagatgctggactggaatcctcctaaggcaaaagcaagcgttctggctccattgttcagcagctgcgggccacagcaggcctcccgccctggtagcacagccagctccacaaggggtctgccctcaaaagaaacccaccctaagtag

SEQ ID NO: 96055 - DNA, 2300 bp, Artificial Sequence
  derived and/or modified sequence
tccctcccaggctgctccgcgtcggcggcgccccgcgcgattggctgcgccgcccccacgtgacgccggggtggcggcggcggttgcccgggtgacggctgcggaggtggcggccgggctgggatagcgcgagtgtccgcggccgagcagcagagatttttgctgtgagaattaattaccagtaacagttcaatatgggggacattctggctcatgaatctgaattacttggactagtgaaagagtatttagattttgctgaatttgaagacaccttgaaaacattttcaaaagaatgcaaaataaaaggaaaaccattgtgtaaaacagtaggcggatctttcagagactccaaatcattgacaattcagaaggatcttgtcgctgcatttgacaacggagaccagaaggtgttcttcgatctgtgggaggagcacatttcaagttccatccgagatggggactcctttgcccagaagctggaattctatctccacatccattttgccatctatcttttgaagtactctgtggggagaccggacaaagaggagctggatgaaaagatttcctacttcaaaacctacctggagaccaaaggggcagccttgagccagaccacagagtttcttcctttctatgcccttccttttgttcccaaccctatggtgcacccctcatttaaagaactcttccaggattcctggactccagagttaaagttgaagttgataaagtttctagctttaatatctaaagccagcaacacgccaaagcttttaacaatatataaggagaatggacaaagtaacaaagaaatcttgcagcagctccaccagcagctggttgaagctgaacgtaggtcagtgacatacctcaaacggtacaataagatccaggccgactaccacaatctcattggagtcacagcagagctggtggattctctagaggccacagtcagcggcaagatgatcacccctgagtacctccagagcgtctgtgtccgcctgttcagtaaccagatgcggcagagcctggcgcatagtgtggacttcacgaggcctgggacggcatccaccatgttacgagcctccttggcacccgtgaaattgaaggatgtcccattactgccctccttggattatgagaaactgaagaaggatttgattttggggagtgaccgcttgaaagccttcttgttgcaggctctgcgctggcgcttgaccacatcccatcctggagagcagagggagaccgttctgcaagcctacatcagcaatgacctcttggactgttatagccacaaccagaggagtgtgcttcagttgctgcactccacgagcgacgtggtgcggcagtacatggccaggctcatcaatgcttttgcgtcactggcagaaggtcgcctctaccttgcccagaacacaaaggtgctgcagatgctggagggaaggctgaaggaggaggacaaggatatcatcaccagggagaatgttcttggggccctgcagaagttcagtctcaggcgcccgctgcagacagcgatgattcaagacggcctcatcttctggctggttgatgttctgaaggaccctgactgcctgtctgactacacgctggagtactcggtggctttgctcatgaacctctgcctccgcagcacagggaagaacatgtgtgccaaggtggcaggcctcgtgctcaaagtcctttcggatcttcttggccatgaaaaccatgagatacagccgtatgtgaatggagctctgtacagcatcctttctgttccatccattcgtgaggaagcaagagcaatgggaatggaagacatcctacgctgcttcatcaaagaaggcaatgctgaaatgatccgccagatagaattcatcatcaagcagctaaattccgaagagctaccagatggtgttcttgaatctgatgatgatgaagatgaagatgatgaagaggaccatgacatcatggaagccgatctggacaaagacgaactgatccagccccagctcggagaactctcaggagagaagcttctgaccacggagtacctggggatcatgaccaacacggggaagacaaggcggaaggggctggctaatgtgcagtggagcggggatgagcccctgcaaaggcccgtcacccccggcggccacagaaacgggtacccagtgtaagtcagggctaaaggaagcgggaattgactttcttaagctttgttttgattacagtgtaagatgtatgtatttttaaaattcaaaataaagcattcattttgaaaagca

SEQ ID NO: 96056 - DNA, 2560 bp, Artificial Sequence
  derived and/or modified sequence
gttgcccgggtgacggctgcggaggtggcggccgggctgggatagcgcgagtgtccgcggccgagcagcagagatttttgctgtgagaattaattaccagtaacagttcaatatgggggacattctggctcatgaatctgaattacttggactagtgaaagagtatttagattttgctgaatttgaagacaccttgaaaacattttcaaaagaatgcaaaataaaaggaaaaccattgtgtaaaacagtaggcggatctttcagagactccaaatcattgacaattcagaaggatcttgtcgctgcatttgacaacggagaccagaaggtgttcttcgatctgtgggaggagcacatttcaagttccatccgagatggggactcctttgcccagaagctggaattctatctccacatccattttgccatctatcttttgaagtactctgtggggagaccggacaaagaggagctggatgaaaagatttcctacttcaaaacctacctggagaccaaaggggcagccttgagccagaccacagagtttcttcctttctatgcccttccttttgttcccaaccctatggtgcacccctcatttaaagaactcttccaggattcctggactccagagttaaagttgaagttgataaagtttctagctttaatatctaaagccagcaacacgccaaagcttttaacaatatataaggagaatggacaaagtaacaaagaaatcttgcagcagctccaccagcagctggttgaagctgaacgtaggtcagtgacatacctcaaacggtacaataagatccaggccgactaccacaatctcattggagtcacagcagagctggtggattctctagaggccacagtcagcggcaagatgatcacccctgagtacctccagagcgtctgtgtccgcctgttcagtaaccagatgcggcagagcctggcgcatagtgtggacttcacgaggcctgggacggcatccaccatgttacgagcctccttggcacccgtgaaattgaaggatgtcccattactgccctccttggattatgagaaactgaagaaggatttgattttggggagtgaccgcttgaaagccttcttgttgcaggctctgcgctggcgcttgaccacatcccatcctggagagcagagggagaccgttctgcaagcctacatcagcaatgacctcttggactgttatagccacaaccagaggagtgtgcttcagttgctgcactccacgagcgacgtggtgcggcagtacatggccaggctcatcaatgcttttgcgtcactggcagaaggtcgcctctaccttgcccagaacacaaaggtgctgcagatgctggagggaaggctgaaggaggaggacaaggatatcatcaccagggagaatgttcttggggccctgcagaagttcagtctcaggcgcccgctgcagacagcgatgattcaagacggcctcatcttctggctggttgatgttctgaaggaccctgactgcctgtctgactacacgctggagtactcggtggctttgctcatgaacctctgcctccgcagcacagggaagaacatgtgtgccaaggtggcaggcctcgtgctcaaagtcctttcggatcttcttggccatgaaaaccatgagatacagccgtatgtgaatggagctctgtacagcatcctttctgttccatccattcgtgaggaagcaagagcaatgggaatggaagacatcctacgctgcttcatcaaagaaggcaatgctgaaatgatccgccagatagaattcatcatcaagcagctaaattccgaagagctaccagatggtgttcttgaatctgatgatgatgaagatgaagatgatgaagaggaccatgacatcatggaagccgatctggacaaagacgaactgatccagccccagctcggagaactctcaggagagaagcttctgaccacggagtacctggggatcatgaccaacacggggaagacaaggcggaaggggctggctaatgtgcagtggagcggggatgagcccctgcaaaggcccgtcacccccggcggccacagaaacgggtacccagtggtggaagaccaacacacacctccccagacagcccagcacgccagaaacggccacccgcaggccctgccagccgctcacgaggctgtctacagggagggcaagcccagcaccccggagtcctgcgtctcctcttcatcagccatcatcgccaagccaggagagtggctcccaagaggacgccaggaagagcctcgcccagcccccacgccccgccagccaagggaggcgccccaggacccaggcaatggagtgaccaccagggaatgtgcatcagccttcacctgcaagccccgggccccctgcactccagagatgctggactggaacccacccaaggcaaaggcgtcagttctggcccctctgttctcttcgtgtggcccccagcaggccagccgccccggctccacagcgtcctccacaaggggcctgccgagtaaggaaacacacccaaaa

SEQ ID NO: 96057 - DNA, 441 bp, Artificial Sequence
  derived and/or modified sequence
atgaacaagcgcgactatatgaatactagtgttcaagaacctcctcttgattacagtttccggtccattcatgtcatccaggacctggttaacgaggagccacgaactggactgaggcccctgaagaggagcaaaagtggaaagagtctgacccaatcgctttggctgaacaacaacgtgctgaacgatttgcgcgactttaaccaagtggcatcccagttgctggagcatccggagaatctggcctggattgacctaagttttaacgatctgacctccattgatccagtgctcaccaccttttttaacctgtctgtcctgtacctgcacggcaacagcatacagcggcttggagaggtgaacaaactcgcagtccttcccagacttcggtctctgaccttgcacggcaacccgatggaggaggagaaaggataccgctag

SEQ ID NO: 96058 - DNA, 279 bp, Artificial Sequence
  derived and/or modified sequence
atgaacaagagagattacatgaatacatccgtccaggaaccccccttagattatagttttcgttccatacacgttattcaggatctggtgaatgaggagccccgtaccggcctgaggccgctcaagagaagtaaaagcggcaaaagccttacacagtcgctttggcttaataacaatgtcttaaatgacctcagagattttaaccaagtggcaagtcagctactggagcaccccgaaaaccttgcttggatagatctgtcctttaatgatcttacctag

SEQ ID NO: 96059 - DNA, 315 bp, Artificial Sequence
  derived and/or modified sequence
atgaacaaacgagattacatgaatacctccgtgcaggagccaccactcgactattcctttcggtccatccatgtcatccaggacctggtaaatgaggaaccccgcacgggcctgcgtccacttaaacggagtaagtctggaaagtctctgacccaaagcctgtggctaaacaacaacgtgctgaacgacctgagggactttaaccaggtagcttcacagctgcttgagcacccagaaaatttggcctggattgacctttcatttaatgacttgacatcaatcgacccagtactcactactttcttcaatctgtag

SEQ ID NO: 96060 - DNA, 441 bp, Artificial Sequence
  derived and/or modified sequence
atgaacaagagggactacatgaacacctctgtgcaggagccccccctggactacagcttccgcagcatccacgtgatccaggacctggtgaatgaggagcccaggacaggcctgcggcccctgaagaggagcaagagcggcaagagcctgacccagagcctgtggctgaacaacaacgtgctgaatgacctgcgggacttcaaccaggtggccagccagctgctggagcaccctgagaacctggcctggattgacctgtccttcaatgacctgaccagcattgatcctgtgctgaccaccttcttcaacctgtctgtgctgtacctgcacggcaacagcatccagaggctgggggaggtgaacaagctggccgtgctgccccggctgcggagcctgaccctgcacggcaaccccatggaggaggagaagggctacagatag

SEQ ID NO: 96061 - DNA, 279 bp, Artificial Sequence
  derived and/or modified sequence
atgaacaagagggactacatgaacacctctgtgcaggagccccccctggactacagcttccgcagcatccacgtgatccaggacctggtgaatgaggagcccaggacaggcctgcggcccctgaagaggagcaagagcggcaagagcctgacccagagcctgtggctgaacaacaacgtgctgaatgacctgcgggacttcaaccaggtggccagccagctgctggagcaccctgagaacctggcctggattgacctgtccttcaatgacctgacctag

SEQ ID NO: 96062 - DNA, 315 bp, Artificial Sequence
  derived and/or modified sequence
atgaacaagagggactacatgaacacctctgtgcaggagccccccctggactacagcttccgcagcatccacgtgatccaggacctggtgaatgaggagcccaggacaggcctgcggcccctgaagaggagcaagagcggcaagagcctgacccagagcctgtggctgaacaacaacgtgctgaatgacctgcgggacttcaaccaggtggccagccagctgctggagcaccctgagaacctggcctggattgacctgtccttcaatgacctgaccagcattgatcctgtgctgaccaccttcttcaacctgtag

SEQ ID NO: 96063 - DNA, 2402 bp, Artificial Sequence
  derived and/or modified sequence
ccaagactggagaggaagcgactgcggggagtatttccattttaaccggaaacaatccctgaacccacaggaatgaatgcctaatggtggagtttcagccatcagtgacaggctgaacccagactcccagggcacctgcttgcacctttgaatgatggcctgaactatgaacaaacgggactatatgaacacttcggtacaggagccccctcttgactactccttcagaagcatccacgtcattcaagatctggtaaatgaggagccaaggacaggactacgaccactgaagcgttcaaagtcggggaaatcactgacccagtccctgtggctgaataacaatgttctcaatgatctgagagacttcaaccaggtggcttcacagctgttggagcacccagagaacctggcctggatcgacctgtcctttaatgacctgacttccattgaccctgtcctaacaactttcttcaacctgagtgtcctctatcttcacggcaacagcatccagcgcctgggggaggtgaataagctggctgtccttcctcggctccgtagcctgacactccatgggaaccccatggaggaagagaaagggtataggtaagtgccctgcccctggaggtagcgtctagctgggctcccctaaaggaaaggaggaggagaaacaagaaatctacgaccattcttctgccatgcttggacctgggaagggagtaacagacctctaagcattccttgctctcagtcaggataaacctaatctttcccaaactatgctcaagtccctccattccttgcagtcagggaagacaacagcaactagtggagggggaaggggattctggtgggggtgctggcccccagcctaagtcttccccacaggcaatatgtgctgtgcaccctgtcccgtatcaccacgttcgacttcagtggggtcaccaaagcagaccgcaccacagctgaagtctggaaacgcatgaacatcaagcccaagaaggcctggaccaagcagaatacactttgaggctcccacgaccctagtagtcctaaaggcctaagcatagacagcatggtttgacaataaataatttgagctgttgagcagatgagaagtcacttacaccttgtagagatgttctctaactcaggcaactgcaagtagctctagccttttcttttcttttttttttttttgagacggagtctcactctgtcacacaggctggagtgcagtggcacgatcttggctcactgcaacctcagcctcccaggttcaagagattctcctgcctcagcctccccagtagctgtgattaaaggcgcctgccaccatgactggctaattttgttgttgttgttgttgttttgagacggtttcactcgtcaccccagctggagtgcagtggtgcgatctcagctcactgcaacctccgcctgctgggttcaagcgattctcctgcctcagcctcctgagtagctgggattacaggcgcctgctaccacatccagctaatttttttttttgagacggagtctcgctctgtcacccaggctggagtgcagtggcacgatctcggctcactgcaaactccgccttccaggttcacgccattctcctgcctcagcctcccaagtagctgggactataggcacctactaccacgcctggctaattttttgtatttttagtagagacggggtttcaccatgttagccaggatggtctccatctcctgaccttgtgatccacccacctcggcttcccccagctaattttttatattttagtagagacaaggtttcgccatgttggccaggctggtcttgaactcctgacctcaggtgatccgtctgctttggcctcccaaagtgctgggattagaagcgtgagccaccacgcccagcctttttttgtatttttagtagagatggggtttcgccatgttggccaggctggtctcaaactcctgacctcaggtgatctgcccacctcagcctcccaaagtgctaggattacaggataagccactgcacctggccagctctagtcttattttgctgaaaaagggaggcaattgagggaaaggcctgctggcctgggacactggagacgtgggtttaccacacagccttgggaaatttatctaactctctgggcccctttgtacttttcagcttagagatttgggggttaaagtagatcagtaatttccaaactcttcacagagtaccagggtctgtagagatgcctcacaggcctccatgacaggccaagaagatggcctatgatctctgaaaccagcccccacttcaatcagatcaaagtaattccattctgttttatatgctgggattctgcttaagatttcatttgataaaaagaatcttctgcttaaaaa

SEQ ID NO: 96064 - DNA, 842 bp, Artificial Sequence
  derived and/or modified sequence
tttcggactcggttatggaggaggccttccgctcgcagcggcctctccagcaccccttttaggcctgagcacccgcaggggtgcccaggccgcacgccaaacgcgggcccgcgccggttacctggctgcgcgctcccgctctgcctcgcgattctccggaatcgtacctcttcgtgggctcgcgccagcgctgtgagcgcacaattagtttaaactatggccccgccccctcgcgctgccctctgattggcctctgtcggcggggcccgcttaaggacccgggaaaaggaagtttgagggccactgggaaagagaaggggtatcaccgcttccggaccccggcctgtacttgaaggcaaagagaactacaaatcccagcgtcacccgcggccttgaagccccgcccctgacaaactgaaggtcccgggagtatttccattttaaccggaaacaatccctgaacccacaggaatgaatgcctaatggtggagtttcagccatcagtgacaggctgaacccagactcccagggcacctgcttgcacctttgaatgatggcctgaactatgaacaaacgggactatatgaacacttcggtacaggagccccctcttgactactccttcagaagcatccacgtcattcaagatctggtaaatgaggagccaaggacaggactacgaccactgaagcgttcaaagtcggggaaatcactgacccagtccctgtggctgaataacaatgttctcaatgatctgagagacttcaaccaggtggcttcacagctgttggagcacccagagaacctggcctggatcgacctgtcctttaatgacctgactt

SEQ ID NO: 96065 - DNA, 527 bp, Artificial Sequence
  derived and/or modified sequence
ctatattccaagcagacagagctggaaggagacactgttccacttagaggcccagtggcaggtgcagggaacttatgggagtatttccattttaaccggaaacaatccctgaacccacaggaatgaatgcctaatggtggagtttcagccatcagtgacaggctgaacccagactcccagggcacctgcttgcacctttgaatgatggcctgaactatgaacaaacgggactatatgaacacttcggtacaggagccccctcttgactactccttcagaagcatccacgtcattcaagatctggtaaatgaggagccaaggacaggactacgaccactgaagcgttcaaagtcggggaaatcactgacccagtccctgtggctgaataacaatgttctcaatgatctgagagacttcaaccaggtggcttcacagctgttggagcacccagagaacctggcctggatcgacctgtcctttaatgacctgacttccattgaccctgtcctaacaactttcttcaacct

SEQ ID NO: 96066 - DNA, 441 bp, Artificial Sequence
  derived and/or modified sequence
atgaacaagcgggactacatgaacaccagcgtgcaggagccccccctggactatagtttccgctcaatacacgtcatccaggacttggtgaatgaggagccaagaaccggcctccgaccattgaagcggtctaaaagtggaaaaagcctcacccagagcctgtggctcaacaacaatgtacttaatgacctccgggacttcaaccaggtggctagtcagctactggagcaccccgaaaacctggcgtggattgacctgagcttcaacgacctcactagtattgatcctgtccttacaaccttcttcaatttatccgtcttgtacttgcatggaaactctatccagcgcttaggggaggtgaataagctggcagtgctgccgcggctgcgatccctcaccctacatggaaaccccatggaggaagagaagggttaccggtag

SEQ ID NO: 96067 - DNA, 279 bp, Artificial Sequence
  derived and/or modified sequence
atgaacaagcgggactacatgaacaccagcgtgcaggagccccccctggactactcctttaggtcaattcacgtgattcaggatctcgtcaatgaggaacccagaactgggttgagacctctaaagcgctcaaaatcaggaaagagcttaacccagtctctctggctgaacaacaatgttttgaacgacctgcgagattttaaccaagtggcgtctcagcttctggagcatccggagaacttggcctggatcgatctgtcttttaacgatcttacctag

SEQ ID NO: 96068 - DNA, 315 bp, Artificial Sequence
  derived and/or modified sequence
atgaacaagcgggactacatgaacaccagcgtgcaggagccccccctggactactctttccgttcgatccacgtgattcaggaccttgtcaacgaggaaccccgtaccggcctgcgacccctgaagcgtagcaaaagcgggaaatctctcacccaaagcctgtggctcaacaacaatgtcctaaacgatttaagagactttaatcaggttgcctctcagctgctcgaacatcccgagaatctcgcctggatagatctgtcctttaatgatttaaccagcatcgaccctgtgttaacgacctttttcaatctgtag

SEQ ID NO: 96069 - DNA, 441 bp, Artificial Sequence
  derived and/or modified sequence
atgaacaagagggactatatgaatacatcggtgcaggaacccccattagactattcatttcgcagcatccacgtcatccaagatctcgtgaacgaggaaccacggactggcctgcgcccactgaagcgctccaagtctggaaaatccttgacccagagcctgtggctcaacaataacgttctgaacgatctgagagactttaatcaagttgcatcccaactgcttgagcatccagagaacctggcatggatcgatctaagcttcaacgatctgacgtctattgacccagtgctgaccaccttctttaatctgagcgtgctgtatctgcacggcaattcaatacaaaggctcggtgaagtaaataagttggcagtgctgcctagattgaggagtctgacccttcatggcaacccaatggaggaggagaagggatatcggtag

SEQ ID NO: 96070 - DNA, 279 bp, Artificial Sequence
  derived and/or modified sequence
atgaataagcgcgattacatgaatactagcgtgcaggaaccgcctctggactatagttttcgatccatccacgttatccaggatctagtgaatgaggaacctagaactgggttacggccactcaagagaagcaaaagcggaaagagtctcacgcaatcgttatggctcaacaataatgtgctgaatgatttaagggactttaatcaggtagcgagccaactactggagcatccggaaaacctcgcgtggatcgacctgtcctttaacgatttaacttag

SEQ ID NO: 96071 - DNA, 315 bp, Artificial Sequence
  derived and/or modified sequence
atgaataaaagggactacatgaatacgagcgtccaggaaccacccctcgattattcctttagatccattcatgtgatacaggatctagttaatgaggagcctagaaccggcctgcgccctttaaagagatccaaaagcggcaaaagtcttacccagtccctctggctgaacaataatgttctcaatgatctacgtgactttaaccaggtagcgtcacagttactcgagcacccagaaaatttagcctggattgacctatctttcaacgatttgacctctattgacccagtgctgactactttctttaatctttag

SEQ ID NO: 96072 - DNA, 441 bp, Artificial Sequence
  derived and/or modified sequence
atgaacaagagagactacatgaacaccagcgtgcaggagccccccctggactacagcttcagaagcatccacgtgatccaggacctggtgaacgaggagcccagaaccggcctgagacccctgaagagaagcaagagcggcaagagcctgacccagagcctgtggctgaacaacaacgtgctgaacgacctgagagacttcaaccaggtggccagccagctgctggagcaccccgagaacctggcctggatcgacctgagcttcaacgacctgaccagcatcgaccccgtgctgaccaccttcttcaacctgagcgtgctgtacctgcacggcaacagcatccagagactgggcgaggtgaacaagctggccgtgctgcccagactgagaagcctgaccctgcacggcaaccccatggaggaggagaagggctacagatag

SEQ ID NO: 96073 - DNA, 279 bp, Artificial Sequence
  derived and/or modified sequence
atgaacaagagagactacatgaacaccagcgtgcaggagccccccctggactacagcttcagaagcatccacgtgatccaggacctggtgaacgaggagcccagaaccggcctgagacccctgaagagaagcaagagcggcaagagcctgacccagagcctgtggctgaacaacaacgtgctgaacgacctgagagacttcaaccaggtggccagccagctgctggagcaccccgagaacctggcctggatcgacctgagcttcaacgacctgacctag

SEQ ID NO: 96074 - DNA, 315 bp, Artificial Sequence
  derived and/or modified sequence
atgaacaagagagactacatgaacaccagcgtgcaggagccccccctggactacagcttcagaagcatccacgtgatccaggacctggtgaacgaggagcccagaaccggcctgagacccctgaagagaagcaagagcggcaagagcctgacccagagcctgtggctgaacaacaacgtgctgaacgacctgagagacttcaaccaggtggccagccagctgctggagcaccccgagaacctggcctggatcgacctgagcttcaacgacctgaccagcatcgaccccgtgctgaccaccttcttcaacctgtag

SEQ ID NO: 96075 - DNA, 1473 bp, Artificial Sequence
  derived and/or modified sequence
atggccgacaccagaagcgtgcacgagaccagattcgaggccgccgtgaaggtgatccagagcctgcccaagaacggcagcttccagcccaccaacgagatgatgctgaagttctacagcttctacaagcaggccaccgagggcccctgcaagctgagcagacccggcttctgggaccccatcggcagatacaagtgggacgcctggagcagcctgggcgacatgaccaaggaggaggccatgatcgcctacgtggaggagatgaagaagatcatcgagaccatgcccatgaccgagaaggtggaggagctgctgagagtgatcggccccttctacgagatcgtggaggacaagaagagcggcagaagcagcgacatcaccagcgacctgggcaacgtgctgaccagcacccccaacgccaagaccgtgaacggcaaggccgagagcagcgacagcggcgccgagagcgaggaggaggaggcccaggaggaggtgaagggcgccgagcagagcgacaacgacaagaagatgatgaagaagagcgccgaccacaagaacctggaggtgatcgtgaccaacggctacgacaaggacggcttcgtgcaggacatccagaacgacatccacgccagcagcagcctgaacggcagaagcaccgaggaggtgaagcccatcgacgagaacctgggccagaccggcaagagcgccgtgtgcatccaccaggacatcaacgacgaccacgtggaggacgtgaccggcatccagcacctgaccagcgacagcgacagcgaggtgtactgcgacagcatggagcagttcggccaggaggagagcctggacagcttcaccagcaacaacggccccttccagtactacctgggcggccacagcagccagcccatggagaacagcggcttcagagaggacatccaggtgccccccggcaacggcaacatcggcaacatgcaggtggtggccgtggagggcaagggcgaggtgaagcacggcggcgaggacggcagaaacaacagcggcgccccccacagagagaagagaggcggcgagaccgacgagttcagcaacgtgagaagaggcagaggccacagaatgcagcacctgagcgagggcaccaagggcagacaggtgggcagcggcggcgacggcgagagatggggcagcgacagaggcagcagaggcagcctgaacgagcagatcgccctggtgctgatgagactgcaggaggacatgcagaacgtgctgcagagactgcagaagctggagaccctgaccgccctgcaggccaagagcagcaccagcaccctgcagaccgccccccagcccaccagccagagacccagctggtggcccttcgagatgagccccggcgtgctgaccttcgccatcatctggcccttcatcgcccagtggctggtgtacctgtactaccagagaagaagaagaaagctgaactag

SEQ ID NO: 96076 - DNA, 3848 bp, Artificial Sequence
  derived and/or modified sequence
taagcccgcggggcagggcgaggggcgggcgtcggggacattaccggacaggccttgtccggcaataccaagtttcatgcaggctcttgggaaagctggtgctgctgctgcctgattcccgccgacagaccttgggaccggggccaacactggcagctggagatggcggacacgagatccgtgcacgagactaggtttgaggcggccgtgaaggtgatccagagtttgccgaagaatggttcattccagccaacaaatgaaatgatgcttaaattttatagcttctataagcaggcaactgaaggaccctgtaaactttcaaggcctggattttgggatcctattggaagatataaatgggatgcttggagttcactgggtgatatgaccaaagaggaagccatgattgcatatgttgaagaaatgaaaaagattattgaaactatgccaatgactgagaaagttgaagaattgctgcgtgtcataggtccattttatgaaattgtcgaggacaaaaagagtggcaggagttctgatataacctcagatcttggtaatgttctcacttctactccaaacgccaaaaccgttaatggtaaagctgaaagcagtgacagtggagccgagtctgaggaagaagaggcccaagaagaagtgaaaggagcagaacaaagtgataatgataagaaaatgatgaagaagtcagcagaccataagaatttggaagtcattgtcactaatggctatgataaagatggctttgttcaggatatacagaatgacattcatgccagttcttccctgaatggcagaagcactgaagaagtaaagcccattgatgaaaacttggggcaaactggaaaatctgctgtttgcattcaccaagatataaatgatgatcatgttgaagatgttacaggaattcagcatttgacaagcgattcagacagtgaagtttactgtgattctatggaacaatttggacaagaagagtctttagacagctttacgtccaacaatggaccatttcagtattacttgggtggtcattccagtcaacccatggaaaattctggatttcgtgaagatattcaagtacctcctggaaatggcaacattgggaatatgcaggtggttgcagttgaaggaaaaggtgaagtcaagcatggaggagaagatggcaggaataacagcggagcaccacaccgggagaagcgaggcggagaaactgacgaattctctaatgttagaagaggaagaggacataggatgcaacacttgagcgaaggaaccaagggccggcaggtgggaagtggaggtgatggggagcgctggggctccgacagagggtcccgaggcagcctcaatgagcagatcgccctcgtgctgatgagactgcaggaggacatgcagaatgtccttcagagactgcagaaactggaaacgctgactgctttgcaggcaaaatcatcaacatcaacattgcagactgctcctcagcccacctcacagagaccatcttggtggcccttcgagatgtctcctggtgtgctaacgtttgccatcatatggccttttattgcacagtggttggtgtatttatactatcaaagaaggagaagaaaactgaactgaggaaaatggtgttttcctcaagaagactactggaactggatgacctcagaatgaactggattgtggtgttcacaagaaaatcttagtttgtgatgattacattgctttttgttgtccagtagtttagtttgtgtacatatatacacatatatattttgcactacacaaacgataacattttaaggactaatattgctgatacttgaataatcaatctctactaggttataagtagtatacacagatttaccctgcccttgaacttgaaggacattaaattattaatgatcatttggtaacatgtttacctgattatcttccatagagtaacataagctgcttttcaaaggtaccattgtgataatgagatcaaatttataagttattatttttaattttctaaattaaataaaagaaagaatgcaaaccaggagtgaatttcaaatgagatgtaatcgactttatatcttagtcacggagttgccatggcatgtagtagaaaaccacaggaagaatggtcatattcactttgtgggctgcccataatctttcttgggcattcacaactcttgagtttggtgttcaggcatcattattaaaaagtggagtcctatgtaccagactgagtttttacaaatgatttgcaggctagacataacccactgatggaaatggtgaagaatgagcttcatgtaggtttaaaagtgtattctgagcctgtagatgattaatcaggtttttattcaatcatataaatgtattcctttgtaatcatttttgtttaactgaggatatctagtgtctgcttcatagggtgctttgaaatataaaatgaaaacttatttatactgtttttacaacagtcaaaaaggaaacacacgaaaatcacttttctgcaactgatgaactatatagactggactcttaacctcttagtgcctcagtttttccttcggggtatactattttagatacacctacttcacaggagtactggagggatttgcaagctaacgggccaaatgcttccataggaataaggcatgcccagctaacagaaatttaagtccctcttccccacctctctcatctagaccaaaaagaagactacaatttagatccttggagacttttcctgtatgccttccaaaacttcctgctcacttagatgtaccttgtgctttgaagatttctttgatgcagtctttgtaacaaataatttttttttttaaatggagtttctctcttgttgcccaggctggagggcaatggcgtgatcttggctcactgcaacttccacctcctgggttcaagtgattctcctgcctcactcccaagtagctgggattacaggcatgcaccaccatgcctggctaattttgtatttttagtagagacggggtttctccatgttggtaaggctgatctcaaactcccaacctcaggtgatctgcctgcctcggcctcccaaagtgctgggattagaggcgtgagccactgcacctggcctgtagcaaataatttttaagcattctcaagatgtatgatgttgggtttaacatcatatgttcacagtgttttaaataagaaataatctgtctttagtatacagaatggttctttgtttgcctgaaaagtataagaatacaatttacttttcccaaactctttttccttatttttttctttcaaataactttaattatttaatcccatactgattaaaatatgtctgtctaaagggatctactactatttgcttttaaaaaagtgttccctatttatttaggaaaaagtgaagcaagcaactgaatttatatgtaaaaataacatttagacctgtggatcaaagattattttcaaaaatgagatatcaatttggtatcagtaaaaagtgtcttttctcttagtatataaataaataaaatgcaaattaagagtgtaagcagttgtgaatcattacaagcagtctgggataactaactcctagggataaccatttctatcctgttccaaagtcttattttatagtttgaaaagcactttgcacacagttcttgtatataaaagtaaagatgtaattataggatatagtgttcctgctttgtttaataagaacctcatttaaacttgacagctatggtatttttttaatgataacttcttttctgtttattgtaaaactaagttaaaaataaaaggttaatgagaaa

SEQ ID NO: 96077 - DNA, 1473 bp, Artificial Sequence
  derived and/or modified sequence
atggcagacacgcgatcagtacatgagacgcgatttgaggccgcggtgaaagtgatccagtccctaccgaagaatggcagctttcaaccaacaaatgagatgatgcttaagttctactcattttataagcaggcaacagaggggccttgcaagctttctagacctggtttctgggatcctattggtcgctataagtgggacgcttggagcagtttgggtgatatgactaaggaagaagccatgattgcgtacgtggaagagatgaagaaaatcatcgagacgatgcccatgaccgagaaggttgaggaacttctgagggtgatcgggcctttttacgagatcgtcgaagataagaaaagcgggcggtcctccgatatcactagtgatcttggcaacgtcctcacatctacccctaacgctaagaccgtcaatggtaaagccgaaagttctgactccggagctgagagtgaggaagaagaggcgcaggaagaggtaaagggcgctgaacagagtgacaatgacaaaaaaatgatgaagaaaagcgccgatcacaagaacctcgaagtgattgtgactaatgggtatgacaaggacgggttcgtccaagacattcagaacgacattcacgcctcttctagcttgaatggcagatccactgaagaggtgaagccgatcgacgaaaacctcggtcaaactggcaaaagcgctgtatgtattcaccaggacatcaacgacgatcatgtggaggatgtcacaggcatccaacaccttacttccgacagtgactccgaagtctattgcgacagcatggaacagttcggacaagaggagtcattagactctttcacatcgaataacggaccatttcagtactacctgggcggacactcctcccagccaatggagaacagcggcttccgagaggatatacaagtccctcccggcaatggcaatattggaaacatgcaagtagtcgcagtcgaggggaaaggagaagtgaaacacggtggcgaagatggccggaataattcgggtgcacctcatcgggaaaaaagaggaggtgagacggatgaattctctaatgtgcggcgtggaaggggtcaccgtatgcagcacctcagtgagggtacaaaagggagacaagtcgggagtggaggagatggcgaaagatggggttcggatcggggatcaagaggaagcctcaacgaacagatcgcacttgtactgatgagactccaggaggatatgcaaaatgtgctgcagcgtctccagaagctggaaacactgactgccctgcaggctaaaagttccacaagcacactgcagaccgccccccagccaacgagtcagagaccctcatggtggcccttcgagatgagccccggagtgttaacattcgccatcatttggccctttatagcccagtggttggtttacctctactaccagcgtagacggcggaaactgaattag

SEQ ID NO: 96078 - DNA, 1473 bp, Artificial Sequence
  derived and/or modified sequence
atggctgacaccaggtctgtgcatgagaccaggtttgaggccgctgtgaaggtgatccagagcctgcccaagaatggcagcttccagcccaccaatgagatgatgctgaagttctacagcttctacaagcaggccacagagggcccctgcaagctgagcaggcctggcttctgggaccccatcggccgctacaagtgggatgcctggagcagcctgggggacatgaccaaggaggaggccatgattgcctacgtggaggagatgaagaagatcatcgagaccatgcccatgacagagaaggtggaggagctgctgcgggtcatcggccccttctatgagatcgtggaggacaagaagagcggccgcagcagtgacatcaccagtgacctgggcaatgtgctgaccagcaccccaaatgccaagacagtgaatggcaaggccgagagcagtgacagcggggctgagagcgaggaggaggaggcccaggaggaggtgaagggagctgagcagagcgacaatgacaagaagatgatgaagaagtctgctgaccacaagaacctggaggtgattgtgaccaacggctatgacaaggatggctttgtgcaggacatccagaatgacatccacgccagcagcagcctgaatggccgcagcacagaggaggtgaagcccattgatgagaacctgggccagacaggcaagtctgctgtgtgcatccaccaggacatcaatgatgaccacgtggaggatgtgacaggcatccagcacctgaccagtgacagcgacagcgaggtgtactgtgacagcatggagcagtttggccaggaggagagcctggacagcttcaccagcaacaacggccccttccagtactacctgggcggccacagcagccagcccatggagaacagcggcttccgggaggacatccaggtgcccccaggaaatggaaatattggcaacatgcaggtggtggccgtggagggcaagggggaggtgaagcatggaggagaagatggaagaaacaacagcggggccccccaccgggagaagagaggaggagaaacagatgagttcagcaatgtgagaagaggccggggccacaggatgcagcacctgtctgagggcaccaagggccggcaggtgggcagcggaggagatggagagcgctggggcagtgaccggggcagccggggcagcctgaatgagcagatcgccctggtgctgatgaggctgcaggaggacatgcagaatgtgctgcagaggctgcagaagctggagaccctgacagccctgcaggccaagagcagcaccagcaccctgcagacagccccccagcccaccagccagaggcccagctggtggccctttgagatgagccctggggtgctgacctttgccatcatctggcccttcatcgcccagtggctggtgtacctgtactaccagaggagaagaaggaagctgaactag

SEQ ID NO: 96079 - DNA, 1473 bp, Artificial Sequence
  derived and/or modified sequence
atggccgacacccggagcgtgcacgagacccggttcgaggccgccgtgaaggtaattcagtcgcttccgaagaacgggtcttttcagcccacaaatgagatgatgttaaagttctatagcttttacaaacaggctaccgaaggaccgtgcaaactgtctcgtccaggcttctgggaccctatcggacggtataaatgggatgcatggtcttctctcggggacatgaccaaggaagaggccatgatagcttatgtagaggagatgaaaaagataattgaaaccatgcctatgacggaaaaagtggaggagttgctccgagtgatcggtccattctatgagatcgtggaggataagaaatcgggccgaagctccgatatcaccagcgatctgggtaacgtgctgaccagtaccccgaatgccaaaacggttaatgggaaagcagaatcttccgacagcggagccgagagtgaggaagaagaagcccaggaagaggtgaaaggagctgagcagtcagacaatgacaaaaagatgatgaaaaagtctgccgatcataagaaccttgaggtaatcgtgacgaacggttacgataaggatggctttgtgcaggatatccagaacgatatccacgcctcttcctcactgaacggcagatcaacggaggaggttaaacccattgatgaaaacctgggacagacaggaaaaagcgctgtttgcatacaccaggacataaacgacgatcacgtcgaggacgtgaccggcatccagcacctcacatccgattccgactctgaggtatactgcgattcaatggaacaattcgggcaagaagaatctctcgacagctttacttcaaataacgggccttttcaatactacttgggaggccactcgtctcagcctatggaaaattccggttttcgcgaggatatccaggtgcccccgggtaatggaaacatcggcaacatgcaagtggtcgcggtcgaaggcaaaggtgaagtaaagcacgggggggaggacggtaggaacaacagcggagctcctcacagggaaaagcgagggggcgaaaccgatgagttcagcaatgtccgccgggggcgtggacacagaatgcagcatctttccgagggtaccaaggggcgccaggtggggagcggcggtgacggtgagaggtggggcagcgatcgcgggtcacgcgggagtctgaatgagcaaatcgccctcgtcctcatgcgtcttcaggaggacatgcagaacgttctgcagcgcctccaaaaattggagacactgacagccctgcaggcaaagagttccactagcactctgcaaacagccccccagccgacgtcccaacggccgtcctggtggccatttgagatgtctcccggggtcctaaccttcgccataatctggcctttcatcgcccaatggctggtctacctttattaccagaggcgcagaaggaagctcaactag

SEQ ID NO: 96080 - DNA, 1473 bp, Artificial Sequence
  derived and/or modified sequence
atggccgatacgaggtctgttcacgagaccagatttgaggctgccgtgaaggtgattcagtcgttgcctaaaaatgggagctttcagcccacaaatgagatgatgcttaagttttactctttttacaagcaagctactgagggaccatgtaaactgagtagacccggtttttgggatcctatcgggcgttacaaatgggacgcctggtcctccctgggagacatgacaaaagaagaggccatgattgcatacgtggaggagatgaagaaaatcattgaaaccatgcccatgacagaaaaagtggaagagctactacgggtgataggccctttttatgagatcgtcgaggacaagaaatccggacgctcgagtgacatcacatccgacttgggaaacgtccttacctccacaccaaatgctaagacagtaaatggcaaggccgaatcgagcgatagcggcgctgaaagcgaagaagaggaagcccaggaggaggtcaagggggctgagcaaagtgacaatgacaagaaaatgatgaagaagagtgcggaccataaaaatttagaagtgatcgtgacgaatggttacgacaaggacggcttcgtccaggatatccagaacgacatccacgccagttcttctttgaacggcagaagcaccgaggaggttaagccgatcgacgagaacttgggacagacgggcaagtcagcggtttgtatccaccaggacataaatgacgaccatgtggaagatgtgaccggcatccagcacctaaccagcgattctgatagcgaggtctattgtgacagtatggagcagttcggccaggaagagagcctggacagtttcacttccaataacgggcctttccagtattacttaggtgggcacagttctcagccgatggaaaattcgggttttagggaagacatacaggtccccccaggcaacgggaacatcggtaatatgcaggttgtggccgtggaaggtaaaggggaagtaaaacatggcggtgaggatggaagaaataacagtggagctccccatagagaaaaacgcggtggtgagactgacgagttttcgaatgtgcgacggggtcgtggacaccggatgcagcacctgtccgagggaacaaaggggagacaagtcgggtctggcggtgatggagagcggtggggtagcgacagggggtcacggggaagtcttaatgaacagatagccctggtgctaatgaggttgcaggaggatatgcaaaatgtgctgcagcgcctgcaaaagctggaaacacttacagcactgcaagccaagagtagtacgtctaccttgcaaacagcccctcagcctacatcgcagcggccttcatggtggcccttcgagatgtctcctggcgtgctcactttcgctataatttggccatttatcgcccaatggctggtctatctatactaccaaagaaggcgtagaaagcttaattag

SEQ ID NO: 96081 - protein, 264 aa, Artificial Sequence
  derived and/or modified sequence
  misc_feature (1)..(1): Xaa can be any naturally occurring amino acid
XVISIKNYHPKIRIITQMLQYHNKAHLLNIPSWNWKEGDDAICLAELKLGFIAQSCLAQGLSTMLANLFSMRSFIKIEEDTWQKYYLEGVSNEMYTEYLSSAFVGLSFPTVCELCFVKLKLLMIAIEYKSANRESRILINPGNHLKIQEGTLGFFIASDAKEVKRAFFYCKACHDDITDPKRIKKCGCKRLAGSQDTHPDSFYHQAVNASSYLHGGGQMWPVSSSSSILLHYLRRQMPGPARLPLELSCQGSALSPNPDLYCMK

SEQ ID NO: 96082 - DNA, 744 bp, Artificial Sequence
  derived and/or modified sequence
atgctgttgattctcctgagcgtggccctgctggccttgagctccgccgagtccagcagcgaagacgtgtctcaggaggagtccttatttttgatctcaggaaagccagaaggtcgcagaccccaaggcggaaaccagcctcagagaccccctcctcctccgggaaagcctcaaggcccacccccacagggcggaaaccagtcgcagggccctccaccaccacctggcaaacccgagggcaggccaccacaggggggaaaccaaagccagggtccacctccacaccctggtaagccagaacgcccaccaccccaggggggaaaccaatcccaggggacacccccaccccctggaaaacctgagcgccctccccctcaaggcggtaatcaatctcacaggccacctcctcccccagggaaacccgaacgccctcccccacagggaggcaatcaaagccagggtccccctccacatccgggaaaaccagaaggccctccccctcaggagggaaataagagtcgctctgctaggtcacctcccggtaagccacaaggccctcctcagcaggagggcaacaaaccccagggtcctccacctccgggaaagcctcaggggccacctccagccggaggcaatcctcagcagccacaggctcccccagcaggaaaacctcaaggcccaccaccacccccacagggtgggagacctcctcgacccgcacaaggccagcagccacctcagtag

SEQ ID NO: 96083 - protein, 747 aa, Artificial Sequence
  derived and/or modified sequence
MGVWLNKDDYIRDLKRIILCFLIVYMAILVGTDQDFYSLLGVSKTASSREIRQAFKKLALKLHPDKNPNNPNAHGDFLKINRAYEVLKDEDLRKKYDKYGEKGLEDNQGGQYESWNYYRYDFGIYDDDPEIITLERREFDAAVNSGELWFVNFYSPGCSHCHDLAPTWRDFAKEVDGLLRIGAVNCGDDRMLCRMKGVNSYPSLFIFRSGMAPVKYHGDRSKESLVSFAMQHVRSTVTELWTGNFVNSIQTAFAAGIGWLITFCSKGGDCLTSQTRLRLSGMLFLNSLDAKEIYLEVIHNLPDFELLSANTLEDRLAHHRWLLFFHFGKNENSNDPELKKLKTLLKNDHIQVGRFDCSSAPDICSNLYVFQPSLAVFKGQGTKEYEIHHGKKILYDILAFAKESVNSHVTTLGPQNFPANDKEPWLVDFFAPWCPPCRALLPELRRASNLLYGQLKFGTLDCTVHEGLCNMYNIQAYPTTVVFNQSNIHEYEGHHSAEQILEFIEDLMNPSVVSLTPTTFNELVTQRKHNEVWMVDFYSPWCHPCQVLMPEWKRMARTLTGLINVGSIDCQQYHSFCAQENVQRYPEIRFFPPKSNKAYHYHSYNGWNRDAYSLRIWGLGFLPQVSTDLTPQTFSEKVLQGKNHWVIDFYAPWCGPCQNFAPEFELLARMIKGKVKAGKVDCQAYAQTCQKAGIRAYPTVKFYFYERAKRNFQEEQINTRDAKAIAALISEKLETLRNQGKRNKDHL

SEQ ID NO: 96084 - DNA, 2244 bp, Artificial Sequence
  derived and/or modified sequence
atgggggtgtggttaaacaaggatgattatatacgggacctgaagaggattattctctgttttcttatcgtttatatggcaatcctggtgggcacagatcaagatttttactctctgcttggggtcagtaaaacagccagcagtcgggagattaggcaggccttcaaaaaattagctctcaaattgcatccggacaagaatccaaataaccctaatgcccacggagactttttgaagattaacagggcatatgaggtcctcaaagatgaggatctgcgaaagaaatatgacaagtacggagagaagggcctcgaggataatcagggtggtcaatatgagagctggaactactatcgatacgacttcggaatctacgatgatgacccggagattattacccttgaaagacgggagttcgatgctgcagttaattcgggggaactatggttcgttaacttctattcaccaggatgcagccactgtcatgacctagctcccacctggagagacttcgccaaggaagttgatgggctactccgcatcggcgccgtcaactgtggggatgaccgtatgctttgccggatgaagggggtgaattcctatccctcactgttcatctttcggtctggcatggcacccgtcaagtatcatggagatagaagtaaagaaagcctggtgtctttcgccatgcaacacgtgaggtccaccgtcacagagctctggaccgggaacttcgtgaactccatccagaccgcatttgcggctggtattgggtggctcattacattttgctccaaagggggcgactgcctcaccagtcagaccagactgcggctgagcggtatgctgttcctcaacagtctcgatgctaaggagatctacctcgaagttatccataaccttccagattttgaactcctgagtgctaacactctggaggataggttggcacaccaccgctggctgctgttttttcatttcgggaagaacgagaactccaacgacccggaattaaagaaactaaaaacccttctgaaaaacgaccacattcaggtcgggcggttcgactgcagctcagctcctgatatttgctcgaacctgtatgtctttcagccctcgctggccgtgtttaagggacagggaactaaagagtatgagattcaccatggcaagaaaatactctacgacatccttgcgtttgccaaggagtcagtcaattctcatgtgacgactctcggtccgcagaacttcccagctaacgacaaagagccgtggctggtggacttcttcgctccctggtgcccgccgtgtcgggcgctcctcccagagctgcggcgagcttcaaatctgctgtatgggcagctgaaattcgggaccctggattgcacagtgcacgaagggctgtgcaatatgtataatatacaggcatatccaacaactgtcgtgttcaaccagtctaatatccacgagtatgaaggccatcatagcgcagagcaaattctcgagttcattgaggatctgatgaatcctagtgtggtgtcgctaacaccaacaaccttcaatgagcttgtgacgcaacgcaagcacaacgaggtctggatggtggatttttattccccttggtgccacccgtgtcaggtcttgatgccggagtggaaaagaatggctcggaccctcactggtttgattaacgtgggcagtatagactgtcagcagtaccatagtttctgtgctcaggagaatgtccagcggtaccctgaaataaggttttttcccccaaaatctaacaaggcataccactaccatagctacaacggctggaaccgcgacgcctattccctgagaatctggggccttggctttttgccacaagtgtctaccgatttaactcctcagactttctccgagaaagtcttgcagggaaagaatcactgggtgattgatttttatgctccctggtgtggtccgtgccagaattttgcacctgagttcgagctcctggcccggatgataaaggggaaggtcaaggcaggcaaggtcgactgtcaggcttacgcgcagacatgtcagaaagccggaattcgggcgtaccccactgtaaagttttatttctacgagcgcgcgaaacgtaacttccaggaagaacagattaacacacgtgacgccaaggccatcgcagccctgatcagcgagaaacttgaaacactccgaaatcaggggaagcggaacaaggatcatctgtag

SEQ ID NO: 96085 - DNA, 534 bp, Artificial Sequence
  derived and/or modified sequence
atgggagtctggcttaacaaggatgactatatccgagacctaaaacgcattattttatgtttccttatcgtgtatatggccattctggttggaactgaccaggacttctacagcctgctcggagtgagtaagaccgctagctcccgggagatacgccaggcctttaaaaagcttgccctgaagctgcacccagacaagaaccccaataatccaaatgcacatggcgattttctcaagatcaaccgagcttatgaagtactgaaggacgaagacctcagaaagaaatacgacaagtacggggagaaaggactcgaagacaaccaaggtggccagtatgaaagctggaattattatcgatacgactttgggatatacgacgacgaccccgaaatcattacactggagagacgtgaatttgacgccgccgtaaattctggagagctctggttcgttaacttttatagccccggctgttcgcattgtcatgacctggccccaacatggagagactttgccaaggaatcacttcggtag

SEQ ID NO: 96086 - DNA, 2244 bp, Artificial Sequence
  derived and/or modified sequence
atgggcgtgtggctgaacaaggatgactacatccgggacctgaagaggatcatcctgtgcttcctgattgtgtacatggccatcctggtgggcacagaccaggacttctacagcctgctgggcgtgtccaagacagccagcagccgggagatccggcaggccttcaagaagctggccctgaagctgcacccagacaagaaccccaacaaccccaatgcccacggggacttcctgaagatcaacagagcctatgaggtgctgaaggatgaggacctgaggaagaagtatgacaagtatggagagaagggcctggaggacaaccagggcggccagtatgagagctggaactactaccgctatgactttggcatctatgatgatgatcctgagatcatcaccctggagcggcgggagtttgatgctgctgtgaacagcggggagctgtggtttgtgaacttctacagccctggctgcagccactgccacgacctggcccccacctggagggactttgccaaggaggtggatggcctgctgagaattggagctgtgaactgtggagatgacaggatgctgtgcaggatgaagggcgtgaacagctaccccagcctcttcatcttccgcagcggcatggcccctgtgaagtaccatggagacaggagcaaggagagcctggtgtcctttgccatgcagcacgtgcgcagcacagtgacagagctgtggacaggcaactttgtgaacagcatccagacagcctttgctgctggcatcggctggctgatcaccttctgcagcaagggcggggactgcctgaccagccagacccggctgcggctgagcggcatgctgttcctgaacagcctggatgccaaggagatctacctggaggtgatccacaacctgcctgactttgagctgctgagcgccaacaccctggaggaccggctggcccaccaccgctggctgctcttcttccactttgggaagaatgaaaacagcaatgaccctgagctgaagaagctgaagaccctgctgaagaatgaccacatccaggtgggccgctttgactgcagcagcgccccagacatctgcagcaacctgtatgtgttccagcccagcctggccgtgttcaagggccagggcaccaaggagtatgagatccaccacggcaagaagatcctgtatgacatcctggcctttgccaaggagagcgtgaacagccacgtgaccaccctgggcccccagaacttccctgccaatgacaaggagccctggctggtggacttctttgccccctggtgccccccctgccgggccctgctgcctgagctgcggcgggccagcaacctgctgtatggccagctgaagtttggcaccctggactgcaccgtgcatgagggcctgtgcaacatgtacaacatccaggcctaccccaccaccgtggtgttcaaccagagcaacatccatgaatatgagggccaccacagcgctgagcagatcctggagttcatcgaggacctgatgaaccccagcgtggtgtccctgacccccaccaccttcaatgagctggtgacccagaggaagcacaatgaggtgtggatggtggacttctacagcccctggtgccacccctgccaggtgctgatgcctgagtggaagaggatggcccggaccctgaccggcctcatcaacgtgggcagcattgactgccagcagtaccacagcttctgtgcccaggagaatgtgcagcgctacccagagatccgcttcttcccccccaagagcaacaaggcctaccactaccacagctacaacggctggaacagagatgcctacagcctgcgcatctggggcctgggcttcctgccccaggtgtccacagacctgaccccccagaccttcagcgagaaggtgctgcagggcaagaaccactgggtgattgacttctacgccccctggtgtggcccctgccagaactttgcccctgagtttgagctgctggccaggatgatcaagggcaaggtgaaggccggcaaggtggactgccaggcctatgcccagacctgccagaaggccggcatccgggcctaccccaccgtgaagttctacttctatgagcgggccaagaggaacttccaggaggagcagatcaacaccagagatgccaaggccatcgccgccctgatcagcgagaagctggagaccctgaggaaccagggcaagaggaacaaggaccacctgtag

SEQ ID NO: 96087 - DNA, 534 bp, Artificial Sequence
  derived and/or modified sequence
atgggcgtgtggctgaacaaggatgactacatccgggacctgaagaggatcatcctgtgcttcctgattgtgtacatggccatcctggtgggcacagaccaggacttctacagcctgctgggcgtgtccaagacagccagcagccgggagatccggcaggccttcaagaagctggccctgaagctgcacccagacaagaaccccaacaaccccaatgcccacggggacttcctgaagatcaacagagcctatgaggtgctgaaggatgaggacctgaggaagaagtatgacaagtatggagagaagggcctggaggacaaccagggcggccagtatgagagctggaactactaccgctatgactttggcatctatgatgatgatcctgagatcatcaccctggagcggcgggagtttgatgctgctgtgaacagcggggagctgtggtttgtgaacttctacagccctggctgcagccactgccacgacctggcccccacctggagggactttgccaaggagagcctgaggtag

SEQ ID NO: 96088 - DNA, 2244 bp, Artificial Sequence
  derived and/or modified sequence
atgggcgtgtggctgaacaaggacgactacatccgggacctgaagcgtattattctctgctttttgatcgtttacatggccatcctcgtgggcacagatcaggatttctattcgctgctgggcgtgtccaaaaccgcatccagtagggaaattcgtcaagccttcaagaaactcgctttgaaactccaccccgacaaaaaccctaataaccctaacgcacacggagacttcctgaagatcaatcgggcatacgaagttctcaaagacgaagacctgcggaagaaatatgacaaatatggagagaagggcttggaggacaaccaaggcggtcagtacgagagttggaactattatcggtacgacttcgggatttatgatgatgaccccgaaatcataaccttagaacgacgagagttcgacgcggcagtgaattcaggcgagctgtggtttgtcaatttctattcaccgggttgctcccactgtcacgatctggcccccacatggcgggacttcgccaaggaggtcgacggcctcctgcggattggggcggtcaattgcggcgacgatcgtatgctctgcaggatgaagggcgtgaattcctatccttctctgttcatcttcaggagtggcatggcaccagtgaagtaccacggtgatcgcagtaaagagagcctggtgagtttcgcgatgcaacacgttcggtctacagtcaccgaattatggactggaaactttgtaaattcgatccaaacagccttcgccgctgggataggctggttgatcaccttttgctccaaagggggtgattgtctaacttcgcaaacaaggctccgtctctctgggatgcttttcctcaattcactggacgcgaaggagatctacctggaggttattcataatctgccggatttcgagctgctttcagctaatacattggaggatcgattggcacaccacagatggctgctctttttccatttcgggaaaaacgaaaattccaatgacccagagctgaagaagctgaagactcttcttaagaatgatcacatccaggttgggcggtttgattgttcgtcggcccctgatatctgctcgaacctatacgtatttcagcctagcctggctgtgttcaagggacaagggaccaaggaatatgaaatccatcacggaaaaaaaatcctgtatgacatcctcgcatttgccaaagagtccgtgaactcccacgtcactactttggggccccagaactttcccgctaacgacaaggaaccctggctggtggatttctttgccccttggtgcccaccttgccgagctctgctccccgaactgaggcgcgcatctaatctcctgtatggacaacttaagttcgggacactcgactgcaccgttcacgaaggtctctgcaacatgtacaacattcaagcataccctactaccgtggtgttcaatcagtctaatatccatgaatacgaaggtcaccactcagcagagcaaattttggagtttatagaggacctgatgaaccccagcgtcgtatccctgactccaacaaccttcaatgagcttgtgactcagcgaaagcataatgaggtgtggatggtagacttctacagcccctggtgtcacccgtgccaagtcctgatgccagagtggaagaggatggccagaacgctaaccggcttgatcaatgtcggtagcatcgactgccagcaataccactccttctgcgcccaagaaaatgtgcaacgctacccagaaataaggtttttcccaccaaagtctaacaaggcgtaccactaccacagctacaacggatggaaccgcgacgcttacagtctcagaatttggggcctcggtttcctgccacaggtttccaccgacctgacgcctcaaactttctccgaaaaggtcctgcagggaaaaaatcactgggtcattgatttttacgcaccttggtgtgggccatgtcagaattttgcacccgaattcgagctcctggcccgaatgatcaaaggcaaagtgaaggcaggaaaggtggattgtcaggcatacgctcaaacatgtcaaaaggccggaattagggcataccctacagtaaaattttatttttatgagcgcgcaaaacggaactttcaggaggagcaaattaacaccagggacgctaaagcaattgcagcattgatttccgaaaagctggaaaccctaagaaatcaggggaagaggaataaagatcacctctag

SEQ ID NO: 96089 - DNA, 534 bp, Artificial Sequence
  derived and/or modified sequence
atgggcgtgtggctgaacaaggacgactacatccgggacctgaagcgtattatcctgtgctttctcatcgtgtacatggccatacttgttgggaccgatcaagacttttacagcctactcggggtgagcaagacagcatcaagcagagaaatcaggcaggctttcaagaaacttgccctcaagttgcaccctgacaagaaccctaataaccccaacgcccatggtgactttctcaaaattaacagagcctacgaagtgcttaaagatgaggacctccgtaaaaagtacgataagtatggagaaaaggggctggaagacaatcagggcggacaatacgagtcttggaactattaccggtacgatttcggaatttatgacgacgaccccgagataatcactctggagaggcgtgagtttgatgctgcagtgaattctggggaactttggtttgtgaatttttattctcccggctgctcccactgtcacgacctcgcccctacatggagggactttgccaaagaaagtctccggtag

SEQ ID NO: 96090 - DNA, 2244 bp, Artificial Sequence
  derived and/or modified sequence
atgggagtctggctgaacaaagacgactatattagagaccttaagcgaatcatcttatgctttttgattgtatacatggcaatcctggtcgggaccgatcaggacttctattcactgctgggggtcagtaaaacggccagctcccgggagattaggcaggcttttaaaaagttggctttgaaacttcatccggataaaaatcctaacaatccaaacgctcacggggattttctgaagatcaatcgtgcctacgaagtgcttaaggatgaggatctgcggaagaagtacgacaaatacggagaaaagggactagaggacaatcagggaggccagtacgaaagctggaattattatagatatgacttcggcatttatgatgatgaccccgagataataacgctggaaaggcgagaattcgatgcggcagtgaattcaggcgaactgtggttcgtgaacttctactctccaggatgcagccattgccatgacctggcacctacctggagggacttcgcgaaggaagtggacggactgttgcgcataggggctgtgaattgtggagatgacagaatgctctgccggatgaaaggggttaatagttacccctctttatttatatttcgaagtgggatggcacctgtaaaatatcacggcgacaggtcaaaagaatccctggtgtcattcgcaatgcagcatgtgcgttccacagtgacagaattgtggacaggaaattttgttaactctattcagaccgcatttgcagctggtattggttggctgattactttttgtagtaaggggggagattgcctcacatcacagactcggctcagactgagcggaatgctatttcttaactctctggatgctaaggagatctatctggaggttatccacaacttgcccgacttcgagctcctttcagccaataccctcgaagaccgactcgcccatcatcgctggctgctgtttttccacttcggtaagaatgagaacagcaacgacccagaactgaaaaagcttaagacattactgaagaatgatcacattcaggttggaagatttgactgctccagcgcaccagacatatgttccaatttgtacgttttccagccttcactggccgttttcaagggccaggggacaaaggaatatgagattcatcatggaaaaaagattctctatgatattctggctttcgccaaagagtcggtgaatagtcacgtcaccaccttggggcctcagaattttcctgctaatgataaggagccttggctggtcgacttctttgccccatggtgccccccttgccgggctctcctgccagagctgagaagggcatcgaatctactctacgggcagctgaaattcgggacactggattgcacagtgcatgagggcctgtgtaacatgtacaacatccaagcctatccaaccacagtagtgtttaaccaatctaacatccatgagtacgagggtcatcactccgccgagcagatcttggagttcatagaggacctgatgaacccgagcgtggtctcactcacacccactactttcaacgaattggtcacgcagcgaaagcataacgaggtctggatggtcgacttctactcaccctggtgccacccatgccaagttctgatgcccgaatggaagcggatggcacggaccttgaccggactgatcaatgtgggtagcattgactgccaacagtaccactcattctgcgcacaggagaacgttcagcggtatcctgagattaggtttttcccccctaagagtaacaaggcataccactatcactcttacaatgggtggaaccgtgacgcctactccctcaggatctggggactcggctttctaccacaggtgagtaccgaccttactccgcagactttctctgaaaaggtgctccagggaaagaatcactgggttattgatttctacgccccttggtgcggtccgtgccagaactttgccccagaattcgagctgctcgcacggatgatcaagggaaaagttaaagctggtaaagtggactgtcaagcctatgctcaaacctgccagaaagccggaatcagggcctacccaaccgtgaagttttacttttacgagagggctaaaaggaatttccaggaggaacagataaacaccagagatgcaaaggctatcgccgcacttatatctgaaaaattggaaacacttcgtaaccaggggaaaaggaacaaggatcacttgtag

SEQ ID NO: 96091 - DNA, 534 bp, Artificial Sequence
  derived and/or modified sequence
atgggggtatggctgaacaaggatgattacatcagagatttgaaacggattattttatgttttttgatagtgtatatggccatcttggtcggcaccgaccaggatttttactccctgctcggggtcagtaagactgctagctctagggaaataagacaagctttcaaaaaactcgcactcaagctccaccccgacaaaaatcccaataatccgaatgcccatggagactttctgaagattaaccgcgcatatgaagtgctgaaggatgaagatcttcgtaagaaatacgataagtatggagagaaaggtctggaagacaaccagggaggacagtatgagagctggaattactacaggtatgacttcggtatatacgacgatgatccagaaattattactctggaaaggcgcgaatttgacgccgcagtgaactctggcgagttgtggtttgttaacttctatagccccggatgttcccattgtcacgatttagctcccacatggcgcgacttcgccaaagagtctctccggtag

SEQ ID NO: 96092 - DNA, 2244 bp, Artificial Sequence
  derived and/or modified sequence
atgggcgtgtggctgaacaaggacgactacatcagagacctgaagagaatcatcctgtgcttcctgatcgtgtacatggccatcctggtgggcaccgaccaggacttctacagcctgctgggcgtgagcaagaccgccagcagcagagagatcagacaggccttcaagaagctggccctgaagctgcaccccgacaagaaccccaacaaccccaacgcccacggcgacttcctgaagatcaacagagcctacgaggtgctgaaggacgaggacctgagaaagaagtacgacaagtacggcgagaagggcctggaggacaaccagggcggccagtacgagagctggaactactacagatacgacttcggcatctacgacgacgaccccgagatcatcaccctggagagaagagagttcgacgccgccgtgaacagcggcgagctgtggttcgtgaacttctacagccccggctgcagccactgccacgacctggcccccacctggagagacttcgccaaggaggtggacggcctgctgagaatcggcgccgtgaactgcggcgacgacagaatgctgtgcagaatgaagggcgtgaacagctaccccagcctgttcatcttcagaagcggcatggcccccgtgaagtaccacggcgacagaagcaaggagagcctggtgagcttcgccatgcagcacgtgagaagcaccgtgaccgagctgtggaccggcaacttcgtgaacagcatccagaccgccttcgccgccggcatcggctggctgatcaccttctgcagcaagggcggcgactgcctgaccagccagaccagactgagactgagcggcatgctgttcctgaacagcctggacgccaaggagatctacctggaggtgatccacaacctgcccgacttcgagctgctgagcgccaacaccctggaggacagactggcccaccacagatggctgctgttcttccacttcggcaagaacgagaacagcaacgaccccgagctgaagaagctgaagaccctgctgaagaacgaccacatccaggtgggcagattcgactgcagcagcgcccccgacatctgcagcaacctgtacgtgttccagcccagcctggccgtgttcaagggccagggcaccaaggagtacgagatccaccacggcaagaagatcctgtacgacatcctggccttcgccaaggagagcgtgaacagccacgtgaccaccctgggcccccagaacttccccgccaacgacaaggagccctggctggtggacttcttcgccccctggtgccccccctgcagagccctgctgcccgagctgagaagagccagcaacctgctgtacggccagctgaagttcggcaccctggactgcaccgtgcacgagggcctgtgcaacatgtacaacatccaggcctaccccaccaccgtggtgttcaaccagagcaacatccacgagtacgagggccaccacagcgccgagcagatcctggagttcatcgaggacctgatgaaccccagcgtggtgagcctgacccccaccaccttcaacgagctggtgacccagagaaagcacaacgaggtgtggatggtggacttctacagcccctggtgccacccctgccaggtgctgatgcccgagtggaagagaatggccagaaccctgaccggcctgatcaacgtgggcagcatcgactgccagcagtaccacagcttctgcgcccaggagaacgtgcagagataccccgagatcagattcttcccccccaagagcaacaaggcctaccactaccacagctacaacggctggaacagagacgcctacagcctgagaatctggggcctgggcttcctgccccaggtgagcaccgacctgaccccccagaccttcagcgagaaggtgctgcagggcaagaaccactgggtgatcgacttctacgccccctggtgcggcccctgccagaacttcgcccccgagttcgagctgctggccagaatgatcaagggcaaggtgaaggccggcaaggtggactgccaggcctacgcccagacctgccagaaggccggcatcagagcctaccccaccgtgaagttctacttctacgagagagccaagagaaacttccaggaggagcagatcaacaccagagacgccaaggccatcgccgccctgatcagcgagaagctggagaccctgagaaaccagggcaagagaaacaaggaccacctgtag

SEQ ID NO: 96093 - DNA, 534 bp, Artificial Sequence
  derived and/or modified sequence
atgggcgtgtggctgaacaaggacgactacatcagagacctgaagagaatcatcctgtgcttcctgatcgtgtacatggccatcctggtgggcaccgaccaggacttctacagcctgctgggcgtgagcaagaccgccagcagcagagagatcagacaggccttcaagaagctggccctgaagctgcaccccgacaagaaccccaacaaccccaacgcccacggcgacttcctgaagatcaacagagcctacgaggtgctgaaggacgaggacctgagaaagaagtacgacaagtacggcgagaagggcctggaggacaaccagggcggccagtacgagagctggaactactacagatacgacttcggcatctacgacgacgaccccgagatcatcaccctggagagaagagagttcgacgccgccgtgaacagcggcgagctgtggttcgtgaacttctacagccccggctgcagccactgccacgacctggcccccacctggagagacttcgccaaggagagcctgagatag

SEQ ID NO: 96094 - DNA, 2644 bp, Artificial Sequence
  derived and/or modified sequence
gaggaacctaccggtaccggccgcgcgctggtagtcgccggtgtggctgcacctcaccaatcccgtgcgccgcggctgggccgtcggagagtgcgtgtgcttctctcctgcacgcggtgcttgggctcggccaggcggggtccgccgccagggtttgaggatgggggagtagctacaggaagcgaccccgcgatggcaaggtatatttttgtggaatgaaaaggaagtattagaaatgagctgaagaccattcacagattaatatttttggggacagatttgtgatgcttgattcacccttgaagtaatgtagacagaagttctcaaatttgcatattacatcaactggaaccagcagtgaatcttaatgttcacttaaatcagaacttgcataagaaagagaatgggagtctggttaaataaagatgactatatcagagacttgaaaaggatcattctctgttttctgatagtgtatatggccattttagtgggcacagatcaggatttttacagtttacttggagtgtccaaaactgcaagcagtagagaaataagacaagctttcaagaaattggcattgaagttacatcctgataaaaacccgaataacccaaatgcacatggcgattttttaaaaataaatagagcatatgaagtactcaaagatgaagatctacggaaaaagtatgacaaatatggagaaaagggacttgaggataatcaaggtggccagtatgaaagctggaactattatcgttatgattttggtatttatgatgatgatcctgaaatcataacattggaaagaagagaatttgatgctgctgttaattctggagaactgtggtttgtaaatttttactccccaggctgttcacactgccatgatttagctcccacatggagagactttgctaaagaagtggatgggttacttcgaattggagctgttaactgtggtgatgatagaatgctttgccgaatgaaaggagtcaacagctatcccagcctcttcatttttcggtctggaatggccccagtgaaatatcatggagacagatcaaaggagagtttagtgagttttgcaatgcagcatgttagaagtacagtgacagaactttggacaggaaattttgtcaactccatacaaactgcttttgctgctggtattggctggctgatcactttttgttcaaaaggaggagattgtttgacttcacagacacgactcaggcttagtggcatgttgtttctcaactcattggatgctaaagaaatatatttggaagtaatacataatcttccagattttgaactactttcggcaaacacactagaggatcgtttggctcatcatcggtggctgttattttttcattttggaaaaaatgaaaattcaaatgatcctgagctgaaaaaactaaaaactctacttaaaaatgatcatattcaagttggcaggtttgactgttcctctgcaccagacatctgtagtaatctgtatgtttttcagccgtctctagcagtatttaaaggacaaggaaccaaagaatatgaaattcatcatggaaagaagattctatatgatatacttgcctttgccaaagaaagtgtgaattctcatgttaccacgcttggacctcaaaattttcctgccaatgacaaagaaccatggcttgttgatttctttgccccctggtgtccaccatgtcgagctttactaccagagttacgaagagcatcaaatcttctttatggtcagcttaagtttggtacactagattgtacagttcatgagggactctgtaacatgtataacattcaggcttatccaacaacagtggtattcaaccagtccaacattcatgagtatgaaggacatcactctgctgaacaaatcttggagttcatagaggatcttatgaatccttcagtggtctcccttacacccaccaccttcaacgaactagttacacaaagaaaacacaacgaagtctggatggttgatttctattctccgtggtgtcatccttgccaagtcttaatgccagaatggaaaagaatggcccggacattaactggactgatcaacgtgggcagtatagattgccaacagtatcattctttttgtgcccaggaaaacgttcaaagataccctgagataagattttttcccccaaaatcaaataaagcttatcattatcacagttacaatggttggaatagggatgcttattccctgagaatctggggtctaggatttttacctcaagtatccacagatctaacacctcagactttcagtgaaaaagttctacaagggaaaaatcattgggtgattgatttctatgctccttggtgtggaccttgccagaattttgctccagaatttgagctcttggctaggatgattaaaggaaaagtgaaagctggaaaagtagactgtcaggcttatgctcagacatgccagaaagctgggatcagggcctatccaactgttaaattttatttctacgaaagagcaaagagaaattttcaagaagagcagataaataccagagatgcaaaagcaatcgctgccttaataagtgaaaaattggaaactctccgaaatcaaggcaagaggaataaggatcactta

SEQ ID NO: 96095 - DNA, 934 bp, Artificial Sequence
  derived and/or modified sequence
gaggaacctaccggtaccggccgcgcgctggtagtcgccggtgtggctgcacctcaccaatcccgtgcgccgcggctgggccgtcggagagtgcgtgtgcttctctcctgcacgcggtgcttgggctcggccaggcggggtccgccgccagggtttgaggatgggggagtagctacaggaagcgaccccgcgatggcaaggtatatttttgtggaatgaaaaggaagtattagaaatgagctgaagaccattcacagattaatatttttggggacagatttgtgatgcttgattcacccttgaagtaatgtagacagaagttctcaaatttgcatattacatcaactggaaccagcagtgaatcttaatgttcacttaaatcagaacttgcataagaaagagaatgggagtctggttaaataaagatgactatatcagagacttgaaaaggatcattctctgttttctgatagtgtatatggccattttagtgggcacagatcaggatttttacagtttacttggagtgtccaaaactgcaagcagtagagaaataagacaagctttcaagaaattggcattgaagttacatcctgataaaaacccgaataacccaaatgcacatggcgattttttaaaaataaatagagcatatgaagtactcaaagatgaagatctacggaaaaagtatgacaaatatggagaaaagggacttgaggataatcaaggtggccagtatgaaagctggaactattatcgttatgattttggtatttatgatgatgatcctgaaatcataacattggaaagaagagaatttgatgctgctgttaattctggagaactgtggtttgtaaatttttactccccaggctgttcacactgccatgatttagctcccacatggagagactttgctaaagaaagcttaagg

SEQ ID NO: 96096 - protein, 400 aa, Artificial Sequence
  derived and/or modified sequence
MSALEKSMHLGRLPSRPPLPGSGGSQSGAKMRMGPGRKRDFSPVPWSQYFESMEDVEVENETGKDTFRVYKSGSEGPVLLLLHGGGHSALSWAVFTAAIISRVQCRIVALDLRSHGETKVKNPEDLSAETMAKDVGNVVEAMYGDLPPPIMLIGHSMGGAIAVHTASSNLVPSLLGLCMIDVVEGTAMDALNSMQNFLRGRPKTFKSLENAIEWSVKSGQIRNLESARVSMVGQVKQCEGITSPEGSKSIVEGIIEEEEEDEEGSESISKRKKEDDMEGLPSETQNLLLFLQTKKDHPYTWRIELAKTEKYWDGWFRGLSNLFLSCPIPKLLLLAGVDRLDKDLTIGQMQGKFQMQVLPQCGHAVHEDAPDKVAEAVATFLIRHRFAEPIGGFQCVFPGC

SEQ ID NO: 96097 - DNA, 1203 bp, Artificial Sequence
  derived and/or modified sequence
atgtctgcgctagaaaagtcaatgcacctgggacgtcttccttcccgcccccccctccctggtagcggaggctcccagagcggcgcaaaaatgcgcatgggcccgggccggaagcgggatttctcccctgtaccctggagtcagtatttcgaatccatggaagacgttgaagtggaaaacgagacagggaaggatacattcagagtctataagagtggtagcgaaggaccggtacttctcttgctgcacggcggtggtcattccgcactgagttgggcagtttttactgccgccattatatccagggttcagtgccggatcgtcgctctggatttgaggtctcacggcgagacaaaggtgaaaaatccggaggacctgagcgctgagacgatggcaaaggatgtgggtaacgtcgtggaggcaatgtatggtgacctgccaccacccatcatgctgataggtcactccatgggaggggccattgctgttcacacggctagcagtaatttagtcccctcactgctgggcctgtgcatgatcgacgtggtggagggaactgcaatggacgctttgaattcaatgcagaactttctgcgcggacggcccaaaacgttcaaatccctcgagaacgccatcgaatggagcgtgaaatctggtcagattcggaacctcgaatcagcccgggtcagcatggttggtcaagtaaagcagtgcgagggaataactagccctgaaggctctaaaagtatagtggagggtattatagaagaggaagaagaggatgaggagggctccgaatcgatcagtaagaggaaaaaagaagatgatatggaggggctgccttccgaaacccagaacctgttactcttcctccaaaccaaaaaagatcacccttacacctggcgcatcgaactagccaagactgagaagtactgggacggctggtttcgggggcttagcaacctgtttttgagttgtcccattcccaaactgctgctgttagcgggtgtcgataggttggataaagaccttactataggccagatgcaagggaagtttcagatgcaagtgctgccccaatgcggacacgccgtgcacgaggacgcaccagacaaagttgcggaggcggtggctacctttctgatcagacacagatttgctgagcctatcggcggcttccagtgtgtattcccaggctgctag

SEQ ID NO: 96098 - DNA, 1203 bp, Artificial Sequence
  derived and/or modified sequence
atgtctgccctggagaagtccatgcacctgggccgcctgcccagcaggcctcccctgcccggcagcggcggcagccagagcggggccaagatgaggatgggccctggcaggaagagggacttcagccctgtgccctggagccagtactttgagagcatggaggatgtggaggtggagaatgagaccgggaaggacaccttccgggtgtacaagagcggcagcgagggccctgtgctgctgctgctgcatggaggcggccacagcgccctgtcctgggccgtgttcaccgctgccatcatcagccgggtgcagtgcagaattgtggccctggacctgcggagccatggagagaccaaggtgaagaaccctgaggacctgtctgctgagaccatggccaaggatgtgggcaatgtggtggaggccatgtatggagacctgcccccacccatcatgctgattggccacagcatgggcggggccatcgctgtgcacacagccagcagcaacctggtgcccagcctgctgggcctgtgcatgattgatgtggtggagggcacagccatggatgccctgaacagcatgcagaacttcctgcggggccggcccaagaccttcaagagcctggagaatgccatcgagtggagcgtgaagagcggccagatccggaacctggagagcgcccgggtgtccatggtgggccaggtgaagcagtgtgagggcatcaccagccctgagggcagcaagagcatcgtggagggcatcatcgaggaggaggaggaggatgaggagggcagcgagagcatcagcaagaggaagaaggaggatgacatggagggcctgcccagcgagacccagaacctgctgctcttcctgcagaccaagaaggaccacccctacacctggagaattgagctggccaagacagagaagtactgggatggctggttccggggcctgagcaacctcttcctgagctgccccatccccaagctgctgctgctggccggcgtggaccggctggacaaggacctgaccatcggccagatgcagggcaagttccagatgcaggtgctgccccagtgtggccatgctgtgcatgaagatgccccagacaaggtggccgaggccgtggccaccttcctgatccgccacagatttgctgagcccatcggcggcttccagtgtgtgtttcctggctgctag

SEQ ID NO: 96099 - DNA, 1203 bp, Artificial Sequence
  derived and/or modified sequence
atgagcgccctggagaagagcatgcacctgggccggctgcccagccgccctcccctccctggctcaggcggatctcaatctggggctaaaatgaggatggggcccggccgcaaacgcgacttctcccctgtcccctggtcacagtatttcgagtccatggaggacgtggaagtggagaacgaaactggcaaagatactttccgggtgtacaaaagtggttctgagggaccggtcctacttctccttcacgggggtgggcacagcgccctgtcttgggctgttttcactgccgctatcatctctcgcgttcagtgtcgcattgtggcattagacctgagatctcatggcgagactaaagtaaaaaatccagaagatttgtcagctgagacaatggcaaaggacgtgggcaacgtggtggaggcgatgtacggcgatcttccccctccaataatgctgataggacactcaatggggggtgccattgcagtgcacaccgcctcctctaacttggttcctagccttttaggtctatgcatgattgacgtggtagaaggcacggcaatggatgcacttaatagcatgcaaaatttcttgcgtggcagacccaagacattcaagagcctggaaaatgcaattgagtggtccgtaaaaagcggccagatccggaacctggaatcggcacgagtatctatggtcgggcaagtgaaacagtgcgagggcattacaagccctgaagggagcaaatctattgtagaaggtattatcgaggaggaggaagaggatgaggaaggttctgaaagcatctctaagaggaagaaagaggacgacatggaaggccttcccagtgagacacagaatcttttgctttttctgcagaccaagaaggatcacccctacacatggagaatagagttggcgaaaactgagaagtattgggacggatggttccggggcctgagtaatttatttctaagctgccctataccgaaactgttgctgctggcaggcgtggaccgcctggacaaagatctgaccattggccagatgcaaggtaaattccaaatgcaggttctgcctcagtgtggccacgccgtgcacgaagacgccccagacaaggtggccgaagcggtggctacttttctcatacggcaccgatttgccgagccaataggtggctttcagtgcgtgtttcccgggtgttag

SEQ ID NO: 96100 - DNA, 1203 bp, Artificial Sequence
  derived and/or modified sequence
atgagcgccttagagaagtcgatgcacctgggacggttgccgtctagaccaccgttaccgggtagtggcggaagccagtctggcgctaagatgagaatggggcctgggcgaaagcgggacttttctcccgtgccatggtcgcagtatttcgagtccatggaggacgtcgaagtggagaatgagacagggaaggacactttccgcgtttacaagtcaggctcagaagggccagtgctcctattgttgcatggtggaggccatagtgccctttcatgggcagtatttaccgccgcaatcattagtagggtgcagtgccgcatagttgccctcgacctccggtcccacggcgaaactaaagttaagaatccggaggatctgagcgctgaaaccatggccaaagatgttggcaacgtcgtggaggcaatgtacggggacctgccgccacctattatgctgataggacattcaatgggcggagcgattgccgttcataccgcgagcagtaatcttgttccatcactactgggactctgtatgattgatgtggtggagggcactgccatggacgcactgaacagtatgcagaattttctccgagggagacccaagacatttaagagcttagaaaacgccattgagtggagcgtcaagtccggccagataaggaacctcgaatccgctagggtgtcaatggttgggcaagtgaaacagtgtgaggggatcacctccccggagggtagtaaatccatagtcgagggtatcattgaggaggaggaagaggatgaggaagggagtgaatcgatctcgaagcggaagaaggaggacgacatggaaggcttaccctctgagacacagaatttactgctcttcctacagacaaaaaaggaccacccctatacttggcgtattgagctagcaaagactgagaaatactgggatggatggttccgcggactctctaacctgtttttgtcatgcccaatccctaaactgcttctgctggccggagttgataggctcgataaggatctcactatagggcaaatgcagggcaagttccaaatgcaggtgctgccacagtgcggccacgccgtgcatgaggacgctcctgacaaggttgctgaagctgtggccacctttttgatcaggcatcgattcgccgagcctataggtggtttccagtgcgtgtttcccggatgttag

SEQ ID NO: 96101 - DNA, 2496 bp, Artificial Sequence
  derived and/or modified sequence
agggcgtcgttaggggagcgagtcgtgaccggttgggccacactcaacgtgggacgaagcttcgcctactgtttgactacgtgcgtgcagcctcccctcgatgtcggccctcgaaaagagcatgcacctcggccgccttccctctcgcccacctctacccggcagcgggggcagtcagagcggagccaagatgcgaatgggccctggaagaaagcgggacttttcccctgttccttggagtcagtattttgagtccatggaagatgtagaagtagagaatgaaactggcaaggatacttttcgagtctacaagagtggttcagagggtccagtcctgctccttctgcatggaggaggtcattctgccctttcttgggctgtgttcacggcagcgattattagtagagttcagtgtaggattgtagctttggatctgcgaagtcatggtgaaacaaaggtcaagaatcctgaagatctgtctgcagaaacaatggcaaaagacgttggcaatgtggttgaagccatgtatggggaccttcctcctccaattatgctgattggacatagcatgggtggtgctattgcagtccacacagcatcatccaacctggtaccaagcctcttgggtctgtgcatgattgatgttgtagaaggtacagctatggatgcacttaatagcatgcagaatttcttacggggtcgtcctaaaaccttcaagtctctggagaatgctattgaatggagtgtgaagagtggccagattcgaaatctggagtctgcccgtgtctcaatggttggccaagtcaaacagtgtgaaggaattacaagtccagaaggctcaaaatctatagtggaaggaatcatagaggaagaagaagaagatgaggaaggaagtgagtctataagcaagaggaaaaaggaagatgacatggaggggttgccctcggagactcagaacttgctcttattcctccagaccaagaaagaccatccatacacctggagaattgaactggcaaaaacagaaaaatactgggacggctggttccgaggcttatccaatctctttcttagttgtcccattcctaaattgctgctcttggctggtgttgatagattggataaagatctgaccattggccagatgcaagggaagttccagatgcaggtcctaccccagtgtggccatgcagtccatgaggatgcccctgacaaggtagctgaagctgttgccactttcctgatccggcacaggtttgcagaacccatcggtggattccagtgtgtgtttcctggctgttagtgacctgctgtccacccctcctcaacatcgagctctgttgtaaatacgtcgcaccagaggccactgtgatgccactgtctcctctccatcccgcccagccatgtgacactggctcccggtagacgggcaccccgagatgtaccaaccttttcatgtattctgccaaaagcattgttttccagggcccttgaccaacatcggcttccccagtccagggctcccctgctcctttcccttccctgtactggggtagctcctgcctgctctccctgcgttgcctagggtaaagcctccagatttgccatactgagcccctcttcctagcatcaggcgatacatctgagttcaaatgtcttcccaggctcagggacctccattccttgagattgtcttggcatggcccagccctgcctcatgggatggacaatgcatggggtggtctttatttttccctttcaaataaaacactagtcaggtaccgttttatcccagtcgtactcttccaggtttggaagacccagagaggccaagatcccatccttagccatagcgagcggtggtggtggatagcatcacaagaaacgagcctgaaaatcaggtccagccggtccaagcacatggcctcccatctgggagagcccactgtcccactcccacatgtctgggcacctgccctgggctgaggccaggctgctccaggggcctcctgcgccctcacctgccacagagcaacccaggttaaatacagcccatgcacaaagccacaggccaaagcctatggaattgtttttaatcatcaaatttaaccattttcataactggttcctggaggtgtgcagtgcccccttgcctcttcaaacctacagcttctctttgccatttgtggatttcacatcactccacacagaaacattacagcctggcatccccagtctttgccttcttccagctgcctcgacacagcactgtggcctgtccctattgcccaggcacgccatttccaagggcaggaaggggcagtgtcctgaagcccatcttttctgtgactgtcttaggtgatgtgtagccccctccacctttccactcaacaacctcccacccctgtcctgctgcatggtccggagtctgggacctactttgttttttgttatttatgaccttgtttaaagaaaataaatatctcccaaccttta

SEQ ID NO: 96102 - DNA, 1203 bp, Artificial Sequence
  derived and/or modified sequence
atgagcgccctggagaagagcatgcacctgggcagactgcccagcagaccccccctgcccggcagcggcggcagccagagcggcgccaagatgagaatgggccccggcagaaagagagacttcagccccgtgccctggagccagtacttcgagagcatggaggacgtggaggtggagaacgagaccggcaaggacaccttcagagtgtacaagagcggcagcgagggccccgtgctgctgctgctgcacggcggcggccacagcgccctgagctgggccgtgttcaccgccgccatcatcagcagagtgcagtgcagaatcgtggccctggacctgagaagccacggcgagaccaaggtgaagaaccccgaggacctgagcgccgagaccatggccaaggacgtgggcaacgtggtggaggccatgtacggcgacctgcccccccccatcatgctgatcggccacagcatgggcggcgccatcgccgtgcacaccgccagcagcaacctggtgcccagcctgctgggcctgtgcatgatcgacgtggtggagggcaccgccatggacgccctgaacagcatgcagaacttcctgagaggcagacccaagaccttcaagagcctggagaacgccatcgagtggagcgtgaagagcggccagatcagaaacctggagagcgccagagtgagcatggtgggccaggtgaagcagtgcgagggcatcaccagccccgagggcagcaagagcatcgtggagggcatcatcgaggaggaggaggaggacgaggagggcagcgagagcatcagcaagagaaagaaggaggacgacatggagggcctgcccagcgagacccagaacctgctgctgttcctgcagaccaagaaggaccacccctacacctggagaatcgagctggccaagaccgagaagtactgggacggctggttcagaggcctgagcaacctgttcctgagctgccccatccccaagctgctgctgctggccggcgtggacagactggacaaggacctgaccatcggccagatgcagggcaagttccagatgcaggtgctgccccagtgcggccacgccgtgcacgaggacgcccccgacaaggtggccgaggccgtggccaccttcctgatcagacacagattcgccgagcccatcggcggcttccagtgcgtgttccccggctgctag

SEQ ID NO: 96103 - protein, 353 aa, Artificial Sequence
  derived and/or modified sequence
MSLHTQYLESFLRSQFYMLRMDGPLPLPYRHYIAIMKLVKTGENNWSLPELVHAVVLLAHYHALASFVFGSGINPERDPEISNGFRLISVNNFCVCDLANDNNIENASLSGSNFGIVDSLSELEALMERMKRLQEEREDEEASQEEMSTRFEKEKKESLFVVSGDTFHSFPHSDFEDDMIITSDVSRYIEDPGFGYEDFARRGEEHLPTFRAQDYTWENHGFSLVNRLYSDIGHLLDEKFRMVYNLTYNTMATHEDVDTTMLRRALFNYVHCMFGIRYDDYDYGEVNQLLERSLKVYIKTVTCYPERTTKRMYDSYWRQFKHSEKVHVNLLLMEARMQAELLYALRAITRHLT

SEQ ID NO: 96104 - DNA, 1062 bp, Artificial Sequence
  derived and/or modified sequence
atgagcctgcatacccagtacctggagtctttcctcaggtcccagttctacatgctccgaatggatggcccattgccgttgccttatcgacattacattgctattatgaaactggtgaaaaccggagagaacaactggagcttaccggagttagtgcacgccgtggtgctccttgcgcactaccacgcgcttgcaagctttgtatttgggtcaggcatcaatcccgagagagacccagagatcagtaacgggtttaggctgatctccgtcaataatttctgcgtatgcgacctggcaaacgacaataatatcgaaaatgcatcattgtccgggagtaactttgggatcgtggatagcttaagcgaactggaagccctgatggagaggatgaagaggttgcaggaggagcgagaggacgaggaggcctcacaagaggagatgagcacccgcttcgaaaaagaaaaaaaagaatcactctttgtcgtaagtggggacacgttccacagttttccgcactcggactttgaagacgatatgatcatcaccagtgacgtctctcgttatatcgaggatcctggttttggctatgaagactttgccaggcgaggagaggaacacttgcctacattccgcgcgcaggattacacctgggagaatcacgggttttctttggtcaaccgcctgtattccgacatcggacacctgctggatgaaaagtttcggatggtgtataacttgacttataataccatggccacgcacgaggacgtcgatactacaatgctgaggcgtgctctgttcaattatgtgcactgcatgtttggcattcgttacgatgactacgactacggcgaggtaaaccagctattagaacgcagcctgaaggtgtacattaagactgtaacgtgttatcctgagagaactacaaagcgcatgtacgactcatattggaggcaattcaaacattctgagaaggtccatgtgaacctgcttcttatggaggcccgtatgcaggctgagctcttgtatgcgcttcgagccataacacgacacctcacatag

SEQ ID NO: 96105 - DNA, 1062 bp, Artificial Sequence
  derived and/or modified sequence
atgagcctgcacacccagtacctggagagcttcctgcggagccagttctacatgctgaggatggatggccccctgcccctgccctaccgccactacatcgccatcatgaagctggtgaagacaggagagaacaactggagcctgcctgagctggtgcatgctgtggtgctgctggcccactaccacgccctggccagctttgtgtttggaagtggcatcaaccctgagcgggaccctgagatcagcaatggcttccgcctcatctctgtgaacaacttctgtgtgtgtgacctggccaatgacaacaacattgaaaatgccagcctgagcggcagcaactttggcatcgtggacagcctgtctgagctggaggccctgatggagaggatgaagaggctgcaggaggagcgggaggatgaggaggccagccaggaggagatgagcaccaggtttgagaaggagaagaaggagagcctgtttgtggtgtctggggacaccttccacagcttcccccacagcgactttgaagatgacatgatcatcaccagtgatgtgagccgctacatcgaggaccccggcttcggctatgaagattttgccaggagaggagaggagcacctgcccaccttccgggcccaggactacacctgggagaaccacggcttcagcctggtgaaccggctgtacagcgacatcggccacctgctggatgagaagttcaggatggtgtacaacctgacctacaacaccatggccacccatgaagatgtggacaccaccatgctgcggcgggccctcttcaactacgtgcactgcatgtttggcatccgctatgatgattatgactatggagaggtgaaccagctgctggagaggagcctgaaggtgtacatcaagacagtgacctgctacccagagaggaccaccaagaggatgtatgacagctactggaggcagttcaagcacagcgagaaggtgcacgtgaacctgctgctgatggaggccaggatgcaggccgagctgctgtatgccctgcgggccatcaccaggcacctgacctag

SEQ ID NO: 96106 - DNA, 1062 bp, Artificial Sequence
  derived and/or modified sequence
atgagcctgcacacccagtacctggagagcttcctgcggagccagttctacatgctgcgcatggatggacccctccccctgccataccggcactacatagctatcatgaagctggtgaagacaggcgaaaataactggagtctgccagaattggtccatgcagtggttctgctggcccactaccatgccctggcctcattcgtttttggatcaggaattaaccccgaaagagaccccgagatttccaacggctttcggctaattagcgttaacaacttttgtgtctgtgacctggccaacgacaataatattgagaatgcctcactctcaggttctaactttgggatcgtagattccctgagcgagttggaggcactgatggaaagaatgaagagactgcaggaagaacgcgaagatgaggaggcaagccaggaggaaatgtcgacccggtttgagaaagagaagaaggagtctctgttcgtggtgtctggagacacattccactctttccctcatagtgatttcgaagacgacatgatcatcacctccgacgtttctcgctatatcgaagatcccggctttggttacgaggattttgctagacgaggagaagaacacttgccgacttttcgtgctcaggactatacatgggaaaatcatggtttttctctcgtgaaccgattgtattcggatatagggcacttgctggatgagaagttccggatggtctacaacctcacatataacaccatggcaactcacgaagacgtggataccactatgctgaggcgagcactttttaattacgtgcactgtatgttcgggatccgatacgacgactacgactatggagaagtgaaccaattgctagaacggtctctgaaagtgtacatcaagacagtaacctgttacccagagcgcactaccaaacggatgtatgactcatactggagacagttcaagcatagcgaaaaggtccacgtgaatctgttgctgatggaggcaagaatgcaagctgaattactctacgcgctgagggctatcaccaggcacttaacttag

SEQ ID NO: 96107 - DNA, 1710 bp, Artificial Sequence
  derived and/or modified sequence
aaacaggtgatgtcataatgcacagtcctgtggccacggccatggccgggtggggagctgggctccagtgagcacagagctccttgccagtaggcgatgcaagttatctctggggcccggaggacacgagtgaggaccgggcaccaatcaggttctcgctctgcgccggcctttgttctcactcgggagcaggttgcgggcgtctagcatcgggaacccgcattcgactcggacgcgcattgctagccccttcgggagacctggctcccctacccgtctgtcccgccacactcggtcagcctgcgctttccccagtcaagtctgccttctctccgcagaacgtggacgctaaaaccctgacttaccattttaagctttagaagaggataaaagaatcagagtgtctcaacccttgacaagaggaccaagtgcctttattccagagaaggaagttgtccaagcaaacacagtggatgaacgtactaactttcttgtggaagaatactctacatccggtcgtctggacaacatcacacaggtcatgagtttacacactcagtacctggagtctttcttgcggagccagttttacatgttgcgcatggatggtccccttcctctaccatacaggcactatattgcaataatgaaacttgtcaaaactggagaaaataattggtctctgcctgaactggtacatgctgtggtcctcctggcacattatcatgctttggcaagctttgtttttggtagtggtatcaatccagagagagatccagaaatctccaatggattcaggctaatatcagtcaacaatttctgcgtttgtgatcttgctaatgacaacaacatagagaatgcatctctttcaggcagcaactttgggattgtggattctctaagtgagctagaggccttaatggaaaggatgaaaagacttcaagaagaaagggaagatgaagaggcgtctcaagaagaaatgagcactcgttttgaaaaggagaagaaagaaagtctttttgtggtctctggagatacttttcattcatttcctcattcagattttgaggatgacatgattataacatctgatgtctctcgatatattgaagaccctggttttgggtatgaagactttgccagacgaggagaagagcatttgccaacattccgagctcaggactatacctgggaaaatcatgggttctccctggtgaacagactttattctgacattggacatcttcttgatgaaaagtttcggatggtctacaatctcacatataacactatggccacccatgaggatgttgacacaaccatgctgcgcagagctttatttaactatgttcactgtatgtttggaatcaggtatgatgactatgattatggagaagttaatcaattacttgaaagaagcctgaaggtttacattaagacagtgacctgctatcctgagagaactacaaaacgcatgtatgatagttactggcggcagttcaaacactcagaaaaagttcatgtcaatctacttttaatggaagcacgaatgcaagctgaacttctttatgctcttcgtgccataactcggcatttgacctgaagtatcacccaaggaaaatgtcatacatgtgtaaagacctttcacataagataaacattgaagctatttgtgatatagcatcaaaaattattcagttctctagtgtc

SEQ ID NO: 96108 - DNA, 1062 bp, Artificial Sequence
  derived and/or modified sequence
atgtccttgcacacccagtacctggagagtttcctaagaagccagttctacatgcttcgaatggacggcccactgcctcttccctatcggcactacattgctatcatgaaattggtgaaaacaggcgagaacaactggagcctgcctgaactggtgcatgccgtagtattgctcgcacattaccatgcattagctagctttgtgtttggcagcgggattaatcccgagcgtgaccccgaaattagtaacggcttccgcctcattagcgtgaataatttttgcgtctgcgatttagccaacgacaataacatcgaaaatgcctcattatcaggcagcaatttcggaattgtcgacagtctcagtgagctagaggccctcatggaaagaatgaagagactgcaggaggaaagggaggatgaggaggccagccaggaagaaatgtcaacgagatttgagaaggagaagaaagaatctctgttcgtggtgtccggggacacttttcattcctttccccatagtgacttcgaagacgacatgattattacaagcgacgtgtctagatacatcgaggatcctggtttcggatacgaggacttcgcgcgaagaggcgaggagcacctgcctacattccgggctcaggattacacatgggagaaccatggattcagcctggtgaaccgcctctattctgatattggccacttgctggacgagaagtttcgaatggtctataacttgacttataacacgatggctacccacgaagatgtggatacaacaatgctgcgcagagcgctgtttaattatgtacactgtatgtttgggattcgctatgatgactacgattatggcgaggtgaaccagctgttggagcggtctctgaaggtgtacatcaaaactgtgacctgttatccggaacggaccaccaagagaatgtacgacagctattggaggcaatttaaacacagcgagaaggttcacgtcaatcttttgctcatggaagcaagaatgcaggcagagctgttgtatgctctccgcgctattacaagacacctcacgtag

SEQ ID NO: 96109 - DNA, 1062 bp, Artificial Sequence
  derived and/or modified sequence
atgagcctgcacacccagtacctggagagcttcctgagaagccagttctacatgctgagaatggacggccccctgcccctgccctacagacactacatcgccatcatgaagctggtgaagaccggcgagaacaactggagcctgcccgagctggtgcacgccgtggtgctgctggcccactaccacgccctggccagcttcgtgttcggcagcggcatcaaccccgagagagaccccgagatcagcaacggcttcagactgatcagcgtgaacaacttctgcgtgtgcgacctggccaacgacaacaacatcgagaacgccagcctgagcggcagcaacttcggcatcgtggacagcctgagcgagctggaggccctgatggagagaatgaagagactgcaggaggagagagaggacgaggaggccagccaggaggagatgagcaccagattcgagaaggagaagaaggagagcctgttcgtggtgagcggcgacaccttccacagcttcccccacagcgacttcgaggacgacatgatcatcaccagcgacgtgagcagatacatcgaggaccccggcttcggctacgaggacttcgccagaagaggcgaggagcacctgcccaccttcagagcccaggactacacctgggagaaccacggcttcagcctggtgaacagactgtacagcgacatcggccacctgctggacgagaagttcagaatggtgtacaacctgacctacaacaccatggccacccacgaggacgtggacaccaccatgctgagaagagccctgttcaactacgtgcactgcatgttcggcatcagatacgacgactacgactacggcgaggtgaaccagctgctggagagaagcctgaaggtgtacatcaagaccgtgacctgctaccccgagagaaccaccaagagaatgtacgacagctactggagacagttcaagcacagcgagaaggtgcacgtgaacctgctgctgatggaggccagaatgcaggccgagctgctgtacgccctgagagccatcaccagacacctgacctag

SEQ ID NO: 96110 - protein, 494 aa, Artificial Sequence
  derived and/or modified sequence
MKLVNLYKGAVLYLLRGRKTFLIPVLFNNYITAALKLLEKLYKVNLKVKHVEYDTFYIPEISNLVDIQEDYLMWFLHQAGMKARPSIIQDTVTLCSYPFIFDAQAKTKMLQTDAELQMQVAVNGANLQNVFMLLTLEPLLARSPFLVLHVRRNNLVGDALRELSIHSDIDLKKPLKVIFDGEEAVDAGGVTKEFFLLLLKELLNPIYGMFTYYQDSNLLWFSDTCFVEHNWFHLIGITCGLAIYNSTVVDLHFPLALYKKLLNVKPGLEDLKELSPTEGRSLQELLDYPGEDVEETFCLNFTICRESYGVIEQKKLIPGGDNVTVCKDNRQEFVDAYVNYVFQISVHEWYTAFSSGFLKVCGGKVLELFQPSELRAMMVGNSNYNWEELEETAIYKGDYSATHPTVKLFWETFHEFPLEKKKKFLLFLTGSDRIPIYGMASLQIVIQSTASGEEYLPVAHTCYNLLDLPKYSSKEILSARLTQALDNYEGFSLA

SEQ ID NO: 96111 - protein, 186 aa, Artificial Sequence
  derived and/or modified sequence
MSSGGRFNFDDGGSYCGGWEDGKAHGHGVCTGPKGQGEYTGSWSHGFEVLGVYTWPSGNTYQGTWAQGKRHGIGLESKGKWVYKGEWTHGFKGRYGVRECAGNGAKYEGTWSNGLQDGYGTETYSDGDATAFGAEPGPEARELPAAAAAAAAAAAAAVRWFLCREPWPALQLPACLDSPISTPQCT

SEQ ID NO: 96112 - DNA, 561 bp, Artificial Sequence
  derived and/or modified sequence
atgagctcagggggcaggtttaactttgatgatggcggtagctactgtggtggatgggaggacggtaaggcccatggccacggcgtctgtacaggcccaaaaggccaaggcgaatacacgggttcctggtctcacggcttcgaggtgcttggcgtttatacttggcccagcggaaatacctaccaaggcacgtgggcccagggcaaacggcatggtattggactggaaagtaaaggaaaatgggtctacaaaggcgaatggactcatggttttaagggaaggtacggcgtcagagaatgtgctggcaacggagcaaagtatgagggcacatggagcaatggactgcaggatggatacggaacagagacctacagcgatggcgacgctaccgcttttggtgctgaacctggcccagaggctagagagctgcccgcagccgccgctgccgccgccgcagccgccgccgccgcagtgcgctggttcttgtgcagggagccctggcccgctctccagctgccggcatgccttgactctccaataagcacccctcaatgcacatag

SEQ ID NO: 96113 - DNA, 815 bp, Artificial Sequence
  derived and/or modified sequence
gtctccagcgggagcgcgagacgctggtcaggctccgcggcgcagctcgaaaaggaataatcgcccccgattgactgaaattcctccggagccggcgccgcggccgcccgcgcccgagaccgcgctccggggccgcgtcctcctctcctccggaaaacgctcgcgacccagggccgccggcggccgcgactctgctgtgtcgatcgcctgagtccgttttcaccgtttgcgggatctggaaccgagttacatgcatgtccagtgggggcaggtttaattttgacgacggagggtcctactgtggaggctgggaggacggcaaggcgcacggccatggcgtctgcaccggccccaagggccaaggcgaatacaccggctcgtggagccacggcttcgaggtgctgggcgtctacacctggcccagcggcaacacgtaccagggcacctgggcgcagggcaagcgccacggcatcggcctggagagcaaggggaagtgggtgtacaagggcgagtggacgcacggattcaaggggcgctacggggtgcgggagtgcgcgggcaacggggccaaatacgaagggacctggagcaacgggctgcaggacggctacgggaccgagacctactcggacggagatgccaccgcattcggggcagagccggggccggaagccagggagctgcctgctgctgctgctgctgctgctgctgctgctgctgctgctgtaagatggtttctgtgcagggaaccttggccggctctgcagctgcccgcctgcctggactctccgatatccactcctcagtgcacctga

SEQ ID NO: 96114 - DNA, 93 bp, Artificial Sequence
  derived and/or modified sequence
atgccaccgcattcggggcagagccggggccggaagccagggagctgcctgctgctgctgctgctgctgctgctgctgctgctgctgctgctg

SEQ ID NO: 96115 - DNA, 561 bp, Artificial Sequence
  derived and/or modified sequence
atgagcagcggcggccgcttcaactttgatgatggcggcagctactgcggcggctgggaggatggcaaggcccacggccatggagtgtgcaccggccccaagggccagggcgagtacacaggctcctggagccacggctttgaggtgctgggcgtgtacacctggcccagcggcaacacctaccagggcacctgggcccagggcaagagacatggaattggcctggagagcaagggcaagtgggtgtacaagggggagtggacccacggcttcaagggccgctatggagtgagagaatgtgctggaaatggagccaagtatgagggcacctggagcaatggcctgcaggacggctatggaacagagacctacagtgatggagatgccacagccttcggggctgagcccggccctgaggcccgggagctgcctgctgctgctgctgctgctgctgctgctgctgctgctgctgtgcgctggttcctgtgccgggagccctggccagccctgcagctgcctgcctgcctggacagccccatcagcaccccccagtgcacctag

SEQ ID NO: 96116 - DNA, 561 bp, Artificial Sequence
  derived and/or modified sequence
atgagcagcggcggccggttcaacttcgacgacggcggcagctactgcggcggatgggaggatggcaaagctcatgggcacggtgtgtgtactggccctaaaggccagggggagtataccggttcttggtcccacggcttcgaagtgctcggtgtgtatacttggccgtcgggcaacacatatcaaggaacatgggcgcaggggaagcgtcacggcatcggcctcgagtctaaaggcaaatgggtttataagggagagtggacgcacggcttcaaaggaagatatggcgtgagggagtgcgccggtaacggggcgaaatacgagggcacatggtctaatgggctccaggatggctatggaaccgagacctactcggatggagatgccactgccttcggcgccgaaccaggacccgaggctagagagctgcccgctgcagccgccgccgccgcagcagccgccgcagcagctgtcaggtggttcctctgtcgggagccatggccagccctccagctgccagcatgcctagactctccaatctctactcctcagtgtacctag

SEQ ID NO: 96117 - DNA, 561 bp, Artificial Sequence
  derived and/or modified sequence
atgtcttcaggaggcaggttcaattttgacgatggcggtagctattgcggcggatgggaagacgggaaagcccacggccacggtgtctgtactggcccaaagggccagggtgagtacactggctcctggagccatgggttcgaggtgctgggggtgtatacctggccaagcggtaacacttatcaggggacatgggcacaaggcaagagacacggaattggtctggaaagcaaaggaaaatgggtctataagggcgaatggacacacggctttaagggacgatacggggtgagggagtgtgctgggaacggcgcaaagtatgaggggacctggagcaatggtctgcaggacggttacggcacagaaacatattccgacggtgatgctacagcttttggcgctgagcccggtcccgaagctcgggagttacccgcagctgctgcggcagcagccgctgcagctgcagcagccgttagatggtttctctgtcgggaaccctggccagctttgcaactgcctgcctgcctggattctcctatctctaccccccaatgtacgtag

SEQ ID NO: 96118 - DNA, 561 bp, Artificial Sequence
  derived and/or modified sequence
atgagcagcggcggcagattcaacttcgacgacggcggcagctactgcggcggctgggaggacggcaaggcccacggccacggcgtgtgcaccggccccaagggccagggcgagtacaccggcagctggagccacggcttcgaggtgctgggcgtgtacacctggcccagcggcaacacctaccagggcacctgggcccagggcaagagacacggcatcggcctggagagcaagggcaagtgggtgtacaagggcgagtggacccacggcttcaagggcagatacggcgtgagagagtgcgccggcaacggcgccaagtacgagggcacctggagcaacggcctgcaggacggctacggcaccgagacctacagcgacggcgacgccaccgccttcggcgccgagcccggccccgaggccagagagctgcccgccgccgccgccgccgccgccgccgccgccgccgccgccgtgagatggttcctgtgcagagagccctggcccgccctgcagctgcccgcctgcctggacagccccatcagcaccccccagtgcacctag

SEQ ID NO: 96119 - protein, 205 aa, Artificial Sequence
  derived and/or modified sequence
MLPLRDLQDDTEHEELQGLREEALLQRVRYKEEFEKNKGKGFSVVADTPELQRIKKTQDQISNIKYHEEFEKSRMGPSGGEGMEPERRDSQDGSSYRRPLEQQQPHHIPTSAPVYQQPQQQPVAQSYGGYKEPAAPVSIQRSAPGGGGKRYRAVYDYSAADEDEVSFQDGDTIVNVQQIDDGWMYGTVERTGDTGMLPANYVEAI

SEQ ID NO: 96120 - DNA, 618 bp, Artificial Sequence
  derived and/or modified sequence
atgctgcccttacgagaccttcaagatgacacagaacacgaggaacttcagggactcagggaggaggcgctcctgcagcgggttcgttataaagaagagttcgagaaaaacaaaggcaagggtttttccgtagtcgcggataccccagaattgcaacgaatcaagaaaacgcaggatcaaatctcgaatataaagtaccacgaagaatttgagaagtctcggatgggcccaagcgggggtgagggaatggaacccgagaggcgggatagtcaggatggatcttcatatcgccgacccctcgaacagcaacagccccatcatatccccacttctgcgcccgtgtatcagcagccccagcagcaacccgtggcccaatcttacggcgggtataaggagcctgctgccccagtaagcattcaacgctcagcccctggcggcgggggaaaaaggtaccgcgcagtctatgattatagtgctgccgacgaagatgaggtttcatttcaggacggcgacacaatcgttaacgtgcagcagattgacgacgggtggatgtacggtaccgtggaacggacgggggatactgggatgctgcctgctaattatgtggaggccatatag

SEQ ID NO: 96121 - DNA, 618 bp, Artificial Sequence
  derived and/or modified sequence
atgctgcccctgcgggacctgcaggatgacacagaacatgaggagctgcagggcctgcgggaggaggccctgctgcagagggtgcgctacaaggaggagtttgagaagaacaagggcaagggcttctctgtggtggccgacaccccagagctgcagaggatcaagaagacccaggaccagatcagcaacatcaagtaccacgaggagtttgagaagagcaggatgggccccagcggcggggagggcatggagcctgagcggcgggacagccaggacggcagcagctacagaagacccctggagcagcagcagccccaccacatccccaccagcgcccctgtgtaccagcagccccagcagcagcctgtggcccagagctatggaggctacaaggagcctgctgcccctgtgtccatccagaggtctgcccctgggggcggcggcaagcgctacagagctgtgtatgactacagcgctgctgatgaagatgaggtgtccttccaggatggagacaccatcgtgaatgtgcagcagattgatgatggctggatgtatggaacagtggagaggactggagacaccggcatgctgcctgccaactacgtggaggccatctag

SEQ ID NO: 96122 - DNA, 1408 bp, Artificial Sequence
  derived and/or modified sequence
attaggggaaggagggcggaggcggaggccagttccccagctccagccgccgtcgctgctgcctgtgtagttgcagccgcggccgcctcccgccagctcgcctcggggaacaggacgcgcgtgagctcaggcgtccccgccccagcttttctcggaaccatgaaccccaactgcgcccggtgcggcaagatcgtgtatcccacggagaaggtgaactgtctggataagttctggcataaagcatgcttccattgcgagacctgcaagatgacactgaacatgaagaactacaagggctacgagaagaagccctactgcaacgcgtgcgctacaaggaggagtttgagaagaacaagggcaaaggtttcagcgtagtggcagacacgcccgagctccagagaatcaagaagacccaggaccagatcagtaacataaaataccatgaggagtttgagaagagccgcatgggccctagcgggggcgagggcatggagccagagcgtcgggattcacaggacggcagcagctaccggcggcccctggagcagcagcagcctcaccacatcccgaccagtgccccggtttaccagcagccccagcagcagccggtggcccagtcctatggtggctacaaggagcctgcagccccagtctccatacagcgcagcgccccaggtggtggcgggaagcggtaccgcgcggtgtatgactacagcgccgccgacgaggacgaggtctccttccaggacggggacaccatcgtcaacgtgcagcagatcgacgacggctggatgtacgggacggtggagcgcaccggcgacacggggatgctgccggccaactacgtggaggccatctgaacccgcagcgcccccatctgtcttcagcacattccacggcatcgcatccgtcctgggcgtgacccgtccattcttcagtgtctctgttttttaaaacctgcgacagcttgtgattcctacccctcttccagcttcttttgccaactgaagccttcttctgccacttctgcgggctccctcctctggcaggcttcccccttgatcgacttcttggttttctctctggatggaacgggcatgggcctctctgggggaggcagggctggaatgggagacctgttggcctgtgggcctcacctgcccctctgttctctcccctcacatcctcctgcccagctcctcacatacccacacattccagggctggggtgagcctgactgccaggaccccaggtcaggggctccctacattccccagagtgggatccacttcttggttcctgggatggcgatggggactctgccgctgtgtagggaccagtgggatgggctctacctctctttctcaaagagggggctctgcccacctggggtctctctccctacct

SEQ ID NO: 96123 - DNA, 618 bp, Artificial Sequence
  derived and/or modified sequence
atgctgcccctgcgggacctgcaggacgacaccgagcacgaggagttacaaggactgcgggaggaagccctcctccaacgggtgaggtacaaagaggaatttgaaaaaaacaaaggtaaggggtttagcgtcgtcgcggacacgcctgagctacagaggattaaaaaaacccaagaccagatctcaaacatcaagtatcacgaggaatttgagaaaagtagaatgggaccaagtggtggcgaaggtatggaaccagagaggcgcgactcgcaggacggatcaagctaccgtagacctctggagcaacagcagcctcaccacatccctacttccgctcctgtgtaccagcaaccccagcagcagcctgttgcccagtcatacggcggttacaaggaacccgccgccccagtcagcatccagagatcagcgcctggcggcgggggtaagcgctatcgcgccgtatacgactacagtgcggcggacgaagacgaagtaagctttcaggacggagatacgattgtcaacgtgcagcagattgacgatggctggatgtatggaacggtcgagcggactggcgacaccggcatgctgccagctaattatgtggaggctatctag

SEQ ID NO: 96124 - DNA, 618 bp, Artificial Sequence
  derived and/or modified sequence
atgcttcccctaagagatctgcaagatgacactgagcacgaagagttacaaggtctgcgggaagaggcactgctgcagcgcgtcaggtacaaggaggaattcgagaagaataagggtaaggggtttagcgtagtggctgacaccccagagctgcaaaggattaagaagacacaggatcagatatcgaacattaaataccacgaggagtttgagaaaagccggatggggccttccggcggtgagggtatggagcctgagcggcgtgactcccaggacgggagctcctataggcgaccactagaacaacagcaaccccaccatattccgacatccgcccctgtgtaccagcaaccacagcagcagcccgttgcccagtcgtatggcggttataaggaacccgctgcaccagtcagcatccagaggtcagcgcctggaggcggtgggaaaaggtacagggcagtgtacgattacagcgctgccgacgaggacgaagtgagtttccaggatggtgacacaatcgtgaacgtgcagcagattgacgatgggtggatgtacgggaccgttgaacggaccggcgacacaggcatgctgcccgctaactacgttgaagccatttag

SEQ ID NO: 96125 - DNA, 618 bp, Artificial Sequence
  derived and/or modified sequence
atgctgcccctgagagacctgcaggacgacaccgagcacgaggagctgcagggcctgagagaggaggccctgctgcagagagtgagatacaaggaggagttcgagaagaacaagggcaagggcttcagcgtggtggccgacacccccgagctgcagagaatcaagaagacccaggaccagatcagcaacatcaagtaccacgaggagttcgagaagagcagaatgggccccagcggcggcgagggcatggagcccgagagaagagacagccaggacggcagcagctacagaagacccctggagcagcagcagccccaccacatccccaccagcgcccccgtgtaccagcagccccagcagcagcccgtggcccagagctacggcggctacaaggagcccgccgcccccgtgagcatccagagaagcgcccccggcggcggcggcaagagatacagagccgtgtacgactacagcgccgccgacgaggacgaggtgagcttccaggacggcgacaccatcgtgaacgtgcagcagatcgacgacggctggatgtacggcaccgtggagagaaccggcgacaccggcatgctgcccgccaactacgtggaggccatctag

SEQ ID NO: 96126 - DNA, 3504 bp, Artificial Sequence
  derived and/or modified sequence
atgatcggcgacggctgcgacctgggcctgggcgaggaggagggcggcaccggcctgccctacccctgccagttctgcgacaagagcttcatcagactgagctacctgaagagacacgagcagatccacagcgacaagctgcccttcaagtgcacctactgcagcagactgttcaagcacaagagaagcagagacagacacatcaagctgcacaccggcgacaagaagtaccactgccacgagtgcgaggccgccttcagcagaagcgaccacctgaagatccacctgaagacccacagcagcagcaagcccttcaagtgcaccgtgtgcaagagaggcttcagcagcaccagcagcctgcagagccacatgcaggcccacaagaagaacaaggagcacctggccaagagcgagaaggaggccaagaaggacgacttcatgtgcgactactgcgaggacaccttcagccagaccgaggagctggagaagcacgtgctgaccagacacccccagctgagcgagaaggccgacctgcagtgcatccactgccccgaggtgttcgtggacgagaacaccctgctggcccacatccaccaggcccacgccaaccagaagcacaagtgccccatgtgccccgagcagttcagcagcgtggagggcgtgtactgccacctggacagccacagacagcccgacagcagcaaccacagcgtgagccccgaccccgtgctgggcagcgtggccagcatgagcagcgccacccccgacagcagcgccagcgtggagagaggcagcacccccgacagcaccctgaagcccctgagaggccagaagaagatgagagacgacggccagggctggaccaaggtggtgtacagctgcccctactgcagcaagagagacttcaacagcctggccgtgctggagatccacctgaagaccatccacgccgacaagccccagcagagccacacctgccagatctgcctggacagcatgcccaccctgtacaacctgaacgagcacgtgagaaagctgcacaagaaccacgcctaccccgtgatgcagttcggcaacatcagcgccttccactgcaactactgccccgagatgttcgccgacatcaacagcctgcaggagcacatcagagtgagccactgcggccccaacgccaaccccagcgacggcaacaacgccttcttctgcaaccagtgcagcatgggcttcctgaccgagagcagcctgaccgagcacatccagcaggcccactgcagcgtgggcagcgccaagctggagagccccgtggtgcagcccacccagagcttcatggaggtgtacagctgcccctactgcaccaacagccccatcttcggcagcatcctgaagctgaccaagcacatcaaggagaaccacaagaacatccccctggcccacagcaagaagagcaaggccgagcagagccccgtgagcagcgacgtggaggtgagcagccccaagagacagagactgagcgccagcgccaacagcatcagcaacggcgagtacccctgcaaccagtgcgacctgaagttcagcaacttcgagagcttccagacccacctgaagctgcacctggagctgctgctgagaaagcaggcctgcccccagtgcaaggaggacttcgacagccaggagagcctgctgcagcacctgaccgtgcactacatgaccaccagcacccactacgtgtgcgagagctgcgacaagcagttcagcagcgtggacgacctgcagaagcacctgctggacatgcacaccttcgtgctgtaccactgcaccctgtgccaggaggtgttcgacagcaaggtgagcatccaggtgcacctggccgtgaagcacagcaacgagaagaagatgtacagatgcaccgcctgcaactgggacttcagaaaggaggccgacctgcaggtgcacgtgaagcacagccacctgggcaaccccgccaaggcccacaagtgcatcttctgcggcgagaccttcagcaccgaggtggagctgcagtgccacatcaccacccacagcaagaagtacaactgcaagttctgcagcaaggccttccacgccatcatcctgctggagaagcacctgagagagaagcactgcgtgttcgacgccgccaccgagaacggcaccgccaacggcgtgccccccatggccaccaagaaggccgagcccgccgacctgcagggcatgctgctgaagaaccccgaggcccccaacagccacgaggccagcgaggacgacgtggacgccagcgagcccatgtacggctgcgacatctgcggcgccgcctacaccatggaggtgctgctgcagaaccacagactgagagaccacaacatcagacccggcgaggacgacggcagcagaaagaaggccgagttcatcaagggcagccacaagtgcaacgtgtgcagcagaaccttcttcagcgagaacggcctgagagagcacctgcagacccacagaggccccgccaagcactacatgtgccccatctgcggcgagagattccccagcctgctgaccctgaccgagcacaaggtgacccacagcaagagcctggacaccggcacctgcagaatctgcaagatgcccctgcagagcgaggaggagttcatcgagcactgccagatgcaccccgacctgagaaacagcctgaccggcttcagatgcgtggtgtgcatgcagaccgtgaccagcaccctggagctgaagatccacggcaccttccacatgcagaagctggccggcagcagcgccgccagcagccccaacggccagggcctgcagaagctgtacaagtgcgccctgtgcctgaaggagttcagaagcaagcaggacctggtgaagctggacgtgaacggcctgccctacggcctgtgcgccggctgcatggccagaagcgccaacggccaggtgggcggcctggccccccccgagcccgccgacagaccctgcgccggcctgagatgccccgagtgcagcgtgaagttcgagagcgccgaggacctggagagccacatgcaggtggaccacagagacctgacccccgagaccagcggccccagaaagggcacccagaccagccccgtgcccagaaagaagacctaccagtgcatcaagtgccagatgaccttcgagaacgagagagagatccagatccacgtggccaaccacatgatcgaggagggcatcaaccacgagtgcaagctgtgcaaccagatgttcgacagccccgccaagctgctgtgccacctgatcgagcacagcttcgagggcatgggcggcaccttcaagtgccccgtgtgcttcaccgtgttcgtgcaggccaacaagctgcagcagcacatcttcgccgtgcacggccaggaggacaagatctacgactgcagccagtgcccccagaagttcttcttccagaccgagctgcagaaccacaccatgagccagcacgcccagtag

SEQ ID NO: 96127 - DNA, 3504 bp, Artificial Sequence
  derived and/or modified sequence
atgatcggtgatgggtgtgacctcggtcttggcgaggaggaagggggtactggactgccctatccttgccagttctgcgataagtcctttatccggctgtcgtacctaaagcggcacgaacagatacacagcgataagctgccttttaaatgtacttactgttcaaggctgttcaagcataaacggtccagggaccgccatataaaacttcatactggcgataaaaagtaccattgccacgaatgtgaagccgccttttctcggagcgaccatctgaaaatacacctgaaaacccatagcagctctaagcccttcaagtgcaccgtttgtaaacggggcttctcttctacctccagtctgcaaagccatatgcaggcccataaaaagaataaagagcacctggccaaaagcgaaaaagaagcgaagaaggatgactttatgtgcgattattgcgaagacacatttagccagactgaggagttggaaaaacacgtcctgactcgccaccctcagctttcagaaaaagccgacttgcagtgcatccattgcccagaagtgttcgtggacgaaaacactttgcttgcccacattcaccaggcgcatgcaaaccagaagcacaaatgccctatgtgtcccgagcaattctcaagcgttgagggcgtgtattgccacctggactcacaccgtcagcccgattctagcaaccactcagtgtcccccgatcctgtgctgggcagtgtcgcctcaatgtcatccgccactccagattcaagcgctagcgttgagcggggctcaacgccagactcaaccctgaaaccattgagagggcagaagaagatgcgggatgatggccagggctggacgaaagtcgtctattcttgtccttattgcagcaaaagagatttcaattccttggctgtgctcgaaattcatctcaagacaattcatgcagataagcctcagcagtcgcacacttgccagatttgcctggatagcatgcccacactgtacaatctgaatgaacacgtaagaaagctccataagaaccatgcatatccagtgatgcaatttgggaacatttccgcttttcattgtaactactgtcccgagatgttcgcagacataaacagtctgcaggaacatatcagagtgtctcattgcggccctaacgcaaatcctagcgatgggaacaacgcattcttctgtaaccagtgtagtatgggtttcctgacagaaagcagtttgaccgaacatattcagcaggcgcattgtagtgtgggatctgccaagttggagtcacccgtcgtccagccgacacagtcttttatggaggtctactcttgtccatactgtacaaattctcctatctttggatccattctcaagctgaccaaacatatcaaagagaatcacaagaatatccctctcgctcactcaaaaaaatcgaaagccgagcagtcaccagtgtctagcgatgttgaggtaagctctcccaagaggcagcgcttgtctgcgtccgctaattctattagtaatggagaatacccgtgtaaccagtgcgacttgaagtttagcaactttgaatcctttcagacccacctgaagctacacctggaattgctgttgagaaagcaagcatgtcctcagtgcaaggaggatttcgactcacaggagtccttgctgcaacacctgacagttcactacatgacaacttctacgcactatgtgtgcgagtcgtgtgacaagcagttctcatccgtcgatgacctacaaaaacacctcctcgacatgcacacattcgtgctctatcactgcacactttgtcaggaggtatttgactctaaggtgtctatccaggtgcatcttgcagtcaaacatagcaacgagaaaaagatgtatcgatgcaccgcgtgtaattgggactttcgtaaggaggctgatctccaggtgcacgttaagcatagccacctgggcaatccggctaaggcccataaatgtattttctgtggggaaaccttttctactgaagtggagctacagtgtcatatcactacccactcaaagaagtacaactgtaagttctgttcaaaagcgttccatgctatcatcctgctcgagaagcacctcagggagaaacactgtgtattcgacgcagcgacagagaatgggactgccaacggtgtacctccaatggcaacgaagaaggccgagccagcagatctgcaggggatgttgctgaaaaaccctgaagcccccaactctcacgaggcaagcgaagacgacgtcgacgctagcgaacccatgtacggctgtgatatctgcggcgcggcatacactatggaggttcttttacaaaatcaccgtcttcgtgaccataatattcggcctggggaggatgacggaagcaggaaaaaagcggagttcatcaaggggtcacacaaatgcaatgtgtgttcacgcacattcttttcagaaaacggtcttcgtgaacacctgcaaacccaccgtggacccgccaagcattacatgtgtcctatatgcggggagcgttttccatccctacttacactcaccgaacacaaagtcactcactccaaatcactggatacaggcacatgccgtatttgcaagatgcccctccagagtgaggaagagtttatagaacattgtcagatgcatcccgatctccgcaactcactaactgggttcagatgtgtggtgtgtatgcagactgtgaccagcacccttgagctaaaaatccacggcacgttccatatgcaaaaactggcagggtccagcgctgcgtcgtcacccaatggacaaggattgcaaaaactatacaagtgcgccctgtgcttgaaggaattccgcagtaaacaggatttggtcaaactagacgtgaatggcctaccgtatgggctgtgcgctggttgcatggctaggtcagctaatggccaggtcggcggacttgctccacccgagccggcagaccgaccctgtgccggactgagatgcccagagtgttccgtcaagtttgagagtgctgaggacctcgagagccacatgcaggtagaccaccgcgatttgacccccgaaacttccggtccacgaaaagggacccagacaagcccagtaccccggaagaagacataccagtgcattaaatgccagatgacctttgagaatgagcgcgaaattcagatccacgttgcgaaccacatgatcgaagagggtataaaccacgaatgtaaactgtgtaatcagatgttcgacagccccgcaaaattgctgtgccatctgatcgaacactccttcgaaggcatgggaggaacgtttaaatgtccggtttgctttaccgtgtttgtacaggccaacaaacttcagcaacacatctttgccgtgcacggtcaagaagataaaatctatgactgttcccagtgcccacagaagttttttttccaaactgagctccagaaccataccatgagccagcacgcacaatag

SEQ ID NO: 96128 - DNA, 3504 bp, Artificial Sequence
  derived and/or modified sequence
atgattggagatggctgtgacctgggcctgggggaggaggagggcggcaccggcctgccctacccctgccagttctgtgacaagagcttcatccggctgagctacctgaagagacatgagcagatccacagcgacaagctgcccttcaagtgcacctactgcagccgcctcttcaagcacaagaggagccgggacagacacatcaagctgcacactggagacaagaagtaccactgccatgaatgtgaggccgccttcagcagaagtgaccacctgaagatccacctgaagacccacagcagcagcaagcccttcaagtgcaccgtgtgcaagaggggcttcagcagcaccagcagcctgcagagccacatgcaggcccacaagaagaacaaggagcacctggccaagtctgagaaggaggccaagaaggatgacttcatgtgtgactactgtgaggacaccttcagccagacagaggagctggagaagcacgtgctgaccaggcacccccagctgtctgagaaggctgacctgcagtgcatccactgcccagaggtgtttgtggatgagaacaccctgctggcccacatccaccaggcccacgccaaccagaagcacaagtgccccatgtgcccagagcagttcagctctgtggagggcgtgtactgccacctggacagccaccggcagcctgacagcagcaaccacagcgtgtccccagaccctgtgctgggctctgtggcctccatgagcagcgccaccccagacagcagcgcctctgtggagcggggcagcaccccagacagcaccctgaagcccctgcggggccagaagaagatgagagatgatggccagggctggaccaaggtggtgtacagctgcccctactgcagcaagagggacttcaacagcctggccgtgctggagatccacctgaagaccatccatgctgacaagccccagcagagccacacctgccagatctgcctggacagcatgcccaccctgtacaacctgaatgagcacgtgaggaagctgcacaagaaccacgcctaccctgtgatgcagtttggaaacatcagcgccttccactgcaactactgcccagagatgtttgctgacatcaacagcctgcaggagcacatccgggtgagccactgcggccccaatgccaaccccagtgatggcaacaatgccttcttctgcaaccagtgcagcatgggcttcctgacagagagcagcctgacagagcacatccagcaggcccactgcagcgtgggcagcgccaagctggagagccctgtggtgcagcccacccagagcttcatggaggtgtacagctgcccctactgcaccaacagccccatcttcggcagcatcctgaagctgaccaagcacatcaaggagaaccacaagaacatccccctggcccacagcaagaagagcaaggccgagcagagccctgtgtccagtgatgtggaggtgagcagccccaagaggcagaggctgagcgccagcgccaacagcatcagcaatggagagtacccctgcaaccagtgtgacctgaagttcagcaactttgagagcttccagacccacctgaagctgcacctggagctgctgctgaggaagcaggcctgcccccagtgcaaggaggactttgacagccaggagagcctgctgcagcacctgactgtgcactacatgaccaccagcacccactacgtgtgtgagagctgtgacaagcagttcagctctgtggatgacctgcagaagcacctgctggacatgcacacctttgtgctgtaccactgcaccctgtgccaggaggtgtttgacagcaaggtgtccatccaggtgcacctggccgtgaagcacagcaatgagaagaagatgtaccgctgcacagcctgcaactgggacttcaggaaggaggccgacctgcaggtgcacgtgaagcacagccacctgggcaacccagccaaggcccacaagtgcatcttctgtggggagaccttcagcacagaggtggagctgcagtgccacatcaccacccacagcaagaagtacaactgcaagttctgcagcaaggccttccacgccatcatcctgctggagaagcacctgcgggagaagcactgtgtgtttgatgctgccacagaaaatggaacagccaacggggtgccccccatggccaccaagaaggccgagcctgctgacctgcagggcatgctgctgaagaaccctgaggcccccaacagccatgaggcctctgaagatgatgtggatgccagcgagcccatgtatggctgtgacatctgtggggccgcctacaccatggaggtgctgctgcagaaccaccggctgcgggaccacaacatccggcctggagaagatgatggcagcaggaagaaggccgagttcatcaagggcagccacaagtgcaatgtgtgcagcaggaccttcttctctgaaaatggcctgcgggagcacctgcagacccaccggggccctgccaagcactacatgtgccccatctgtggggagcgcttccccagcctgctgaccctgacagagcacaaggtgacccacagcaagagcctggacaccggcacctgccgcatctgcaagatgcccctgcagagcgaggaggagttcatcgagcactgccagatgcacccagacctgaggaacagcctgaccggcttccgctgtgtggtgtgcatgcagacagtgaccagcaccctggagctgaagatccacggcaccttccacatgcagaagctggccggcagcagcgctgccagcagccccaacggccagggcctgcagaagctgtacaagtgtgccctgtgcctgaaggagttccgcagcaagcaggacctggtgaagctggatgtgaatggcctgccctacggcctgtgtgccggctgcatggcccggagcgccaacggccaggtgggcggcctggcccctcctgagcctgctgaccggccctgtgccggcctgcgctgcccagaatgttctgtgaagtttgagagcgctgaggacctggagagccacatgcaggtggaccaccgggacctgaccccagagaccagcggccccaggaagggcacccagaccagccctgtgcccaggaagaagacctaccagtgcatcaagtgccagatgacctttgaaaatgaaagagagatccagatccacgtggccaaccacatgattgaggagggcatcaaccacgagtgcaagctgtgcaaccagatgtttgacagccctgccaagctgctgtgccacctgattgagcacagctttgagggcatgggcggcaccttcaagtgccctgtgtgcttcaccgtgtttgtgcaggccaacaagctgcagcagcacatctttgctgtgcacggccaggaggacaagatctatgactgcagccagtgcccccagaagttcttcttccagacagagctgcagaaccacaccatgagccagcacgcccagtag

SEQ ID NO: 96129 - DNA, 3504 bp, Artificial Sequence
  derived and/or modified sequence
atgatcggcgacggctgcgacctgggcctgggcgaggaggagggcgggacaggtctgccctatccatgtcagttttgcgataaaagctttatccggctgtcttatcttaagcgccacgaacagattcattcagataagctcccgttcaaatgcacctactgctccaggctgtttaaacacaagagatcccgagatcgccatattaagctgcatacaggggacaagaagtaccactgtcatgagtgtgaggccgcttttagtaggagtgatcatctgaaaatacacttgaagacccactcttccagcaagccctttaaatgcacagtttgcaagcggggcttcagtagtactagttccctgcagagccatatgcaggctcataagaaaaataaagaacacctggcgaaaagcgagaaagaggcaaagaaagacgattttatgtgcgactattgcgaggatacattcagccagaccgaggaactcgagaagcacgttctaacccgacatccacaactgagtgaaaaagccgatcttcagtgtattcactgtcccgaggtgtttgtagatgaaaacactctccttgcccacatacaccaggctcacgcaaatcagaagcacaaatgtcccatgtgccccgaacagttcagctctgtggagggggtgtattgccatctggattcacataggcaacctgactcctcgaaccattcagtctcaccggatcccgtgttaggctctgttgccagcatgtcttccgcgacccctgatagctcagcatctgttgaacgaggctcgacccctgattcaacactgaaacctctgagagggcagaagaagatgcgagacgatggacagggttggaccaaggtggtgtattcatgtccgtactgttctaagcgagacttcaattcgctggcagtgcttgagattcacctaaagaccatccacgctgacaagccccagcagtcccatacttgtcagatttgcctggattccatgcccaccctgtacaacctcaatgaacatgtacgtaagttgcacaaaaatcatgcttaccccgtgatgcaattcggcaacatatccgccttccactgtaattactgtcccgaaatgtttgctgatattaactcgctgcaggagcatattcgcgtgtcccattgtgggccgaacgccaacccctcagacggaaataatgcctttttctgtaatcaatgctccatgggtttcctgaccgagtccagtctgaccgagcatatccagcaagcccattgttctgtcggctccgctaaactagagagtcccgtcgtccagccgacccagtcatttatggaggtgtacagttgcccatactgcaccaacagccccatcttcggttctatactcaaactcactaaacacattaaggaaaaccataaaaacatccctctcgcccactcaaagaagtctaaggctgagcaatcaccagtgtctagcgacgtggaagtgtctagccccaaacgccagcgtctgtctgcctcggccaattctataagtaacggagagtacccttgtaaccaatgtgatcttaagtttagcaattttgagagcttccagacacacctgaagcttcaccttgagctcctgctgagaaagcaggcgtgtccacaatgcaaggaagatttcgatagtcaggagagtcttcttcagcatctcacagtgcactatatgacaacgagcacacattatgtatgcgagtcctgcgataagcagttctcatcagtggatgatctgcagaagcacctgctcgatatgcataccttcgtgctttatcattgtaccctgtgtcaggaagtgtttgattcaaaggtatccatacaggttcacctcgccgtcaaacactcaaacgagaagaagatgtaccgatgcactgcttgcaattgggatttccgcaaagaggctgatttgcaggtgcatgtaaagcacagtcacttagggaatcccgctaaggcccacaaatgtatattttgcggagaaacgttcagcactgaagtggagctgcagtgtcatatcaccactcatagtaagaagtacaattgcaagttctgctctaaagccttccatgccatcatcctcttggagaagcacttaagagagaagcactgtgtgttcgatgcagcgacagagaacggtaccgcaaacggggttccacccatggcaacaaaaaaggccgaacctgccgacctgcagggtatgctcttgaaaaatcccgaagctcctaattcacatgaggccagcgaggatgacgtcgacgcttccgagccaatgtacggctgcgacatctgcggggccgcctacactatggaggtccttcttcaaaatcaccggttacgcgatcacaacattaggcctggggaagatgatgggtcgaggaaaaaagcagaatttattaaggggtctcataagtgtaatgtgtgcagtcgtacatttttttccgagaacgggttgagagagcacctccagacacacagagggcctgcaaagcactacatgtgcccaatttgtggtgaaagattccctagcttgctgaccctcacggaacacaaggttacacatagcaagagcctggatacgggcacctgcaggatctgtaagatgcctttgcagtctgaagaggaatttattgagcattgtcagatgcatcctgacctgcgcaacagcctgacagggttccgctgtgtagtgtgtatgcaaacggtgacaagcaccttggaactgaagatacatggtacatttcacatgcaaaagctggcagggagtagcgccgcatccagcccaaatggccaaggactgcagaagctctataagtgcgccctgtgtctgaaggaattccggagtaagcaggatcttgtcaagcttgacgtgaatggccttccatatgggctgtgtgccgggtgcatggctaggtccgctaatggacaggtcggagggctagcccctccagagcctgcggaccgcccttgcgccggtctgcgctgcccagagtgcagtgttaagtttgaatctgccgaggacctcgaatctcacatgcaggtggaccatcgggatctgacacctgagacctcgggccctagaaaggggactcagacctccccggttccgaggaaaaagacttatcagtgtattaaatgtcagatgactttcgagaacgagagagagatccagatacacgttgccaaccacatgatcgaggagggaattaaccatgaatgtaaactctgtaaccaaatgttcgactccccagcaaagctactctgtcacctgatcgagcactctttcgaaggcatgggcggcacattcaaatgtccagtgtgcttcaccgtctttgttcaggccaataaactacagcagcacatctttgccgtgcacggtcaggaggataagatttacgactgctcacaatgccctcagaagttttttttccaaactgagctacagaaccacaccatgtcgcagcacgcccagtag

SEQ ID NO: 96130 - DNA, 3504 bp, Artificial Sequence
  derived and/or modified sequence
atgatcggcgacgggtgcgacctcgggctcggcgaagaggagggcggtaccgggttgccatacccttgtcagttctgcgacaagagcttcattcgacttagctatctgaaaaggcacgagcaaattcacagtgacaagctaccgtttaagtgtacgtactgcagccggctcttcaagcataaaagaagccgcgaccgccacataaaactgcacactggggacaagaaataccattgtcatgagtgtgaggcagcattctcaagatctgaccaccttaagatacacttaaaaacccattctagctccaagccctttaagtgtactgtttgcaaacggggtttcagtagcacaagcagcctacagtcacatatgcaggcgcacaagaagaacaaagagcatctggccaaatctgaaaaggaggccaagaaggatgactttatgtgcgattactgtgaggacacattttctcaaactgaggagttggagaagcacgtcctgacacgacacccccaattgtctgaaaaggctgatcttcagtgcatccactgccctgaagtgttcgtggacgaaaatactctcttggcacacattcaccaggctcatgcaaaccagaagcacaagtgcccgatgtgtcccgaacagttctctagcgttgagggtgtgtattgtcatctagattctcaccgccaacctgattccagcaaccactccgtgagccccgacccggtcttagggtccgtcgcctcaatgagttcagcaacgccagactctagtgcctcagtcgaaagaggttcaacaccagacagcaccttgaagccactgagggggcaaaaaaagatgcgtgacgatggtcagggctggactaaagtcgtgtattcatgtccgtactgttctaagcgggactttaacagcttggccgtccttgagattcacctgaagactattcacgcagataagcctcagcagtctcacacctgtcagatctgcctagacagtatgccaaccctctacaacctcaatgaacacgttcgaaagctccacaaaaaccatgcctatcccgtgatgcagtttggcaacattagcgcattccattgtaattactgccctgaaatgtttgccgatattaactctctccaggaacatatcagggtctcgcattgcgggccaaacgcgaatccatctgatgggaataatgccttcttctgtaaccaatgctccatggggtttctaacagagagttctctcacggaacacattcagcaggcccattgtagcgtgggctctgctaagttagaaagccccgtggtccagcctacgcaatcatttatggaagtatatagctgtccctactgtaccaattccccaatttttggctccatactgaagctgacaaaacacatcaaagaaaatcacaagaacattcccttggcccactcaaagaaatccaaggccgagcagagtccagtctcttccgacgtggaggtgagttcccctaagagacaaagactctcagcaagtgcaaactccatatccaacggggagtatccatgtaaccagtgcgatctgaagttcagtaacttcgaaagcttccagacccatctcaaactacacctggagctactgctgcgaaagcaggcatgtccccagtgcaaggaggacttcgactcccaggagagcctgctgcagcatctgaccgtgcactacatgacaactagcactcactatgtgtgcgaatcttgtgacaagcagttcagcagcgtggatgacctccaaaagcatctcttagatatgcataccttcgtgctgtatcactgcactctctgtcaagaagtgtttgacagcaaagtaagtatccaggtgcacttggccgtgaaacacagcaatgagaaaaagatgtaccgctgtacagcctgcaattgggactttcgtaaggaggctgatctgcaggtgcacgtgaagcactctcaccttggaaatcccgcaaaggcccacaagtgcattttctgcggcgaaaccttctctacagaagtcgagctccaatgtcacatcacaacacattcaaagaagtataactgcaaattctgttccaaagcctttcatgccattattctgctggaaaaacacctacgggagaaacactgcgtgtttgatgcggcaacggaaaatggcactgctaatggagtgccgccaatggcaaccaagaaggcagagcccgcagaccttcagggaatgctgctgaaaaaccccgaggccccaaatagtcatgaggcatctgaagacgatgtagacgcctcggagccaatgtacggctgtgacatctgtggcgctgcctatactatggaggtcttgttgcaaaatcatcgactgcgagatcataacattcgcccaggagaagacgacggatctagaaagaaggccgaattcatcaaaggtagtcataagtgcaatgtttgttccagaacgttcttttcggaaaacggactgcgggaacatctacagacacaccggggtcccgcaaagcattacatgtgcccaatatgcggggaacgctttcctagtctgctgacgctgaccgagcataaggttacacattccaagtcccttgacaccggcacttgtcggatctgtaagatgcccctgcagagcgaggaagaattcatcgagcactgtcagatgcatcctgacctcagaaactctctgactggcttcagatgtgtcgtgtgcatgcagacggttacatcaacattggagctcaagatacatgggacattccacatgcagaaattggcagggagctccgccgcttcctccccaaacgggcagggtcttcagaagctttacaagtgtgctctttgcctcaaggagtttaggtcgaagcaggacttggtgaagctagacgtcaacggactgccctatggtctttgcgctgggtgtatggcaaggagtgcgaacgggcaggtgggcggtctggcaccacccgagccggcagaccggccatgcgccggtctgaggtgcccggaatgttccgtcaagttcgaaagtgccgaggacctcgaatcccacatgcaggtcgaccatagagatttaacgcctgagacgtccggccctcgcaaaggtacccaaacctcccccgtacctaggaaaaagacttatcaatgtattaaatgtcagatgacctttgagaatgagcgggaaattcagattcatgtggcgaaccacatgatagaggaaggaataaaccatgaatgtaagctgtgtaatcagatgttcgacagtcccgcaaaattgttgtgtcatctcatcgaacattcctttgaaggcatgggtggcaccttcaaatgtccggtgtgcttcactgtgtttgtccaagcgaacaagttacagcagcacatcttcgctgtacatggacaggaagacaaaatatacgattgtagccagtgtccccagaagttcttcttccaaaccgaactgcagaaccataccatgagccagcacgctcagtag

SEQ ID NO: 96131 - DNA, 4201 bp, Artificial Sequence
  derived and/or modified sequence
accagtgggccggtgggaagcgcctctccagccctcgcctgccctgccgccgggtgctgggaacccgggctcaggttctggccctcttggcatcggccagtttgccctgggacgccctggtgagcagggggaaagatggtgatgacgacccacaactctcctgggtggcctcgtctccctccagcaaggatgttgcgtcacccacgcagatgatcggagatggttgtgacctcggcctcggcgaggaggaagggggcacgggcctgccatacccttgccagttctgcgacaagtccttcatccgcttgagctacttgaagaggcacgagcagatccacagcgacaagctgccgttcaagtgcacctactgcagccgcctcttcaagcacaagaggagccgtgaccggcacatcaagctgcatacgggcgacaagaagtatcactgccacgagtgcgaggcagccttctcccgcagcgaccacctcaagatccacctgaagacccacagctccagcaagcccttcaagtgcactgtgtgcaagcgcggcttctcctccaccagctcgctgcagagccacatgcaggcccacaaaaagaacaaggagcatctggccaagtcggagaaggaagccaagaaggacgacttcatgtgcgactactgcgaggacaccttcagccagacggaggagctggagaagcacgtgctcacccgccacccgcagctgtccgagaaggcggacctgcagtgcattcactgccctgaggtcttcgtcgacgagaacacactgctcgcccatatccaccaagcccacgccaaccagaaacacaagtgccccatgtgccctgagcagttctcctcagtggaaggtgtctactgccacctggacagccaccggcagcccgactccagcaaccacagtgtcagtcccgaccctgtactgggcagcgtggcctccatgagcagcgccacacccgactccagcgcctctgtggagcgtggctccaccccggactccaccttgaagccgctgcgggggcagaagaagatgcgggatgacgggcagggctggaccaaggtggtctatagctgcccctattgttccaagcgggactttaacagcctggccgtgctggagatccacctgaagaccatccacgcggacaagccccagcagagccacacatgtcagatctgcctggactccatgcccaccctctacaacctcaacgagcacgttcgcaagctgcacaagaaccatgcctaccctgtgatgcagtttggcaacatctctgccttccactgcaactactgccccgagatgttcgccgacatcaatagcctgcaggagcacatccgcgtctcccactgcggccccaacgccaacccctctgacggtaataatgctttcttctgcaaccagtgctccatgggtttccttactgagtcctccctcaccgagcacatccagcaggcccactgcagtgtgggcagtgccaaactagagtctccggtggtgcagcccacgcagtccttcatggaggtctattcctgcccctactgcaccaactcccccatctttggctccatcctgaaactcaccaagcacatcaaggagaaccacaagaacattccactggcccacagcaagaagtccaaggccgagcagagcccagtctcgtccgatgtggaggtgtcttccccgaagcggcagcggctctcagcaagcgccaactccatctccaatggggagtatccttgcaatcaatgcgacctcaagttctccaactttgagagcttccagacccacctgaagctgcacctggagctgctgctgcggaagcaagcgtgcccccagtgcaaagaggactttgactcccaggagtccctcctgcagcacctgacagtgcattacatgaccacgtcgacccactatgtgtgcgagagctgcgacaagcaattttcctcggtggatgacctgcagaagcacctgctggacatgcacacctttgtgttgtaccactgcaccctgtgtcaggaggtcttcgactccaaggtgtccatccaggtgcacctggcggtgaagcacagcaatgagaagaagatgtaccgctgcacggcctgcaactgggacttccgcaaggaggctgacctgcaggtgcacgtcaaacacagccacctgggcaacccggccaaggctcacaagtgcatcttctgtggggagaccttcagcaccgaggtggagctgcagtgccacatcaccacacacagcaagaagtataactgtaagttctgcagcaaggccttccacgccatcatcctgctggagaagcacctgcgggagaagcactgtgtgtttgatgctgcgaccgagaacggcacggccaatggggtacccccaatggccaccaagaaagctgagcctgctgacctgcagggcatgctgcttaagaaccctgaggcacctaacagccatgaggccagcgaggatgacgtggacgcgtcggagcccatgtacggctgtgacatctgtggggcggcctacaccatggaggtgctgctgcagaatcaccggctgcgggaccacaatatccggccgggcgaggatgatggctcacgcaagaaggctgagtttatcaagggcagtcacaagtgcaacgtttgttcacggactttcttctcggagaacgggctacgggagcacctgcagacgcaccggggccctgccaagcactacatgtgtcccatctgtggtgagcgcttcccttcgctgctgacgctcaccgaacacaaggtgacccacagcaagagcctggacacgggcacctgtcgcatctgcaagatgcccctgcagagcgaggaggagtttattgagcactgccagatgcaccctgacctgcgcaactcactcacgggcttccgctgtgtggtctgcatgcagacagtcacttccacgcttgagctcaagatccatggcaccttccacatgcagaagctggcgggcagctcagcggcgtcctcccccaatggccaggggctgcagaagctctacaagtgcgccctgtgcctcaaggagttccgcagcaagcaggacctggtgaagcttgacgtcaatgggctgccctacggcctctgcgccggctgcatggcccgcagcgccaacggacaggtgggtggcctggccccgcccgagcccgccgaccggccctgtgccggcctccgttgccccgagtgcagtgtcaagtttgagagtgccgaagacctggagagccacatgcaggtggaccaccgtgacctcacgccggagaccagtgggccccggaaaggcacccagacatcgccagtgccccggaaaaagacataccagtgcatcaagtgccagatgaccttcgagaacgagagagagatccaaatccacgttgccaaccacatgattgaggaaggcatcaaccacgagtgtaagctgtgcaaccagatgttcgactccccggccaagctcctctgtcacctcattgagcacagcttcgagggcatgggcggcaccttcaaatgccccgtgtgtttcacagtcttcgtccaggccaacaagttgcagcagcacatctttgccgtgcacgggcaggaggacaagatctacgactgctcacagtgccctcagaagttcttcttccagaccgagctgcagaaccacacgatgagccagcacgcacagtgagggatcgctcaacaggacacctctccgcagaaggcttgccggagacgccgtggggagggccatttgaacattacatccaatcaaagtgtcatttgcaacccagatgtaaaactctaatgatttggccatgaggcgctgctattataagcagctggaaatgaatattaatggcagagattaaaagtattccatgctcagtattttttattgtcctgctacagctagtgtgcttttagactttccgccgcagactacatttctagagttagagaaacctgctttttaaggctattgtcctttgttccttcatgtattatattgatagtttttaaaaaagaattagtgtgattttttttctttgcttcttttttttctttcttgtttttcttcccccccaccccccacccccttcggttaactactttttaattgcaattctaggtaattgtgcatcgtgatgtgattgcttggctattgtctgaatattt

SEQ ID NO: 96132 - protein, 331 aa, Artificial Sequence
  derived and/or modified sequence
MHSLATAAPVPTTLAQVDREKIYQWINELSSPETRENALLELSKKRESVPDLAPMLWHSFGTIAALLQEIVNIYPSINPPTLTAHQSNRVCNALALLQCVASHPETRSAFLAAHIPLFLYPFLHTVSKTRPFEYLRLTSLGVIVETGFHHVGQADLELPTSSDLPASASQSAGITGALVKTDEQEVINFLLTTEIIPLCLRIMESGSELSKTVATFILQKILLDDTGLAYICQTYERFSHVAMILGKMVLQLSKEPSARLLKHVVRCYLRLSDNPRAREALRQCLPDQLKDTTFAQVLKDDTTTKRWLAQLVKNLQEGQVTDPRGIPLPPQ

SEQ ID NO: 96133 - DNA, 996 bp, Artificial Sequence
  derived and/or modified sequence
atgcattcattggccaccgccgctccagtgccaacgacgttagcccaggttgatagagagaaaatttatcagtggataaacgagctgtccagccctgaaacacgcgagaatgcacttcttgagctcagtaaaaaacgggaatccgtaccagaccttgcacctatgctttggcatagtttcggcactatagctgcgctacttcaggagatagtcaacatctaccctagcattaaccctcccaccctgactgcacaccagagcaatcgtgtatgtaacgctctggcacttctgcagtgcgtggcttcacaccctgagactcgtagcgccttcctggcggcccatattccgctatttctctatccctttcttcataccgtctcgaagactagaccttttgagtatctgagactaacctccttgggcgtgatcgtggaaacgggttttcaccatgtgggccaagccgacctcgagctgcctactagctcagatctccccgctagtgccagccagagcgccggaattaccggggccctggtgaaaacagacgaacaagaggtgatcaactttctgctgacaacagaaattattcccttatgcctgaggataatggagtccggttctgagctcagcaaaactgtcgcaaccttcatcctacagaagattcttctggacgacacggggcttgcatatatttgccagacatacgagcggttttcgcatgttgcaatgatattgggcaagatggtgctccagctgtctaaggagccatcagcccgactgctgaaacacgtggtgcgctgttacttaagactcagcgataaccccagggcccgggaggcgctgaggcagtgtcttccggaccagcttaaggacaccacattcgcccaagtcctcaaagacgataccacaacaaagcgctggttagcccaactcgtgaagaacctccaggaaggccaagtcaccgatcccagaggcatacccctgccgccacaatag

SEQ ID NO: 96134 - DNA, 996 bp, Artificial Sequence
  derived and/or modified sequence
atgcacagcctggccacagctgcccctgtgcccaccaccctggcccaggtggaccgggagaagatctaccagtggatcaatgagctgagcagccctgagacccgggagaatgccctgctggagctgagcaagaagcgggagagcgtgcctgacctggcccccatgctgtggcacagctttggcaccatcgccgccctgctgcaggagatcgtgaacatctaccccagcatcaacccccccaccctgacagcccaccagagcaacagagtgtgcaatgccctggccctgctgcagtgtgtggccagccaccctgagaccaggtctgccttcctggccgcccacatccccctcttcctgtaccccttcctgcacacagtgtccaagacccggccctttgagtacctgcggctgaccagcctgggcgtgattgtggagaccggcttccaccacgtgggccaggccgacctggagctgcccaccagcagtgacctgcctgccagcgccagccagagcgctggcatcactggagccctggtgaagacagatgagcaggaggtgatcaacttcctgctgaccacagagatcatccccctgtgcctgcgcatcatggagagcggcagcgagctgagcaagacagtggccaccttcatcctgcagaagatcctgctggatgacaccggcctggcctacatctgccagacctatgagcgcttcagccacgtggccatgatcctgggcaagatggtgctgcagctgagcaaggagcccagcgcccggctgctgaagcacgtggtgcgctgctacctgcggctgagtgacaacccccgggcccgggaggccctgcggcagtgcctgcctgaccagctgaaggacaccacctttgcccaggtgctgaaggatgacaccaccaccaagcgctggctggcccagctggtgaagaacctgcaggagggccaggtgacagacccccggggcatccccctgcccccccagtag

SEQ ID NO: 96135 - DNA, 996 bp, Artificial Sequence
  derived and/or modified sequence
atgcacagcctggccaccgccgcccccgtgcccaccaccctggcccaggtggaccgggaaaagatctaccagtggatcaatgaacttagcagcccagagacaagagagaacgccctgctggaactgtcaaagaaacgcgagagtgtccccgatctggcgcctatgctgtggcactcttttgggaccattgctgcccttcttcaggagattgtgaatatttacccatccatcaatcctcccacactaaccgcccatcagagtaatcgggtatgtaacgcgctcgcactgctccagtgtgtagctagccacccagagacgcgcagcgcctttctggctgcccacattccactctttctttacccttttttacacaccgtaagtaaaacccggccctttgagtatcttagattgacatctctcggtgtcatcgtagagactgggttccaccatgtgggacaagccgatctcgaactgcctactagctctgacctacccgcatcagccagccagagtgctggaattacgggcgcactggtgaagaccgatgagcaggaggtgattaattttctccttactactgagattatcccactgtgcttgcgaattatggaaagcggttcagaactgtctaagaccgtagcaactttcattctacaaaagatcctgctggatgataccggacttgcatacatctgccagacatacgaaaggtttagccacgttgctatgatccttggcaagatggtccttcaactaagcaaagaacccagcgccagactgctgaagcatgttgtccgatgctacctgcgcctgtcggacaaccctagagctcgggaggccttgagacagtgtctccctgaccaactgaaagataccacattcgcccaggtcctgaaagacgatactactactaaacgttggctagctcagttagtgaaaaacctccaagaaggccaggtgactgaccctcgggggattccactccccccacagtag

SEQ ID NO: 96136 - DNA, 996 bp, Artificial Sequence
  derived and/or modified sequence
atgcattccctcgctacagccgctcccgtgccaacgactctggctcaggtggatcgcgagaaaatctatcagtggatcaatgagctttcgtccccagagacaagagagaatgcgctcctcgagctgtccaagaagagggagagtgtgccagacttagctccaatgttgtggcacagttttggcacaattgctgctctgcttcaggaaatcgttaacatctacccttcaattaacccaccaacgttgacagcccaccaatctaatcgggtgtgcaacgccctcgcgcttttgcaatgtgtggcatctcacccagaaacccgcagcgcctttctcgccgctcacatacccctctttctttacccattcctgcacaccgtgtctaaaactcgaccctttgagtatcttaggctcacatcgctgggggtgatcgtagagactggattccatcatgtgggacaggctgatctggagcttcccacctcttccgacctgccagcttctgcctcacagtcggcgggaatcaccggtgccttggtaaagactgacgagcaggaggtgattaatttcttgttaaccaccgagattattccgctgtgccttaggatcatggaaagcggcagcgagcttagcaaaactgtggccacttttattctgcagaagattctgttggacgatacgggcctggcatatatctgtcagacatatgaaagattctcacacgtagccatgatattaggcaagatggttctgcagctgtctaaggagccctccgccaggcttctaaagcacgtggttcggtgctatttacggctatctgataatcccagggcacgagaagcactcagacaatgtctccctgatcagctaaaggataccacgttcgcacaggttttaaaggacgatacaacaaccaagcggtggttggcgcagcttgtgaagaatctgcaggagggtcaggtcaccgaccctcgtgggattcccctaccgccacaatag

SEQ ID NO: 96137 - DNA, 1621 bp, Artificial Sequence
  derived and/or modified sequence
agttgtcttgccgggactgtccatcttttcccgccgttcactggcttttggaggagggtcagagttcacgccgctctctggaaataactgctcaaagccagaagttgcggggactagtggtcgcggacgtccttccggtcctaaatcttaaggggcaaaggacatactctgggactgttaactaggccctggaggcgggaagaggatgtgtgggtggggtcaggggtgagaggtcagagggccgcgaagtgggcggagcgagccggagtcggatggcggctacggcggctcattgttttccgctgcaggggtgctgaaggggggacgcgggtcggacgcgtccggctgtggaagagagcggcggccgctcacaacatgcacagcctggcgacggctgcgcctgtgcctactacactggcacaagtggatagagaaaagatctatcagtggatcaatgagctgtccagtcctgagactagggaaaatgctttgctggagctaagtaagaagcgagaatctgttcctgaccttgcacccatgctgtggcattcatttggtactattgcagcacttttacaggaaattgtaaatatttatccatctatcaacccacccaccttgacagcacaccagtctaacagagtttgcaatgctctggcattactgcaatgtgtagcatcacatccagaaaccaggtcagcgtttctcgcagcacacatcccactttttttgtacccctttttgcacactgtcagcaaaacacgtccctttgagtatctccggctcaccagccttggagttattgtagagacggggtttcaccatgttggccaggctgatcttgaactcccgacctcaagtgatctgcccgcctcggcctcccaaagtgctgggattacaggggccctggtgaaaacagatgaacaagaagtaatcaactttttattaacaacagaaattatccctttatgtttgcgaattatggaatctggaagtgaactttctaaaacagttgccacattcatcctccagaagatcttgttagatgacactggtttggcttatatatgtcagacgtatgagcgtttctcccatgttgccatgatcttgggtaagatggtcctgcagctatccaaagagccttctgcccgtctgctgaagcatgtagtgagatgttaccttcgactttcagataaccccagggcacgtgaagcactcagacagtgcctccctgaccagctgaaagacacaaccttcgcccaggtgctaaaagatgacaccaccacgaaacgctggcttgcacaactggtgaagaacctgcaagagggccaggtcaccgatccccggggtatccccctgccccctcagtgatccttccctgttccctcccactactcccccaagttggggaaaggagggggaacctacgagaaaaacagctcaggttttatcaccgactgggaatagacaacctcaatgctgaaccgcactggagaaaaggggcaaggtacccctgctgaggtgtatgggctgccatctcaggctgtcttgaggacctgggctccctctgctactcccaggaaatgggctcctgacacagcagtctgccaccacagcccca

SEQ ID NO: 96138 - DNA, 996 bp, Artificial Sequence
  derived and/or modified sequence
atgcacagcctggccaccgccgcccccgtgcccaccaccctggcccaggtggacagagagaagatctaccagtggatcaacgagctgagcagccccgagaccagagagaacgccctgctggagctgagcaagaagagagagagcgtgcccgacctggcccccatgctgtggcacagcttcggcaccatcgccgccctgctgcaggagatcgtgaacatctaccccagcatcaacccccccaccctgaccgcccaccagagcaacagagtgtgcaacgccctggccctgctgcagtgcgtggccagccaccccgagaccagaagcgccttcctggccgcccacatccccctgttcctgtaccccttcctgcacaccgtgagcaagaccagacccttcgagtacctgagactgaccagcctgggcgtgatcgtggagaccggcttccaccacgtgggccaggccgacctggagctgcccaccagcagcgacctgcccgccagcgccagccagagcgccggcatcaccggcgccctggtgaagaccgacgagcaggaggtgatcaacttcctgctgaccaccgagatcatccccctgtgcctgagaatcatggagagcggcagcgagctgagcaagaccgtggccaccttcatcctgcagaagatcctgctggacgacaccggcctggcctacatctgccagacctacgagagattcagccacgtggccatgatcctgggcaagatggtgctgcagctgagcaaggagcccagcgccagactgctgaagcacgtggtgagatgctacctgagactgagcgacaaccccagagccagagaggccctgagacagtgcctgcccgaccagctgaaggacaccaccttcgcccaggtgctgaaggacgacaccaccaccaagagatggctggcccagctggtgaagaacctgcaggagggccaggtgaccgaccccagaggcatccccctgcccccccagtag

SEQ ID NO: 96139 - protein, 258 aa, Artificial Sequence
  derived and/or modified sequence
MHSLATAAPVPTTLAQVDREKIYQWINELSSPETRENALLELSKKRESVPDLAPMLWHSFGTIAALLQEIVNIYPSINPPTLTAHQSNRVCNALALLQCVASHPETRSAFLAAHIPLFLYPFLHTVSKTRPFEYLRLTSLGVIGALVKTDEQEVINFLLTTEIIPLCLRIMESGSELSKTVATFILQKILLDDTGLAYICQTYERFSHVAMILGKMVLQLSKEPSARLLKHVVRCYLRLSDNPRFSDLTFCWSSFQRK

SEQ ID NO: 96140 - DNA, 777 bp, Artificial Sequence
  derived and/or modified sequence
atgcactcgctggccaccgccgccccggttcctaccacactggcccaggtggaccgggaaaaaatctatcagtggataaacgagctgtcctctcctgaaaccagggagaacgcgttgctggaactttccaagaagcgggagtctgtgcctgacttggctccgatgttatggcactcatttggtaccatcgcggcgttgctgcaggagattgtaaatatctacccttctataaaccctccgacccttactgcgcaccagagtaatagagtgtgtaatgcgctggctctactccagtgtgtggcaagccatcctgagactcggtcagccttccttgcagcacacatcccattattcctgtacccttttctgcacacagtttctaaaacgcgaccgtttgaatacttgagacttacaagcctgggagtgattggtgcactggttaaaacggacgaacaggaagtaatcaacttcctccttaccactgagatcattcctttatgcttacgcattatggagtcagggagcgagctaagcaaaacggttgccaccttcatcctgcaaaaaattttgctggatgacaccgggctggcatatatctgtcagacctacgagcggttctcccacgtggcaatgatcctgggcaaaatggtgctgcagctgtcaaaggaaccatctgcgagactgctcaagcacgtcgtacggtgctatctgcggctctctgacaaccctaggttttcggatctcaccttctgctggagttcgttccaaagaaaatag

SEQ ID NO: 96141 - DNA, 777 bp, Artificial Sequence
  derived and/or modified sequence
atgcacagcctggccacagctgcccctgtgcccaccaccctggcccaggtggaccgggagaagatctaccagtggatcaatgagctgagcagccctgagacccgggagaatgccctgctggagctgagcaagaagcgggagagcgtgcctgacctggcccccatgctgtggcacagctttggcaccatcgccgccctgctgcaggagatcgtgaacatctaccccagcatcaacccccccaccctgacagcccaccagagcaacagagtgtgcaatgccctggccctgctgcagtgtgtggccagccaccctgagaccaggtctgccttcctggccgcccacatccccctcttcctgtaccccttcctgcacacagtgtccaagacccggccctttgagtacctgcggctgaccagcctgggcgtgattggagccctggtgaagacagatgagcaggaggtgatcaacttcctgctgaccacagagatcatccccctgtgcctgcgcatcatggagagcggcagcgagctgagcaagacagtggccaccttcatcctgcagaagatcctgctggatgacaccggcctggcctacatctgccagacctatgagcgcttcagccacgtggccatgatcctgggcaagatggtgctgcagctgagcaaggagcccagcgcccggctgctgaagcacgtggtgcgctgctacctgcggctgagtgacaacccccgcttcagtgacctgaccttctgctggagcagcttccagaggaagtag

SEQ ID NO: 96142 - DNA, 777 bp, Artificial Sequence
  derived and/or modified sequence
atgcacagcctggccaccgccgcccccgtgcccaccaccctggcccaggtcgaccgggagaaaatctaccagtggataaacgaactaagttccccagagacacgcgagaatgccttactagaactctccaaaaagcgcgaaagcgtgcctgacctggcccccatgctgtggcactctttcggcaccattgccgccctgctccaagagatcgtcaatatatatccttcaattaacccgccaacactgactgcccatcaatctaacagagtctgtaacgctctcgccttattgcagtgcgtcgcgtcacatccagagaccaggtctgcttttctggcggcacacatccccctgttcctctacccttttctgcacaccgtctccaaaacacgccctttcgagtatctacggctgacatcactgggcgtcattggtgccctggtgaaaactgatgaacaagaggtcattaattttctgctgacaacagaaattattccgctgtgcctaaggataatggaatcgggttcagaacttagcaaaaccgttgcaacctttattctgcaaaagattctcctcgacgacaccggtctggcttatatatgtcagacatacgaacgatttagccacgtagctatgatcctgggcaaaatggtgctgcagctgtcaaaggaaccttccgctaggctccttaaacatgtggtgcggtgctacctgcggctgtcagacaacccaagattttctgacctgaccttctgctggagcagttttcagcggaaatag

SEQ ID NO: 96143 - DNA, 777 bp, Artificial Sequence
  derived and/or modified sequence
atgcactccttagctaccgcagccccagtgccgaccacgctggctcaggtcgacagagaaaagatataccagtggatcaatgaactttcctcacccgagaccagggaaaacgcactgcttgagctctcgaaaaagcgggagtccgtccccgatctcgccccaatgctgtggcatagttttggaacaatagcagcactccttcaggaaatagtgaacatctacccaagtatcaaccccccaacactaacagcacatcaatctaatcgagtgtgtaatgccttggcgttgctgcagtgtgtggcaagccatccagaaacacgctctgccttcctggctgcccacatcccactctttctttacccatttctgcacaccgtctccaagacaaggcccttcgagtatttacggctgacaagcctaggagtgataggtgccctggtgaaaacagacgaacaggaggttataaactttcttctgactacagagatcattcctttgtgtttgcgcataatggagtcaggaagtgaactctctaagacggtggctaccttcatcctgcagaaaatcctgctcgatgacactggactggcttatatttgccagacttacgagcgtttttcccatgtggccatgatccttgggaaaatggtactgcagttgagcaaggagcctagcgctagactgctgaaacatgtggtgagatgctatcttcgactgtccgataatcccagattcagcgatcttacgttctgttggtctagtttccagcggaaatag

SEQ ID NO: 96144 - DNA, 1129 bp, Artificial Sequence
  derived and/or modified sequence
ttttccgctgcaggggtgctgaaggggggacgcgggtcggacgcgtccggctgtggaagagagcggcggccgctcacaacatgcacagcctggcgacggctgcgcctgtgcctactacactggcacaagtggatagagaaaagatctatcagtggatcaatgagctgtccagtcctgagactagggaaaatgctttgctggagctaagtaagaagcgagaatctgttcctgaccttgcacccatgctgtggcattcatttggtactattgcagcacttttacaggaaattgtaaatatttatccatctatcaacccacccaccttgacagcacaccagtctaacagagtttgcaatgctctggcattactgcaatgtgtagcatcacatccagaaaccaggtcagcgtttctcgcagcacacatcccactttttttgtacccctttttgcacactgtcagcaaaacacgtccctttgagtatctccggctcaccagccttggagttattggggccctggtgaaaacagatgaacaagaagtaatcaactttttattaacaacagaaattatccctttatgtttgcgaattatggaatctggaagtgaactttctaaaacagttgccacattcatcctccagaagatcttgttagatgacactggtttggcttatatatgtcagacgtatgagcgtttctcccatgttgccatgatcttgggtaagatggtcctgcagctatccaaagagccttctgcccgtctgctgaagcatgtagtgagatgttaccttcgactttcagataaccccaggttttcagatttgactttctgctggtcatcttttcaaagaaaatgaaacgtttaaaagttcatctgataatactgctaccatagttttgttttcactgctcatctcttattaaggtttttaaccataaaactgaagcaatttctgtaaagacacaaattgataacttagtatagaattaaaattcattaagttatcataagtttgatgatatccttgttaatgtactgatttttgaattattttatttgccataatccatatatttctaacatgagtattttgacagtatttaataaatcagaaagctgtttgaatgg

SEQ ID NO: 96145 - DNA, 777 bp, Artificial Sequence
  derived and/or modified sequence
atgcacagcctggccaccgccgcccccgtgcccaccaccctggcccaggtggacagagagaagatctaccagtggatcaacgagctgagcagccccgagaccagagagaacgccctgctggagctgagcaagaagagagagagcgtgcccgacctggcccccatgctgtggcacagcttcggcaccatcgccgccctgctgcaggagatcgtgaacatctaccccagcatcaacccccccaccctgaccgcccaccagagcaacagagtgtgcaacgccctggccctgctgcagtgcgtggccagccaccccgagaccagaagcgccttcctggccgcccacatccccctgttcctgtaccccttcctgcacaccgtgagcaagaccagacccttcgagtacctgagactgaccagcctgggcgtgatcggcgccctggtgaagaccgacgagcaggaggtgatcaacttcctgctgaccaccgagatcatccccctgtgcctgagaatcatggagagcggcagcgagctgagcaagaccgtggccaccttcatcctgcagaagatcctgctggacgacaccggcctggcctacatctgccagacctacgagagattcagccacgtggccatgatcctgggcaagatggtgctgcagctgagcaaggagcccagcgccagactgctgaagcacgtggtgagatgctacctgagactgagcgacaaccccagattcagcgacctgaccttctgctggagcagcttccagagaaagtag

SEQ ID NO: 96146 - protein, 357 aa, Artificial Sequence
  derived and/or modified sequence
MDGGSGGLGSGDNAPTTEALFVALGAGVTALSHPLLYVKLLIQVGHEPMPPTLGTNVLGRKVLYLPSFFTYAKYIVQVDGKIGLFRGLSPRLMSNALSTVTRGSMKKVFPPDEIEQVSNKDDMKTSLKKVVKETSYEMMMQCVSRMLAHPLHVISMRCMVQFVGREAKYSGVLSSIGKIFKEEGLLGFFVGLIPHLLGDVVFLWGCNLLAHFINAYLVDDSVIQPGPGHPELYQVRDGDCSEHADLPLPASWRPHGCEQLRAASWAPPLLPSVQILDSLLEVPECAACFSAGCHQDHALPWSNLNHLKNTVSTWPPWVRPDHLGTPARRLQPNNNQMCSSPAGLQFHICHVSVQMWG

SEQ ID NO: 96147 - protein, 389 aa, Artificial Sequence
  derived and/or modified sequence
MGASDPEVAPWARGGAAGMAGAGAGAGARGGAAAGVEARARDPPPAHRAHPRHPRPAAQPSARRMDGGSGGLGSGDNAPTTEALFVALGAGVTALSHPLLYVKLLIQVGHEPMPPTLGTNVLGRKVLYLPSFFTYAKYIVQVDGKIGLFRGLSPRLMSNALSTVTRGSMKKVFPPDEIEQVSNKDDMKTSLKKVVKETSYEMMMQCVSRMLAHPLHVISMRCMVQFVGREAKYSGVLSSIGKIFKEEGLLGFFVGLIPHLLGDVVFLWGCNLLAHFINAYLVDDSVSDTPGGLGNDQNPGSQFSQALAIRSYTKFVMGIAVSMLTYPFLLVGDLMAVNNCGLQAGLPPYSPVFKSWIHCWKYLSVQGQLFRGSSLLFRRVSSGSCFALE

SEQ ID NO: 96148 - DNA, 1074 bp, Artificial Sequence
  derived and/or modified sequence
atggacggcggcagcggcggcctgggcagcggcgacaacgcccccaccaccgaggccctgttcgtggccctgggcgccggcgtgaccgccctgagccaccccctgctgtacgtgaagctgctgatccaggtgggccacgagcccatgccccccaccctgggcaccaacgtgctgggcagaaaggtgctgtacctgcccagcttcttcacctacgccaagtacatcgtgcaggtggacggcaagatcggcctgttcagaggcctgagccccagactgatgagcaacgccctgagcaccgtgaccagaggcagcatgaagaaggtgttcccccccgacgagatcgagcaggtgagcaacaaggacgacatgaagaccagcctgaagaaggtggtgaaggagaccagctacgagatgatgatgcagtgcgtgagcagaatgctggcccaccccctgcacgtgatcagcatgagatgcatggtgcagttcgtgggcagagaggccaagtacagcggcgtgctgagcagcatcggcaagatcttcaaggaggagggcctgctgggcttcttcgtgggcctgatcccccacctgctgggcgacgtggtgttcctgtggggctgcaacctgctggcccacttcatcaacgcctacctggtggacgacagcgtgatccagcccggccccggccaccccgagctgtaccaggtgagagacggcgactgcagcgagcacgccgacctgcccctgcccgccagctggagaccccacggctgcgagcagctgagagccgccagctgggccccccccctgctgcccagcgtgcagatcctggacagcctgctggaggtgcccgagtgcgccgcctgcttcagcgccggctgccaccaggaccacgccctgccctggagcaacctgaaccacctgaagaacaccgtgagcacctggcccccctgggtgagacccgaccacctgggcacccccgccagaagactgcagcccaacaacaaccagatgtgcagcagccccgccggcctgcagttccacatctgccacgtgagcgtgcagatgtggggctag

SEQ ID NO: 96149 - DNA, 1170 bp, Artificial Sequence
  derived and/or modified sequence
atgggcgccagcgaccccgaggtggccccctgggccagaggcggcgccgccggcatggccggcgccggcgccggcgccggcgccagaggcggcgccgccgccggcgtggaggccagagccagagaccccccccccgcccacagagcccaccccagacaccccagacccgccgcccagcccagcgccagaagaatggacggcggcagcggcggcctgggcagcggcgacaacgcccccaccaccgaggccctgttcgtggccctgggcgccggcgtgaccgccctgagccaccccctgctgtacgtgaagctgctgatccaggtgggccacgagcccatgccccccaccctgggcaccaacgtgctgggcagaaaggtgctgtacctgcccagcttcttcacctacgccaagtacatcgtgcaggtggacggcaagatcggcctgttcagaggcctgagccccagactgatgagcaacgccctgagcaccgtgaccagaggcagcatgaagaaggtgttcccccccgacgagatcgagcaggtgagcaacaaggacgacatgaagaccagcctgaagaaggtggtgaaggagaccagctacgagatgatgatgcagtgcgtgagcagaatgctggcccaccccctgcacgtgatcagcatgagatgcatggtgcagttcgtgggcagagaggccaagtacagcggcgtgctgagcagcatcggcaagatcttcaaggaggagggcctgctgggcttcttcgtgggcctgatcccccacctgctgggcgacgtggtgttcctgtggggctgcaacctgctggcccacttcatcaacgcctacctggtggacgacagcgtgagcgacacccccggcggcctgggcaacgaccagaaccccggcagccagttcagccaggccctggccatcagaagctacaccaagttcgtgatgggcatcgccgtgagcatgctgacctaccccttcctgctggtgggcgacctgatggccgtgaacaactgcggcctgcaggccggcctgcccccctacagccccgtgttcaagagctggatccactgctggaagtacctgagcgtgcagggccagctgttcagaggcagcagcctgctgttcagaagagtgagcagcggcagctgcttcgccctggagtag

SEQ ID NO: 96150 - DNA, 1074 bp, Artificial Sequence
  derived and/or modified sequence
atggacggaggctcggggggactcggatccggtgacaatgcccctacaactgaggccttattcgtggcgttgggagcaggagttaccgctctgagtcatccactgctctacgtaaaactgctcatacaggtggggcatgagcccatgcctccaaccttagggactaatgtcctggggaggaaagtgctttatctgccatcctttttcacctacgcaaaatacatcgtgcaggttgatggcaagatcggcctttttcgaggactcagtccccggttgatgagtaacgctctttctactgtcacgcgtggcagcatgaagaaggtcttccctcccgacgagattgaacaggtgtccaacaaggacgacatgaaaacttccctgaaaaaagtcgtgaaagagaccagctacgagatgatgatgcagtgtgtatcccgtatgctggctcaccccttgcatgtgatctcaatgcgctgtatggtgcaatttgttggcagagaggctaaatactccggggtcttgtctagtataggcaagatcttcaaagaggaaggtctgctcgggttttttgtgggcttgatcccacacctgcttggtgacgtggtgttcctctgggggtgcaatcttctggcccattttattaacgcttacctggtggacgactccgttatccagccaggccccggccatccagaattgtaccaggtgagggacggtgactgttcagaacacgccgacctgcctttgcctgcatcttggagaccccatgggtgcgagcagctgcgggccgctagctgggccccaccactgttacccagcgtacagattctggatagtctgctcgaagtccctgagtgtgcggcctgcttcagcgccggctgccatcaagaccacgcgttgccctggtccaacttgaaccacctcaagaatacagtgtcaacttggcccccctgggttcggcctgatcacttgggcactcccgctcggaggctgcagcctaacaacaatcagatgtgttcctcccccgcaggactccaatttcacatttgtcatgtgtcggtgcagatgtgggggtag

SEQ ID NO: 96151 - DNA, 1170 bp, Artificial Sequence
  derived and/or modified sequence
atgggggctagtgaccccgaggtggcaccttgggcacgcgggggggctgccggtatggctggagccggagcaggagcaggcgccagaggcggggcggccgccggcgtggaggcacgggctcgggaccccccgcccgctcacagggcccatccccggcaccctcgtccagccgcacaaccaagtgctcgccgaatggatggcggaagcggcggtctcgggagcggcgataacgcacctactactgaagctctctttgtcgccctcggagcgggggtcactgctttgtctcaccccctcctctatgtgaagctactgatacaggtcggtcacgagcccatgccacccactctgggcactaatgtgcttggacgtaaagtgctgtacttacccagcttcttcacatacgctaagtatatagtgcaggtcgacggcaagatcgggctgtttagagggttgagtccccgactgatgtcgaatgcgctctccaccgtgacccgaggatctatgaaaaaagtgttcccgccggacgaaatagaacaggtaagcaataaggatgatatgaagaccagcctcaagaaagtcgtgaaagaaacaagctacgagatgatgatgcagtgcgtctccagaatgcttgctcacccactgcacgtgatttccatgcgctgtatggtgcagtttgtcggtagggaggcgaagtatagcggagtgctctcatcaataggtaagatttttaaggaggagggcctgttagggttcttcgtggggctgatccctcatctgctcggggatgtggttttcctgtggggatgtaatctactggcacacttcataaacgcatatttagtcgatgactcagtgtctgacaccccaggcgggcttggcaacgatcagaatcccggcagccagttttcgcaggctctggccatacggtcctataccaagttcgtgatgggcatagcagtgtcgatgctaacatatccttttctcttggtcggtgatctcatggcagtgaacaactgcggcctgcaagccggcctcccaccttactctcccgtcttcaaatcctggattcactgctggaaatacctgtcagtgcaagggcagctgttccgggggtcctcactcctcttccgcagggtatcgtctggctcctgctttgccttggagtag

SEQ ID NO: 96152 - DNA, 1074 bp, Artificial Sequence
  derived and/or modified sequence
atggatggcggcagcggcggcctgggcagcggggacaatgcccccaccacagaggccctgtttgtggccctgggcgctggggtgacagccctgagccaccccctgctgtatgtgaagctgctgatccaggtgggccacgagcccatgccacccaccctgggcaccaacgtgctgggcaggaaggtgctgtacctgcccagcttcttcacctacgccaagtacatcgtgcaggtggatggcaagattggcctcttccggggcctgagcccccggctgatgagcaatgccctgagcacagtgacccggggctccatgaagaaggtgttccccccagatgaaattgagcaggtgagcaacaaggatgacatgaagaccagcctgaagaaggtggtgaaggagaccagctatgagatgatgatgcagtgtgtgtccaggatgctggcccaccccctgcacgtgatctccatgcgctgcatggtgcagtttgtgggccgggaggccaagtacagcggcgtgctgagcagcatcggcaagatcttcaaggaggagggcctgctgggcttctttgtgggcctcatcccccacctgctgggagatgtggtgttcctgtggggctgcaacctgctggcccacttcatcaatgcctacctggtggatgattctgtcatccagcccggccctggccaccctgagctgtaccaggtgagagatggagactgcagcgagcacgccgacctgcccctgcctgcctcctggaggcctcatggctgtgagcagctgcgggccgcctcctgggccccacccctgctgcccagcgtgcagatcctggacagcctgctggaggtgcctgaatgtgccgcctgcttctctgctggctgccaccaggaccacgccctgccctggagcaacctgaaccacctgaagaacacagtgtccacctggccaccctgggtgcggccagaccacctgggcaccccagcccggcggctgcagcccaacaacaaccagatgtgcagcagccctgctggcctgcagttccacatctgccacgtgtctgtgcagatgtggggctag

SEQ ID NO: 96153 - DNA, 1170 bp, Artificial Sequence
  derived and/or modified sequence
atgggcgccagtgaccctgaggtggccccctgggcccggggcggcgctgctggcatggccggggccggggccggggccggggcccggggcggcgctgctgctggggtggaggcccgggcccgggaccccccaccagcccaccgggcccaccccaggcaccccaggcctgctgcccagcccagcgcccggaggatggatggcggcagcggcggcctgggcagcggggacaatgcccccaccacagaggccctgtttgtggccctgggcgctggggtgacagccctgagccaccccctgctgtatgtgaagctgctgatccaggtgggccacgagcccatgccacccaccctgggcaccaacgtgctgggcaggaaggtgctgtacctgcccagcttcttcacctacgccaagtacatcgtgcaggtggatggcaagattggcctcttccggggcctgagcccccggctgatgagcaatgccctgagcacagtgacccggggctccatgaagaaggtgttccccccagatgaaattgagcaggtgagcaacaaggatgacatgaagaccagcctgaagaaggtggtgaaggagaccagctatgagatgatgatgcagtgtgtgtccaggatgctggcccaccccctgcacgtgatctccatgcgctgcatggtgcagtttgtgggccgggaggccaagtacagcggcgtgctgagcagcatcggcaagatcttcaaggaggagggcctgctgggcttctttgtgggcctcatcccccacctgctgggagatgtggtgttcctgtggggctgcaacctgctggcccacttcatcaatgcctacctggtggatgattctgtgtctgacacccctgggggcctgggcaatgaccagaaccctggcagccagttcagccaggccctggccatccgcagctacaccaagtttgtgatgggcattgctgtgtccatgctgacctaccccttcctgctggtgggggacctgatggctgtgaacaactgtggcctgcaggccggcctgcccccctacagccctgtgttcaagtcctggatccactgctggaagtacctgtctgtgcagggccagctgttccggggcagcagcctgctcttccggcgggtgagcagcggcagctgctttgccctggagtag

SEQ ID NO: 96154 - DNA, 1074 bp, Artificial Sequence
  derived and/or modified sequence
atggatggcgggtcagggggcctggggtctggggacaacgccccgaccactgaggctcttttcgtggcactgggcgcgggcgtgacggcgctcagccatcccctgctctacgtgaagctgctcatccaggtgggtcatgagccgatgccccccacccttgggaccaatgtgctggggaggaaggtcctctatctgccgagcttcttcacctacgccaagtacatcgtgcaagtggatggtaagatagggctgttccgaggcctgagtccccggctgatgtccaacgccctctctactgtgactcggggtagcatgaagaaggttttccctccagatgagattgagcaggtttccaacaaggatgatatgaagacttccctgaagaaagttgtgaaggagacctcctacgagatgatgatgcagtgtgtgtcccgcatgttggcccaccccctgcatgtcatctcaatgcgctgcatggtccagtttgtgggacgggaggccaagtacagtggtgtgctgagctccattgggaagattttcaaagaggaagggctgctgggattcttcgttggattaatccctcacctcctgggcgatgtggttttcttgtggggctgtaacctgctggcccacttcatcaatgcctacctggtggatgacagcgtgattcagccaggccctggccatccggagctataccaagttcgtgatggggattgcagtgagcatgctgacctaccccttcctgctagttggcgacctcatggctgtgaacaactgcgggctgcaagctgggctccccccttactccccagtgttcaaatcctggattcactgctggaagtacctgagtgtgcagcctgcttttccgccgggtgtcatcaggatcatgctttgccctggagtaacctgaatcatctaaaaaacacggtctcaacctggccaccgtgggtgaggcctgaccaccttgggacacctgcaagacgactccaacccaacaacaaccagatgtgctccagcccagccgggcttcagttccatatttgccatgtgtctgtccagatgtggggttga

SEQ ID NO: 96155 - DNA, 2057 bp, Artificial Sequence
  derived and/or modified sequence
cccgccgcaccacgctcccgagctcccccgcggcctggagtggtgcgccccggccccgccccctgacgccggtgagggggcgtggccccgtcacgtgacggggagtgacctcgccgccgggcgccatgggagcttcggacccggaagtggcgccctgggctcgcggcggtgccgcggggatggcgggagccggagctggagccggagctcgcggcggagcggcggcgggggtcgaggctcgagctcgcgatccaccgcccgcgcaccgcgcacatcctcgccaccctcggcctgcggctcagccctcggcccgcaggatggatggcgggtcagggggcctggggtctggggacaacgccccgaccactgaggctcttttcgtggcactgggcgcgggcgtgacggcgctcagccatcccctgctctacgtgaagctgctcatccaggtgggtcatgagccgatgccccccacccttgggaccaatgtgctggggaggaaggtcctctatctgccgagcttcttcacctacgccaagtacatcgtgcaagtggatggtaagatagggctgttccgaggcctgagtccccggctgatgtccaacgccctctctactgtgactcggggtagcatgaagaaggttttccctccagatgagattgagcaggtttccaacaaggatgatatgaagacttccctgaagaaagttgtgaaggagacctcctacgagatgatgatgcagtgtgtgtcccgcatgttggcccaccccctgcatgtcatctcaatgcgctgcatggtccagtttgtgggacgggaggccaagtacagtggtgtgctgagctccattgggaagattttcaaagaggaagggctgctgggattcttcgttggattaatccctcacctcctgggcgatgtggttttcttgtggggctgtaacctgctggcccacttcatcaatgcctacctggtggatgacagcgtgagtgacaccccaggggggctgggaaacgaccagaatccaggttcccagttcagccaggccctggccatccggagctataccaagttcgtgatggggattgcagtgagcatgctgacctaccccttcctgctagttggcgacctcatggctgtgaacaactgcgggctgcaagctgggctccccccttactccccagtgttcaaatcctggattcactgctggaagtacctgagtgtgcagggccagctcttccgaggctccagcctgcttttccgccgggtgtcatcaggatcatgctttgccctggagtaacctgaatcatctaaaaaacacggtctcaacctggccaccgtgggtgaggcctgaccaccttgggacacctgcaagacgactccaacccaacaacaaccagatgtgctccagcccagccgggcttcagttccatatttgccatgtgtctgtccagatgtggggttgagcgggggtggggctgcacccagtggattgggtcacccggcagacctagggaaggtgaggcgaggtggggagttggcagaatccccatacctcgcagatttgctgagtctgtcttgtgcagagggccagagaatggcttatgggggcccaggttggatggggaaaggctaatggggtcagaccccaccccgtctacccctccagtcagcccagcgcccatcctgcagctcagctgggagcatcattctcctgctttgtacatagggtgtggtcccctggcacgtggccaccatcatgtctaggcctatgctaggaggcaaatggccaggctctgcctgtgtttttctcaacactacttttctgatatgagggcagcacctgcctctgaatgggaaatcatgcaactactcagaatgtgtcctcctcatctaatgctcatctgtttaatggtgatgcctcgcgtacaggatctggttacctgtgcagttgtgaatacccagaggttgggcagatcagtgtctctagtcctacccagttttaaagttcatggtaagatttgacctcatctcccgcaaataaatgtattggtgatttgga

SEQ ID NO: 96156 - DNA, 1074 bp, Artificial Sequence
  derived and/or modified sequence
atggacggcggcagcggcggcctgggcagcggcgacaacgcccccaccacagaagctctcttcgtggctttgggagccggcgtcactgccctatctcatccgttgctgtacgtcaaattgttgatccaggtggggcacgaaccgatgccccccacgttaggcacgaacgttcttggtaggaaagtgctgtaccttcccagcttctttacctacgcaaagtatatcgtgcaggttgatggcaaaatagggttgttccggggcctgtctccacgcctgatgtctaatgcactgagcactgttactcgagggagcatgaagaaagtctttcctccagatgagatcgaacaagtctccaacaaggacgatatgaagacgtctcttaagaaggttgtgaaagaaacatcgtatgagatgatgatgcagtgtgtgagcagaatgctggcccaccccctgcacgtgatctctatgcgctgtatggtgcagttcgttgggagggaggcaaagtactccggtgtcctgagctctatcgggaagatcttcaaggaagaagggcttttaggatttttcgtgggcctaatcccacacttgctgggcgacgtggtatttctatggggctgcaatctgctggcccatttcatcaatgcctatctcgtggatgatagcgttatccaaccaggccccggacaccctgaactctatcaggtgcgcgatggtgattgttctgagcacgcagatctgcctttacctgcaagttggcggcctcatggttgcgaacaactgcgcgccgcgtcctgggctcctcccctgctgccttcagtacagatcttagactccctgctcgaggtacccgaatgcgccgcctgcttttccgccggctgccatcaggatcacgctctgccatggagtaatcttaatcacttgaagaacacagtgtccacgtggcccccatgggttcgaccggaccatctcggtactccagcacgacgactgcagcctaataacaaccagatgtgctcatctcctgccggactccagttccatatctgtcacgtgtctgtccagatgtggggttag

SEQ ID NO: 96157 - DNA, 1170 bp, Artificial Sequence
  derived and/or modified sequence
atgggcgccagcgaccccgaggtggccccctgggcccggggcggcgccgcagggatggctggagcaggtgccggcgctggggctcggggcggcgcagctgccggggtagaggcccgtgcacgggatccgccacctgctcaccgcgcgcatcctcggcacccgcggcctgccgcacaacctagtgccagacgtatggacggtggctccggcggcttgggttctggcgataatgctccaaccactgaagcactattcgtcgcactcggcgccggggtgacagccctgagtcatccgctgctttacgtcaaacttctcattcaggtcggacatgagccaatgccccctactcttggcaccaatgtccttggaagaaaagtgctgtacctgcccagtttcttcacttatgctaagtacattgtgcaagtcgatgggaaaattggcctcttcaggggcctgagcccgcgcctgatgtccaacgccttatccactgtcacgcgtggatcaatgaagaaggttttccctccagacgaaatcgagcaggtgagtaataaggatgatatgaaaacttcactcaaaaaggtggtgaaggaaacttcgtatgagatgatgatgcagtgtgtgagccgcatgcttgcccatcccttgcacgtgatcagtatgcggtgtatggtccagtttgtggggagagaggcaaaatactcaggcgtgttaagttccattggcaagatattcaaagaagagggcctgcttggcttcttcgtcggacttattccgcatctactgggagacgtcgttttcctgtggggatgcaatctgctagcccatttcatcaacgcctacttggtggacgactcagtgagtgatacccccgggggtctgggaaacgaccaaaacccggggtcacagttttctcaggccctcgcaattagatcttacactaaatttgtgatgggaatagcggtgtccatgctgacctacccattccttctggtcggcgatctgatggccgtaaacaactgtggtctgcaagccggccttcctccttatagtcctgtgttcaaatcctggattcattgctggaaatatctgtccgtgcagggtcagctgttccgaggctcatcacttctgttccgtagggtaagctccgggtcctgctttgccttggagtag

SEQ ID NO: 96158 - DNA, 1074 bp, Artificial Sequence
  derived and/or modified sequence
atggatgggggtagcggcggtctcggatctggagacaatgcgcctacaaccgaggctctgttcgttgcactcggggctggggtcaccgcattgtcccacccactgctctacgttaagctcctaattcaggtgggtcatgaacccatgcctcctactcttggaacgaacgtactgggtcggaaagtgctctacttaccaagttttttcacatacgccaaatacatcgtgcaggttgatgggaaaattgggctgttcagaggcctgtcccctcggctgatgtctaacgccctgtccaccgttacccgaggatccatgaagaaagtgtttccacccgacgagatcgaacaggtatcaaataaggatgacatgaagacaagcctcaaaaaggtcgtcaaggagacttcctatgagatgatgatgcagtgtgtaagcaggatgctggcccatcccctccacgtcatctctatgcggtgcatggtgcagtttgttggaagggaagcaaagtattctggagttctctcctctatcgggaagatcttcaaagaagagggcctgctcgggttttttgtggggttgattccacacctcctgggcgacgttgtgtttctctgggggtgtaatctgcttgcacactttattaacgcatatctggtcgacgactctgttatccaacccggacccggacaccccgagttgtaccaggtgagggatggggattgcagtgagcacgccgaccttccacttccagcaagttggaggccccatggctgtgagcagctgcgtgccgcatcgtgggctccacccctgttacctagcgtgcaaatactggatagcctgctagaagtgcctgagtgcgcagcttgtttttcagccggttgtcaccaggatcacgcattgccctggtctaacctcaaccatctgaaaaatacagtctcgacctggccaccctgggtaaggcccgatcatctagggacaccagccaggcggctgcagcccaacaacaaccagatgtgctcctctcccgctggcctacagttccatatttgtcacgtctccgtgcagatgtggggctag

SEQ ID NO: 96159 - DNA, 1170 bp, Artificial Sequence
  derived and/or modified sequence
atgggggcaagtgaccctgaggtggctccgtgggcgcgtggtggagcagcgggaatggcaggggcaggagcgggagccggagctcggggtggggctgccgcaggcgtcgaggccagggcaagagacccccctcccgcacatcgggctcatccacggcatccccgtcctgccgctcaaccttctgcccgtcgcatggatggtgggtccgggggactcggctctggagataacgcccctaccactgaggccttattcgtcgcactcggtgctggagtgactgcccttagtcatcctctgctctacgtgaagctacttattcaggtgggccacgagcccatgcccccaaccctgggtactaacgttctgggaagaaaagtgctgtatctgcctagtttttttacgtatgcgaagtatatagtgcaggttgatggtaaaattggtctattccgaggactgtctccacggttaatgtctaatgcattgagtacagtaacccggggaagcatgaagaaagtgtttccacctgatgaaatcgaacaggtgagcaacaaggatgacatgaagactagcctgaagaaggtagtgaaggagacatcctacgaaatgatgatgcagtgcgtgtcccgaatgctggcacacccactgcatgttatttcaatgcggtgtatggtccagtttgtagggagagaggcgaagtattctggcgtccttagctccattggaaagatctttaaggaggaaggactcttgggattcttcgttggcctcatccctcacctgttaggggatgtggtgtttctttgggggtgtaacctgctggctcatttcatcaatgcctatctggtagacgattctgtttcagacacccctgggggactcggaaacgaccagaaccctgggtcgcagttcagccaggctcttgcgatccgcagttatactaaatttgtaatggggatagcagtgagtatgctgacatatccgttcttgctggtgggcgatctgatggcagtgaacaactgtggactccaggctggtctccccccttacagcccagtgttcaaatcctggatccattgttggaaatatctatcggttcaggggcagttgttccggggatccagcctgctttttcggcgtgtctccagcggtagctgttttgccctcgaatag

SEQ ID NO: 96160 - protein, 894 aa, Artificial Sequence
  derived and/or modified sequence
MGVKKKKEMQVAALTICHQDLETLKSFADVEGKNLASLLLHCVQLTDGVSQIHYIKQIVPLLEKADKNGMCDPTIQSCLDILAGIYLSLSLKNPLKKVLASSLNSLPDFFLPEAMHRFTSRLQEELNTTDLYSYRKVTDNISSCMENFNLGRASVNNLLKNVLHFLQKSLIEILEENRKCAGNHIIQTQLMNDLLVGIRVSMMLVQKVQDFQGNLWKTSDSPIWQNMCGLLSIFTKVLSDDDLLQTVQSTSGLAIILFIKTMFHPSEKIPHLISSVLLRSVDCTSVPEWFMSSCRSLCCGDISQSAVLFLCQGTLAMLDWQNGSMGRSGEALLLDTAHVLFTLSSQIKEPTLEMFLSRILASWTNSAIQVLESSSPSLTDSLNGNSSIVGRLLEYVYTHWEHPLDALRHQTKIMFKNLLQMHRLTVEGADFVPDPFFVELTESLLRLEWHIKGKYTCLGCLVECIGVEHILAIDKTIPSQILEVMGDQSLVPYASDLLETMFRNHKSHLKSQTAESSWIDQWHETWVSPLLFILCEGNLDQKSYVIDYYLPKLLSYSPESLQYMVKILQTSIDAKTGQEQSFPSLGSCNSRGALGALMACLRIARAHGHLQSATDTWENLVSDARIKQGLIHQHCQVRIDTLGLLCESNRSTEIVSMEEMQWIQFFITYNLNSQSPGVRQQICSLLKKLFCRIQESSQVLYKLEQSKSKREPENELTKQHPSVSLQQYKNFMSSICNSLFEALFPGSSYSTRFSALTILGSIAEVFHVPEGRIYTVYQLSHDIDVGRFQTLMECFTSTFEDVKILAFDLLMKLSKTAVHFQDSGKLQGLFQAALELSTSTKPYDCVTASYLLNFLIWQDALPSSLSAYLTQQVACDNGDRPAAVVERNTLMGLY

SEQ ID NO: 96161 - DNA, 2685 bp, Artificial Sequence
  derived and/or modified sequence
atgggcgtgaagaagaagaaggagatgcaggtggccgccctgaccatctgccaccaggacctggagaccctgaagagcttcgccgacgtggagggcaagaacctggccagcctgctgctgcactgcgtgcagctgaccgacggcgtgagccagatccactacatcaagcagatcgtgcccctgctggagaaggccgacaagaacggcatgtgcgaccccaccatccagagctgcctggacatcctggccggcatctacctgagcctgagcctgaagaaccccctgaagaaggtgctggccagcagcctgaacagcctgcccgacttcttcctgcccgaggccatgcacagattcaccagcagactgcaggaggagctgaacaccaccgacctgtacagctacagaaaggtgaccgacaacatcagcagctgcatggagaacttcaacctgggcagagccagcgtgaacaacctgctgaagaacgtgctgcacttcctgcagaagagcctgatcgagatcctggaggagaacagaaagtgcgccggcaaccacatcatccagacccagctgatgaacgacctgctggtgggcatcagagtgagcatgatgctggtgcagaaggtgcaggacttccagggcaacctgtggaagaccagcgacagccccatctggcagaacatgtgcggcctgctgagcatcttcaccaaggtgctgagcgacgacgacctgctgcagaccgtgcagagcaccagcggcctggccatcatcctgttcatcaagaccatgttccaccccagcgagaagatcccccacctgatcagcagcgtgctgctgagaagcgtggactgcaccagcgtgcccgagtggttcatgagcagctgcagaagcctgtgctgcggcgacatcagccagagcgccgtgctgttcctgtgccagggcaccctggccatgctggactggcagaacggcagcatgggcagaagcggcgaggccctgctgctggacaccgcccacgtgctgttcaccctgagcagccagatcaaggagcccaccctggagatgttcctgagcagaatcctggccagctggaccaacagcgccatccaggtgctggagagcagcagccccagcctgaccgacagcctgaacggcaacagcagcatcgtgggcagactgctggagtacgtgtacacccactgggagcaccccctggacgccctgagacaccagaccaagatcatgttcaagaacctgctgcagatgcacagactgaccgtggagggcgccgacttcgtgcccgaccccttcttcgtggagctgaccgagagcctgctgagactggagtggcacatcaagggcaagtacacctgcctgggctgcctggtggagtgcatcggcgtggagcacatcctggccatcgacaagaccatccccagccagatcctggaggtgatgggcgaccagagcctggtgccctacgccagcgacctgctggagaccatgttcagaaaccacaagagccacctgaagagccagaccgccgagagcagctggatcgaccagtggcacgagacctgggtgagccccctgctgttcatcctgtgcgagggcaacctggaccagaagagctacgtgatcgactactacctgcccaagctgctgagctacagccccgagagcctgcagtacatggtgaagatcctgcagaccagcatcgacgccaagaccggccaggagcagagcttccccagcctgggcagctgcaacagcagaggcgccctgggcgccctgatggcctgcctgagaatcgccagagcccacggccacctgcagagcgccaccgacacctgggagaacctggtgagcgacgccagaatcaagcagggcctgatccaccagcactgccaggtgagaatcgacaccctgggcctgctgtgcgagagcaacagaagcaccgagatcgtgagcatggaggagatgcagtggatccagttcttcatcacctacaacctgaacagccagagccccggcgtgagacagcagatctgcagcctgctgaagaagctgttctgcagaatccaggagagcagccaggtgctgtacaagctggagcagagcaagagcaagagagagcccgagaacgagctgaccaagcagcaccccagcgtgagcctgcagcagtacaagaacttcatgagcagcatctgcaacagcctgttcgaggccctgttccccggcagcagctacagcaccagattcagcgccctgaccatcctgggcagcatcgccgaggtgttccacgtgcccgagggcagaatctacaccgtgtaccagctgagccacgacatcgacgtgggcagattccagaccctgatggagtgcttcaccagcaccttcgaggacgtgaagatcctggccttcgacctgctgatgaagctgagcaagaccgccgtgcacttccaggacagcggcaagctgcagggcctgttccaggccgccctggagctgagcaccagcaccaagccctacgactgcgtgaccgccagctacctgctgaacttcctgatctggcaggacgccctgcccagcagcctgagcgcctacctgacccagcaggtggcctgcgacaacggcgacagacccgccgccgtggtggagagaaacaccctgatgggcctgtactag

SEQ ID NO: 96162 - DNA, 2685 bp, Artificial Sequence
  derived and/or modified sequence
atgggtgtcaagaagaaaaaagaaatgcaggtagccgccctcacaatttgtcatcaggacctcgaaactctgaaaagctttgccgacgtcgagggcaagaacctcgcatccttgttgctgcactgtgtgcagctgaccgacggcgtttcccaaattcattacataaagcagattgtcccactccttgaaaaagcggataagaacggaatgtgtgatccaaccatccagtcttgcctggacatccttgccgggatttatctgtctctgtcactaaaaaacccccttaaaaaagtcctagcatcatccttaaatagtcttccagatttctttctgcccgaggctatgcaccgcttcacatccagactgcaggaggagttaaacacaaccgacctctactcctaccgaaaggtgaccgataacatatctagttgcatggaaaattttaatttggggcgggctagcgtaaataacctcctgaagaacgtgctccacttcctgcaaaagagcttgatcgagatcctcgaagagaaccggaagtgtgcaggaaatcatatcatccagacgcaactgatgaatgacctgctcgtggggatccgtgtgtccatgatgctcgtgcagaaagtacaggactttcaggggaatctgtggaaaacatccgactccccaatatggcagaatatgtgtgggctgttgtctatcttcacaaaggttctgagcgacgacgatctgctccagacagtacaaagtacttctgggctggcaattatactgttcattaaaactatgttccacccaagcgaaaaaattccacacttgatctcgagcgtgctgctgcgctccgtggattgcacttcggttcccgagtggttcatgagctcttgcaggtccctgtgctgcggcgatattagccagtccgcggtgctgttcctgtgccagggtacactggccatgcttgactggcagaacggttcaatgggccgctcaggagaggccctcctgctggacacagcccacgtgctgttcaccctatcttcccagatcaaagaaccaaccctcgagatgttcctgtccagaatacttgcctcatggaccaattccgcaatacaagttctggagtcatccagcccttctctcacagactcactcaacggaaatagttctatcgtgggccggctgttggagtacgtatatacccattgggaacatcctctcgacgccctcagacaccagaccaagataatgttcaaaaatctccttcagatgcacagattgacagtcgagggggccgacttcgtgcccgaccccttcttcgtcgagctcacagagtcactgttaagactggaatggcacatcaaaggtaagtacacttgtctcggctgcctggtcgagtgtattggggtagagcacattctggccatcgataagaccatcccgagccagatactggaggtgatgggagatcagagtctcgtgccatatgcaagcgacctgttagaaactatgtttagaaaccacaagtcccacctcaagagtcagactgccgagtccagctggatcgaccaatggcacgagacttgggtgagcccgctcctgttcattttatgcgagggaaaccttgaccagaagagttacgttattgactattacttacctaagctgctatcctattcacccgagtctctccagtacatggttaagatcctgcaaacgtccattgacgccaagaccggccaggagcagagcttccctagcctgggcagttgcaactctaggggcgctctgggcgcgctgatggcttgcctccggattgcccgagctcacggccatttgcagagcgcgacagatacttgggagaatctggtgtcagacgcaagaattaagcaggggctgattcatcagcattgtcaagtgcgtattgatactctgggtcttttgtgtgaaagcaacaggtctacagagatagtcagtatggaagagatgcaatggattcagttttttataacctacaatctgaacagtcagagtcctggtgtgcgccagcagatctgtagcctgctgaagaagctcttttgcagaattcaggagtcatctcaagtactgtataagttggagcaaagtaagagtaagcgcgagccagaaaacgaactaaccaaacagcatccaagcgtgagcctccagcagtataaaaacttcatgtcctcgatctgcaactccctgtttgaggcactgtttccagggagctcatattctacacgattcagcgctctgaccattctgggaagtattgccgaagtgtttcatgtaccagaagggcgaatctatactgtgtaccagcttagccatgatatcgacgttggaaggtttcaaaccctgatggagtgctttacctctacctttgaggacgtgaaaatcttagcttttgatctgctaatgaagctgtcaaaaaccgccgtgcactttcaggactccggaaagctacaaggactcttccaggccgccctggagctctccacaagtacgaaaccatatgattgtgttaccgcctcatacttgctgaactttctgatttggcaagacgctctgccatcctctctctccgcctatctgacacagcaggtcgcgtgcgataatggcgaccggccagccgccgtagtggaaagaaacacgttgatgggcctgtactag

SEQ ID NO: 96163 - DNA, 2685 bp, Artificial Sequence
  derived and/or modified sequence
atgggcgtgaagaagaagaaggagatgcaggtggccgccctgaccatctgccaccaggacctggagaccctgaagagctttgctgatgtggagggcaagaacctggccagcctgctgctgcactgtgtgcagctgacagatggagtgtcccagatccactacatcaagcagatcgtgcccctgctggagaaggctgacaagaatggcatgtgtgaccccaccatccagagctgcctggacatcctggccggcatctacctgagcctgagcctgaagaaccccctgaagaaggtgctggccagcagcctgaacagcctgcctgacttcttcctgcctgaggccatgcaccgcttcaccagccggctgcaggaggagctgaacaccacagacctgtacagctacaggaaggtgacagacaacatcagcagctgcatggagaacttcaacctgggccgggcctctgtgaacaacctgctgaagaatgtgctgcacttcctgcagaagagcctgattgagatcctggaggagaacagaaaatgtgccggcaaccacatcatccagacccagctgatgaatgacctgctggtgggcatccgggtgtccatgatgctggtgcagaaggtgcaggacttccagggcaacctgtggaagaccagtgacagccccatctggcagaacatgtgtggcctgctgagcatcttcaccaaggtgctgagtgatgatgacctgctgcagacagtgcagagcaccagcggcctggccatcatcctcttcatcaagaccatgttccaccccagcgagaagatcccccacctgatcagctctgtgctgctgcggtctgtggactgcacctctgtgcctgagtggttcatgagcagctgccgcagcctgtgctgcggggacatcagccagagcgctgtgctcttcctgtgccagggcaccctggccatgctggactggcagaatggctccatgggccgcagcggggaggccctgctgctggacacagcccacgtgctcttcaccctgagcagccagatcaaggagcccaccctggagatgttcctgagccgcatcctggcctcctggaccaacagcgccatccaggtgctggagagcagcagccccagcctgacagacagcctgaatggaaacagcagcatcgtgggccgcctgctggagtatgtgtacacccactgggagcaccccctggatgccctgcggcaccagaccaagatcatgttcaagaacctgctgcagatgcaccggctgactgtggagggcgctgactttgtgcctgaccccttctttgtggagctgacagagagcctgctgcggctggagtggcacatcaagggcaagtacacctgcctgggctgcctggtggagtgcattggagtggagcacatcctggccatcgacaagaccatccccagccagatcctggaggtgatgggagaccagagcctggtgccctatgccagtgacctgctggagaccatgttcaggaaccacaagagccacctgaagagccagacagctgagagctcctggattgaccagtggcatgagacctgggtgagccccctgctcttcatcctgtgtgagggcaacctggaccagaagagctatgtgattgactactacctgcccaagctgctgagctacagccctgagagcctgcagtacatggtgaagatcctgcagaccagcattgatgccaagacaggccaggagcagagcttccccagcctgggcagctgcaacagcagaggagccctgggcgccctgatggcctgcctgagaattgcccgggcccacggccacctgcagagcgccacagacacctgggagaacctggtgtctgatgcccgcatcaagcagggcctcatccaccagcactgccaggtgagaattgacaccctgggcctgctgtgtgagagcaacagaagcacagagatcgtgtccatggaggagatgcagtggatccagttcttcatcacctacaacctgaacagccagagccctggggtgcggcagcagatctgcagcctgctgaagaagctgttctgccgcatccaggagagcagccaggtgctgtacaagctggagcagagcaagagcaagcgggagccagaaaatgagctgaccaagcagcaccccagcgtgtccctgcagcagtacaagaacttcatgagcagcatctgcaacagcctgtttgaggccctcttccctggcagcagctacagcacccgcttcagcgccctgaccatcctgggcagcattgctgaggtgttccacgtgcctgagggccgcatctacacagtgtaccagctgagccatgacattgatgtgggccgcttccagaccctgatggagtgcttcaccagcacctttgaagatgtgaagatcctggcctttgacctgctgatgaagctgagcaagacagctgtgcacttccaggacagcggcaagctgcagggcctcttccaggccgccctggagctgagcaccagcaccaagccctatgactgtgtgacagccagctacctgctgaacttcctgatctggcaggatgccctgcccagcagcctgagcgcctacctgacccagcaggtggcctgtgacaatggagacaggcctgctgctgtggtggagaggaacaccctgatgggcctgtactag

SEQ ID NO: 96164 - DNA, 2685 bp, Artificial Sequence
  derived and/or modified sequence
atgggcgtgaagaagaagaaggagatgcaggtggccgccctgaccatctgtcaccaagacctggaaacactcaaaagcttcgcagatgtagaagggaaaaatcttgccagcctcttactccattgtgttcaactaaccgacggcgtgagccagatccattatatcaaacagattgtgccgctactcgagaaggctgacaagaacggaatgtgcgatccgactatacagagctgcctggatattctggcagggatttacctcagcctatcccttaagaaccccttaaagaaagtgctggcaagtagcctgaacagcctgcccgactttttcctgcccgaggccatgcacagatttacatcaaggctgcaggaggaactgaatactaccgatctgtactcctatagaaaagtcaccgataacatcagcagttgtatggagaacttcaatttgggaagggcctccgtgaacaatctgctgaagaatgtactgcatttccttcaaaagagcttgatcgaaattctcgaggaaaaccgcaaatgtgctggtaaccacattatccaaacccaactgatgaacgacctcttggtgggcattagagtttctatgatgctggtgcagaaggtgcaggactttcagggcaatttgtggaagaccagcgactcacccatctggcagaacatgtgcggtttactctcaatctttaccaaagttctttcagacgatgatctactgcaaacagtccaatcaacaagtggcctggcaatcatcctgttcatcaagaccatgttccacccaagtgaaaagatccctcacttgatctcaagcgtcttgctgagatccgtagactgtacatctgtccccgaatggtttatgtctagctgccgctccctctgctgtggagatattagtcagagcgccgtcctgttcctctgtcagggcactctggcaatgctcgattggcagaacgggagcatgggaagatctggggaggctctgctgctggatactgcacatgtgctgtttaccttgagcagccaaatcaaggaacctacattagagatgttcctctctaggatactggcttcgtggaccaactctgctatccaggtcctcgagtcttctagcccctctctgacagactcccttaacggaaacagcagtatcgttggacggctgctggaatacgtctacacacactgggaacaccctctggacgccctaagacatcagactaaaatcatgtttaagaacctgctccaaatgcacagattaactgtggaaggtgccgacttcgtgcccgatcccttctttgtggaactgactgaaagcctgctgcgactggaatggcatattaagggcaagtatacctgcctagggtgcttggtcgagtgcatcggcgtggaacacattctggctatcgacaagacgataccttctcaaatcctcgaggtcatgggagaccagagcttggtgccttatgcgagtgaccttctggagacaatgttccgcaatcacaaaagtcacctcaagtcgcagaccgcagagtcaagctggatcgatcagtggcatgagacttgggtctctccactgctattcattctatgcgagggcaacctggatcaaaagtcctacgtgattgactactacctgccaaagctcctcagctatagccctgagtccctgcagtacatggtaaagattctgcagacatcaatcgacgcgaaaaccgggcaggaacagagcttcccttcattagggtcttgtaactcgaggggggccctgggcgccttgatggcatgtttgagaatcgctcgagcccatggacacctccagtccgccacagatacatgggagaacctggtgtctgatgccaggatcaaacaggggctcatccaccaacactgtcaggtgaggattgacaccttgggattgttgtgcgaatccaatagaagtaccgaaatcgtctctatggaagagatgcagtggatacagtttttcatcacttacaacctcaactcgcagagccctggggtccgacaacagatctgttcactgctgaaaaaactgttctgccgcattcaagagtccagtcaggttctttacaaattagaacagagtaaatcgaaacgtgagcccgaaaacgagctgacaaagcagcacccttccgtctccttgcaacaatacaagaattttatgtccagtatttgcaattctcttttcgaggcactgttcccaggatcgagctactctacaagattcagtgcccttacgatactggggtccatagcggaggtcttccacgtaccagagggcagaatttatacggtgtatcaactgagccacgatatcgacgttggcagattccagacactcatggaatgcttcacaagcaccttcgaggatgttaagatactggcctttgatctgctgatgaaactaagcaaaacagcagtccacttccaggattcaggcaagttacaaggcctgttccaggccgcactcgaactgtccactagtactaaaccctacgactgcgtgacggcctcttatttactgaattttcttatttggcaggatgcccttcctagtagcctgtcagcctacctgacgcagcaggtcgcctgtgacaacggagatcgaccggccgcagttgtggagcggaacacactcatggggctttattag

SEQ ID NO: 96165 - DNA, 2685 bp, Artificial Sequence
  derived and/or modified sequence
atgggggtaaagaagaagaaggagatgcaggtcgccgcactgaccatttgccaccaggacctcgagacccttaaaagttttgcagacgtcgaaggaaaaaacctggcttctcttcttctgcactgtgtacagctgactgatggagtgtcccagatacactatattaagcaaatcgtgccactcctagagaaagccgataaaaacggcatgtgtgaccccactatccagtcctgcttagatatcctagccggaatatatctttccctttctttgaagaatccattaaagaaagtgctcgcttcaagcctgaatagcctgcctgactttttcctgcctgaagccatgcatcgtttcacaagtcgccttcaagaggagttaaatacaacggacctgtatagttatcgtaaggtcaccgataatataagttcctgcatggagaattttaacctggggcgagcttcggtaaataatctcctcaagaatgtgctgcacttcctccagaaaagcctcattgagatcttggaagagaataggaaatgtgcgggaaaccatatcatacagacccagctcatgaatgatcttctggttgggatcagggtcagcatgatgctagtgcaaaaggtccaggacttccaaggtaacttgtggaaaacctccgactctcctatctggcagaatatgtgcggcctcctctcaatctttacaaaagtcttatctgatgatgatctccttcaaactgtccagtctacaagcggactggctattatcttgttcattaagaccatgttccatccgtcggagaaaatcccacatctaatttccagcgttcttctgcgctcagtagattgcacctctgtgcccgagtggttcatgtctagctgcagaagcctctgttgcggcgatatctcccagtcggccgtgctgttcctttgccaaggcactctggcaatgttggattggcagaatggctctatgggcagatcaggcgaagccctcctgttggatacagcccatgtcctgtttacactctcctcgcaaataaaggagccgacgctggaaatgttcctgtctagaatccttgcaagctggacaaactcagccatccaagtcttggagagctccagcccatcactgaccgactcactgaatggtaactcctcaattgtgggcaggttgctagagtacgtttatacccactgggaacaccctctggacgctctgaggcaccagaccaagataatgtttaaaaacttactgcaaatgcatcgcctgaccgtcgaaggcgctgattttgtgcccgatcccttttttgtggaactcaccgaatcgctccttcgcctggaatggcacattaagggtaaatatacctgcctggggtgcctggttgaatgcatcggggtagaacatatcttggctattgacaaaactatccctagtcagatacttgaagtaatgggagatcaatcactggtaccctatgcctcagatctcctagagaccatgttcaggaatcataaatcgcacttaaagagtcagaccgccgaatcttcatggatcgatcagtggcatgaaacttgggtgagtccgctgctctttatcctatgcgagggtaacctggaccaaaaaagttacgttattgactattacttacccaagttactctcctattcccccgagagcctgcagtacatggtcaagatcctgcagacctccatagacgctaagacaggtcaagagcagagctttcccagcctcggttcctgcaatagccgcggagcgctgggtgccttgatggcttgtctgcggatcgccagagcccacggccatctgcagtccgcaacggatacttgggaaaatcttgtcagtgatgccaggatcaagcagggtctcattcatcaacactgccaagttaggattgacactctagggctgttgtgtgaaagtaacagatcaacagagattgtcagtatggaggagatgcagtggatccagttttttatcacctacaaccttaactctcagtcacctggcgtcagacagcaaatttgttcactcctcaagaagttattttgcagaatacaggaaagctcgcaggtgctttacaaattagaacagtcaaagtcaaagagagagcccgagaacgagctcactaaacaacacccatctgtgtctctgcagcagtacaaaaactttatgagcagcatctgtaattccctttttgaagccttatttccaggctcttcatactcgacacgcttctccgccctcaccatattaggctcaatcgccgaagtgtttcacgtgcccgagggaaggatttacacggtgtaccagctgtcccacgatatcgatgtgggtagattccagactctcatggaatgtttcacctcgacatttgaggatgtgaagattctggccttcgatttactgatgaagctaagtaagaccgcggtacacttccaggactccggaaagttacagggtctgttccaggcagccttagagctctcaacgtctacgaagccttacgactgtgtgactgcctcttatctgctgaacttccttatctggcaggacgctcttcctagcagtttatctgcctatctcactcagcaggttgcttgcgacaatggggacagaccagcagccgtggtggagcggaacaccctaatgggtctctattag

SEQ ID NO: 96166 - DNA, 3043 bp, Artificial Sequence
  derived and/or modified sequence
gcgctgcgagcctcggagacgccgtagaaggagacctgcttccgggactggaccaggcgcctgcgactcttctcagacgccgacgtgcacgagtgactactattaattctatttaaaatgggtgtaaagaagaagaaagaaatgcaagttgctgcgctgaccatttgccatcaggaccttgaaactttgaaatcttttgctgatgtggaagggaaaaatctagcttctttgctgttacattgtgtgcaactcacggatggagtgtcacaaatccattatattaaacagattgtgcctctgctggagaaagcagataaaaatggcatgtgtgatcccactattcaaagttgtttggatatcttagcaggcatttatctttctttgagtctaaagaatcccttgaagaaagtattggcaagctcactaaatagcctgcctgatttttttctacctgaggctatgcaccgttttacttctcgtcttcaggaagaattgaatactactgacttatactcttacaggaaagttactgacaatatttcttcctgtatggagaactttaacttgggtagagcaagtgttaataatctgcttaaaaatgtgcttcattttctgcagaagagtttaattgaaatcctggaagaaaatagaaaatgtgctggaaatcatattattcaaacacagttgatgaatgacttactggtaggcattagagtttcaatgatgttagtacagaaagtacaagatttccagggaaatctttggaagacttccgattctcccatatggcaaaatatgtgtggattgctgagtatttttaccaaggttttaagcgatgatgatctgttacagactgtacagagcacatctggattagctattattctttttattaagactatgtttcacccgtctgaaaagattcctcatttgattagcagtgtgctgcttcgttcagtggactgcaccagtgtccccgagtggtttatgagcagctgcaggagcctctgttgtggtgacatctctcagtcagctgtcttattcctctgtcaggggacacttgccatgttggactggcagaacggaagcatgggtcggagtggggaggccctgctcttggatactgcacatgttttgttcaccttgagttcacagattaaagagccaacgctggaaatgtttctgtctagaatcttagcatcctggactaattcagccatacaagtccttgaatcaagttccccgagcctaacggacagcctgaatgggaattcaagtatagttgggagacttttggaatatgtctatacccattgggaacatccattggatgctctgagacaccaaaccaaaatcatgttcaaaaaccttctccaaatgcaccggctcactgtggaaggtgcagatttcgtccctgatcctttctttgtggaattgactgagagtcttttacgattggaatggcatattaaaggaaagtacacgtgccttggttgtttggtagagtgcataggagttgaacatattttggctatagataaaactattccatctcaaatcttagaggtgatgggagaccagtcattggtaccttatgcaagtgacctcttggaaaccatgtttagaaatcataagagtcatttgaaatcccagactgctgagagttcttggattgaccagtggcatgagacttgggtttctcctctcctttttatattgtgtgaaggaaacttggatcaaaaatcttacgtgattgattattacttgccaaaattattaagttacagccctgaaagcttacagtacatggtaaagattcttcagacttctattgatgctaaaactggacaagagcaatctttcccatccttagggtcttgtaatagcaggggggctctgggagctttgatggcatgtctgcgaatagctagagctcatggacatcttcagtctgcaactgatacctgggagaacctcgtgtctgatgcaagaataaagcaaggcttaattcatcagcattgccaagtaaggatagatacattaggcttgctttgtgaaagtaatcggagcacagaaattgtttccatggaagaaatgcagtggattcagttctttattacatacaatcttaacagccagtctccaggagtgcggcaacagatctgttctcttcttaaaaagttgttttgtaggatacaggaaagttctcaggtactttataaattggagcagagtaaatccaaacgtgaaccagagaatgagttaaccaaacagcacccttctgtttctttacagcagtataagaatttcatgtcatccatttgtaacagtctttttgaagcattgtttcctggatcttcctactcgactagattttcagctttaaccattttaggttcaatagctgaagtttttcatgtcccagaaggcagaatttatacagtatatcagctgagtcatgatattgatgttggtcgtttccaaacactaatggaatgttttaccagcacttttgaagacgtgaaaattttagcatttgatcttctgatgaagttatcaaaaacagctgtacattttcaggattcggggaaactgcaaggcttatttcaggcagcattggagctcagcacaagcaccaaaccatacgactgtgtgacagcttcctacctgctgaacttcttaatctggcaggatgctctaccgtcatccttgtctgcctacttaactcagcaagttgcatgtgataatggagataggcctgctgctgtggtggaaaggaacacattaatgggtttgtattgatgtttgctcttatcaaaacgaatagcttagtctcagtattcatttggttagaatatctaatggttaaacatatattttgtggttttttatttaaaagtttatcagcatataagagcaccatgggttctcattatgcaaatgaacattttagtcagctataatacttttttctaaacagtggatttatgttgaataagtacatatacaaatatttattaataaagctcttttgaaatgagaa

SEQ ID NO: 96167 - protein, 127 aa, Artificial Sequence
  derived and/or modified sequence
MPASAARPRPGPGQPTASPFPLLLLAVLSGPVSGRVPRSVPRTSLPISEADSCLTRFAVPHTYNYSVLLVDPASHTLYVGARDTIFALSLPFSGERPRRIDWMVPEAHRQNCRKKGKKEGGSSMLPL

SEQ ID NO: 96168 - DNA, 384 bp, Artificial Sequence
  derived and/or modified sequence
atgcccgccagcgccgccagacccagacccggccccggccagcccaccgccagccccttccccctgctgctgctggccgtgctgagcggccccgtgagcggcagagtgcccagaagcgtgcccagaaccagcctgcccatcagcgaggccgacagctgcctgaccagattcgccgtgccccacacctacaactacagcgtgctgctggtggaccccgccagccacaccctgtacgtgggcgccagagacaccatcttcgccctgagcctgcccttcagcggcgagagacccagaagaatcgactggatggtgcccgaggcccacagacagaactgcagaaagaagggcaagaaggagggcggcagcagcatgctgcccctgtag

SEQ ID NO: 96169 - DNA, 384 bp, Artificial Sequence
  derived and/or modified sequence
atgcctgcctctgctgcccggccacgcccgggtcccggtcaacccaccgctagcccctttccactgctcttgctggctgtgctgagcggacctgtgtccgggcgggtccctcgttccgtccccagaacaagcctgccaatctctgaagctgacagttgtctgacccgatttgccgttccgcacacctataattattctgtgttactggtggaccccgcatcccataccctctatgtcggggccagagacactatcttcgccctatcacttccttttagtggcgaacgccctcgtagaatcgactggatggtgcctgaagctcaccgccaaaactgccggaaaaaagggaagaaagaaggtggtagctctatgctgccactttag

SEQ ID NO: 96170 - DNA, 384 bp, Artificial Sequence
  derived and/or modified sequence
atgcctgccagcgctgcccggccccggcccggccctggccagcccacagccagccccttccccctgctgctgctggccgtgctgagcggccctgtgtctggccgggtgcccaggtctgtgcccaggaccagcctgcccatcagcgaggccgacagctgcctgaccaggtttgctgtgccccacacctacaactacagcgtgctgctggtggaccctgccagccacaccctgtatgtgggcgcccgggacaccatctttgccctgagcctgcccttctctggagagcggcccaggagaattgactggatggtgcctgaggcccaccggcagaactgcaggaagaagggcaagaaggagggcggcagctccatgctgcccctgtag

SEQ ID NO: 96171 - DNA, 384 bp, Artificial Sequence
  derived and/or modified sequence
atgcccgccagcgccgcccggccccggcccggccccggccagcccactgcttcacccttccccttgctactgctagcggttctcagtggcccagtgtcaggccgggtgcccagatcagtcccacggacttcattgcccatctccgaggccgattcttgtctcacaaggtttgccgtcccccatacttataactactccgtactgctggtcgatcctgcttctcatactttgtatgttggtgcgcgtgatacaatttttgctctgtctctgcccttctctggggaacgacctaggcgaatcgactggatggtccccgaagcacatcgacaaaactgtagaaagaagggcaagaaggaggggggcagctcgatgcttccactctag

SEQ ID NO: 96172 - DNA, 384 bp, Artificial Sequence
  derived and/or modified sequence
atgcccgcatctgctgctcggcctcgccctggtccaggccagcccaccgcctccccgtttccgctcctgttgctggcagttctgagtgggcctgtttccgggagggtgcccagatcggtgcctaggaccagcctgccaatcagtgaggccgattcttgtctaaccaggtttgcagtgccgcatacgtacaattactctgtactgctggtggaccctgcaagccataccctgtacgttggcgcacgggacacgatctttgcgctttcattgcccttttcgggagagcgccctcgccgaatcgactggatggtaccggaagcgcatcgccagaactgcagaaagaaagggaaaaaagaaggtgggagcagcatgctccctttgtag

SEQ ID NO: 96173 - DNA, 813 bp, Artificial Sequence
  derived and/or modified sequence
atgctatccgcacattgggagaagaaaaaaacatcactggtcgaactgcaggaacagttgcagcagcttccggcgcttatagcggacctcgagtccatgaccgccaatctgacccatctagaagccagcttcgaagaggtggagaataatctgttgcacctggaggatctgtgtggccagtgcgaactggagcggtgcaaacacatgcagagccagcagttggagaactacaagaaaaacaaaagacggagactcaggacatttaagaccgagcttgatgccgaacacgcccagaaagttttggaaatggagcacactcagcagatgaaactgaaggagcgccaaaagttctttgaagaagcctttcagcaagatatggagcagtatttatcaaccggttatttgcagattgcggagcgcagagaacccattggatccatgagctccatggaggtgaatgtggatatgctggaacagatggacctgatggatattagtgaccaagaggctctggacgtgtttctcaattctggaggcgaggaaaatacggttttgagccctgcacttgggcccgagagctccacgtgtcagaatgaaatcacactccaggtgcccaacccaagtgagctacgagccaagccgccctcctcttccagcacttgtactgactccgccacgagagatatctcagaggggggcgaatcccccgtggttcaaagcgacgaagaagaggtgcaggtcgacacggccctggcgaccagccacacagatcgcgaggccactcctgatggtggcgaagactctgattcctag

SEQ ID NO: 96174 - DNA, 813 bp, Artificial Sequence
  derived and/or modified sequence
atgctgagcgcccactgggagaagaagaagaccagcctggtggagctgcaggagcagctgcagcagctgcctgccctgattgctgacctggagagcatgacagccaacctgacccacctggaggccagctttgaggaggtggagaacaacctgctgcacctggaggacctgtgtggccagtgtgagctggagcgctgcaagcacatgcagagccagcagctggagaactacaagaagaacaagagaagaaggctgcggaccttcaagacagagctggatgctgagcacgcccagaaggtgctggagatggagcacacccagcagatgaagctgaaggagcggcagaagttctttgaggaggccttccagcaggacatggagcagtacctgagcacaggctacctgcagattgctgagcggcgggagcccatcggctccatgagctccatggaggtgaatgtggacatgctggagcagatggacctgatggacatcagtgaccaggaggccctggatgtgttcctgaacagcggcggggaggagaacacagtgctgagccctgccctgggccctgagagcagcacctgccagaatgagatcaccctgcaggtgcccaaccccagcgagctgcgggccaagccacccagcagcagcagcacctgcacagacagcgccacccgggacatcagcgagggcggggagagccctgtggtgcagagtgatgaggaggaggtgcaggtggacacagccctggccaccagccacacagaccgggaggccaccccagatggaggagaggacagcgacagctag

SEQ ID NO: 96175 - DNA, 813 bp, Artificial Sequence
  derived and/or modified sequence
atgctgagcgcccactgggagaagaagaagaccagcctggtggagctgcaggagcagctgcagcagctgcctgctttaattgcagatctggagtctatgaccgctaatctaactcatctcgaagcttccttcgaggaagtggagaacaacctgctgcacctggaggacttgtgtggacagtgcgagctggaaaggtgcaaacacatgcagtctcagcagctcgagaattataagaaaaacaaaagacgacgcctgaggacctttaagacagagctagatgccgagcacgcacagaaggtgctggagatggaacatacccaacagatgaagctgaaagaacgccaaaagttttttgaagaagcattccagcaggacatggaacagtatttgtccactggctacctgcagatcgctgaacggagggagccgattggatccatgtcctccatggaggttaatgtggacatgctggaacagatggaccttatggatatctccgaccaagaggctctagatgtttttctcaactccggtggcgaagaaaacactgttctcagccctgccctgggacccgagagttctacgtgtcagaacgaaatcacactgcaggtgcccaatccttctgagctgcgagctaagcctccgtcgtcctcatctacatgtaccgatagcgccacacgcgatatctctgagggcggcgaaagcccagtagtgcaatctgacgaggaagaagtccaggttgataccgcacttgccacctctcatactgatagagaggccacaccggacggaggcgaagattcagatagttag

SEQ ID NO: 96176 - DNA, 813 bp, Artificial Sequence
  derived and/or modified sequence
atgctcagcgcgcactgggagaagaagaaaacctcactggtcgagctgcaggagcagctgcaacaattaccagccttgatcgctgacctggagtctatgaccgctaatcttacacatctggaagccagtttcgaagaagttgagaacaatctgcttcatttggaggacttgtgcgggcagtgtgagttggaacgctgtaaacacatgcagtcccagcagttagaaaattacaagaaaaacaagcgacggagattgaggaccttcaagactgaactcgacgctgaacacgcacagaaggtcctggaaatggagcacacacagcaaatgaagctgaaggagcggcagaagttcttcgaggaggcgtttcagcaggatatggagcagtatctgtccacgggctacttgcagatcgcggagagacgagagccaatcggtagtatgagctcgatggaggtgaatgtggacatgcttgaacagatggacctgatggacattagcgaccaagaagccctggacgtttttttgaacagcgggggtgaggaaaacactgtgctatcacctgcactgggacctgaaagcagtacgtgccaaaacgaaataacactgcaagttcctaatccctcagagctgcgggctaagcccccatccagctcctctacttgcacggactctgcaactcgcgatattagcgaagggggtgagtctccagtcgtccagtctgacgaagaggaagttcaagtggacacggccctggctacgtcgcacaccgatagagaggctactcctgatggcggagaggatagcgacagctag

SEQ ID NO: 96177 - DNA, 813 bp, Artificial Sequence
  derived and/or modified sequence
atgctgagcgcccactgggagaagaagaagaccagcctggtggagctgcaggagcagctgcagcagctgcccgccctgatcgccgacctggagagcatgaccgccaacctgacccacctggaggccagcttcgaggaggtggagaacaacctgctgcacctggaggacctgtgcggccagtgcgagctggagagatgcaagcacatgcagagccagcagctggagaactacaagaagaacaagagaagaagactgagaaccttcaagaccgagctggacgccgagcacgcccagaaggtgctggagatggagcacacccagcagatgaagctgaaggagagacagaagttcttcgaggaggccttccagcaggacatggagcagtacctgagcaccggctacctgcagatcgccgagagaagagagcccatcggcagcatgagcagcatggaggtgaacgtggacatgctggagcagatggacctgatggacatcagcgaccaggaggccctggacgtgttcctgaacagcggcggcgaggagaacaccgtgctgagccccgccctgggccccgagagcagcacctgccagaacgagatcaccctgcaggtgcccaaccccagcgagctgagagccaagccccccagcagcagcagcacctgcaccgacagcgccaccagagacatcagcgagggcggcgagagccccgtggtgcagagcgacgaggaggaggtgcaggtggacaccgccctggccaccagccacaccgacagagaggccacccccgacggcggcgaggacagcgacagctag

SEQ ID NO: 96178 - protein, 270 aa, Artificial Sequence
  derived and/or modified sequence
MLSAHWEKKKTSLVELQEQLQQLPALIADLESMTANLTHLEASFEEVENNLLHLEDLCGQCELERCKHMQSQQLENYKKNKRRRLRTFKTELDAEHAQKVLEMEHTQQMKLKERQKFFEEAFQQDMEQYLSTGYLQIAERREPIGSMSSMEVNVDMLEQMDLMDISDQEALDVFLNSGGEENTVLSPALGPESSTCQNEITLQVPNPSELRAKPPSSSSTCTDSATRDISEGGESPVVQSDEEEVQVDTALATSHTDREATPDGGEDSDS

SEQ ID NO: 96179 - protein, 44 aa, Artificial Sequence
  derived and/or modified sequence
MLETLRERLLSVQQDFTSGLKTLSDKSREAKVKSKPSWLNQEQF

SEQ ID NO: 96180 - protein, 208 aa, Artificial Sequence
  derived and/or modified sequence
MLETLRERLLSVQQDFTSGLKTLSDKSREAKVKSKPRYEDTWAALHRRAKDCASAGELVDSEVVMLSAHWEKKKTSLVELQEQLQQLPALIADLESMTANLTHLEASFEEVENNLLHLEDLCGQCELERCKHMQSQQLENYKKNKRKELETFKAELDAEHAQKVLEMEHTQQMKLKERQKFFEEAFQQDMEQYLSTGYLQIAERRGDP

SEQ ID NO: 96181 - DNA, 135 bp, Artificial Sequence
  derived and/or modified sequence
atgctcgagactcttcgggagagattgttatcagtgcagcaggatttcaccagcggcctcaagaccctgtcggataagtcgagggaagcaaaagttaaatccaaacccagctggctgaatcaagaacagttctag

SEQ ID NO: 96182 - DNA, 627 bp, Artificial Sequence
  derived and/or modified sequence
atgctggaaactctgcgagagaggctgctgagtgtacagcaagatttcacctccggcttaaaaacccttagcgataaatctagagaggcgaaagtcaaatccaaacctcgctatgaggatacatgggccgcactgcaccgaagagcaaaggattgcgcctccgctggagaacttgtcgactccgaggttgtcatgctatccgcacactgggaaaaaaagaagacaagcctggtggaacttcaggaacagctgcagcagctgcctgctctgatcgcggaccttgaatctatgaccgccaatttgacacacctggaagcctctttcgaagaagtggagaataatctgctccatttagaggatctttgtggccagtgcgagcttgagagatgcaagcacatgcaatcgcagcagcttgagaactataaaaagaacaagaggaaggagcttgaaacattcaaagctgagctggacgccgagcacgcgcaaaaagtcttggagatggagcatacacagcagatgaaactgaaagagcggcagaagttcttcgaagaagctttccagcaggatatggagcagtatctgtcgaccggttacttgcaaattgcagagcggaggggagatccatag

SEQ ID NO: 96183 - DNA, 135 bp, Artificial Sequence
  derived and/or modified sequence
atgctggagaccctgcgggagcggctgctgtctgtgcagcaggacttcaccagcggcctgaagaccctgagtgacaagagccgggaggccaaggtgaagagcaagcccagctggctgaaccaggagcagttctag

SEQ ID NO: 96184 - DNA, 627 bp, Artificial Sequence
  derived and/or modified sequence
atgctggagaccctgcgggagcggctgctgtctgtgcagcaggacttcaccagcggcctgaagaccctgagtgacaagagccgggaggccaaggtgaagagcaagcccaggtatgaggacacctgggccgccctgcacagaagagccaaggactgtgccagcgctggggagctggtggacagcgaggtggtgatgctgagcgcccactgggagaagaagaagaccagcctggtggagctgcaggagcagctgcagcagctgcctgccctgattgctgacctggagagcatgacagccaacctgacccacctggaggccagctttgaggaggtggagaacaacctgctgcacctggaggacctgtgtggccagtgtgagctggagcgctgcaagcacatgcagagccagcagctggagaactacaagaagaacaagaggaaggagctggagaccttcaaggccgagctggatgctgagcacgcccagaaggtgctggagatggagcacacccagcagatgaagctgaaggagcggcagaagttctttgaggaggccttccagcaggacatggagcagtacctgagcacaggctacctgcagattgctgagcggcggggggacccctag

SEQ ID NO: 96185 - DNA, 135 bp, Artificial Sequence
  derived and/or modified sequence
atgctggagaccctgcgggagcggctgctgagcgtgcagcaggactttacatccggcttgaaaacactgtcggacaagtcacgcgaggcgaaggtaaagagtaaacctagctggctaaaccaggaacagttttag

SEQ ID NO: 96186 - DNA, 627 bp, Artificial Sequence
  derived and/or modified sequence
atgctggagaccctgcgggagcggctgctgagcgtgcagcaggacttcacatccggcctgaaaactctctctgacaaatctagagaggcaaaggtgaagagtaaaccacgctacgaagatacttgggcggcactgcaccggcgcgcgaaggattgcgcaagcgctggggaactagtagacagtgaagttgtcatgctttccgcacactgggagaaaaaaaaaaccagcttggtggaactgcaggagcagctccagcagctgcccgcactgattgccgacttagagtccatgacagccaacctcactcatctggaggcttcattcgaggaagtagagaacaacctgcttcatctggaggacctgtgcgggcagtgtgagctcgagcggtgcaagcacatgcagtcacagcagctggagaattataagaaaaataagaggaaggaattagagactttcaaggcagaactcgatgctgaacatgcacagaaagtactggagatggagcatactcaacagatgaaactcaaggagcggcagaagttttttgaagaggcctttcagcaggatatggagcagtacctctcaactggttatctgcaaattgctgaaaggagaggggatccctag

SEQ ID NO: 96187 - DNA, 135 bp, Artificial Sequence
  derived and/or modified sequence
atgttggagacattgagggagagactcctgtccgtgcagcaggacttcacctccggtctgaagaccttgtctgacaagtcccgcgaagccaaggtcaagagcaagcctagctggttgaaccaagaacaattttag

SEQ ID NO: 96188 - DNA, 627 bp, Artificial Sequence
  derived and/or modified sequence
atgctggagacactccgtgagagactgctgtctgtgcagcaggacttcacgtctggacttaaaactctttccgataagtcccgtgaggctaaggtgaaaagtaagccacgttatgaagatacatgggctgccctgcaccggagagctaaagactgcgcctcggccggagagttggtcgatagcgaggtcgtgatgctcagcgcacattgggaaaagaagaagacatcattagtggagctgcaggaacagctgcagcagcttccggcactgatcgcagacttggagagcatgaccgccaacctcacccatctggaggctagtttcgaggaagtggaaaacaatctcctgcatctggaggacctctgtggacagtgtgaattagagagatgcaagcacatgcagtctcagcagttggagaactataaaaagaataagcgcaaggaactggagaccttcaaagcagagctcgatgcggaacacgcacagaaagtgttggagatggagcatacccagcaaatgaaactgaaggaacggcaaaagtttttcgaggaggcgtttcaacaggacatggagcagtacctttctactggataccttcagatcgctgaaaggagaggggatccctag

SEQ ID NO: 96189 - DNA, 135 bp, Artificial Sequence
  derived and/or modified sequence
atgctggagaccctgagagagagactgctgagcgtgcagcaggacttcaccagcggcctgaagaccctgagcgacaagagcagagaggccaaggtgaagagcaagcccagctggctgaaccaggagcagttctag

SEQ ID NO: 96190 - DNA, 627 bp, Artificial Sequence
  derived and/or modified sequence
atgctggagaccctgagagagagactgctgagcgtgcagcaggacttcaccagcggcctgaagaccctgagcgacaagagcagagaggccaaggtgaagagcaagcccagatacgaggacacctgggccgccctgcacagaagagccaaggactgcgccagcgccggcgagctggtggacagcgaggtggtgatgctgagcgcccactgggagaagaagaagaccagcctggtggagctgcaggagcagctgcagcagctgcccgccctgatcgccgacctggagagcatgaccgccaacctgacccacctggaggccagcttcgaggaggtggagaacaacctgctgcacctggaggacctgtgcggccagtgcgagctggagagatgcaagcacatgcagagccagcagctggagaactacaagaagaacaagagaaaggagctggagaccttcaaggccgagctggacgccgagcacgcccagaaggtgctggagatggagcacacccagcagatgaagctgaaggagagacagaagttcttcgaggaggccttccagcaggacatggagcagtacctgagcaccggctacctgcagatcgccgagagaagaggcgacccctag

SEQ ID NO: 96191 - DNA, 1306 bp, Artificial Sequence
  derived and/or modified sequence
ctggggttgcggcgcggcggcgaggaccagaccgggggcggggccggtagtgggagtgcggggcgcgcggtgacagcgcggggttggcggcgtgggacccagggggcgacagaggcagcagcagcccgaggcctgaggagaggagaccggcggcggcggcaatgctggagacccttcgcgagcggctgctgagcgtgcagcaggatttcacctccgggctgaagactttaagtgacaagtcaagagaagcaaaagtgaaaagcaaacccaggtatgaggatacatgggctgcacttcacagaagagccaaagactgtgcaagtgctggagagctggtggatagcgaggtggtcatgctttctgcgcactgggagaagaaaaagacaagcctcgtggagctgcaagagcagctccagcagctcccagctttaatcgcagacttagaatccatgacagcaaatctgactcatttagaggcgagttttgaggaggtagagaacaacctgctgcatctggaagacttatgtgggcagtgtgaattagaaagatgcaaacatatgcagtcccagcaactggagaattacaagaaaaataagaggaaggaacttgaaaccttcaaagctgaactagatgcagagcacgcccagaaggtcctggaaatggagcacacccagcaaatgaagctgaaggagcggcagaagttttttgaggaagccttccagcaggacatggagcagtacctgtccactggctacctgcagattgcagagcggcgaggcgacccataggcagcatgtcatccatggaagtgaacgtggacatgctggagcagatggacctgatggacatatcggaccaggaggccctggacgtcttcctgaactctggaggagaagagaacactgtgctgtcccccgccttagggcctgaatccagtacctgtcagaatgagattaccctccaggttccaaatccctcagaattaagagccaagccaccttcttcttcctccacctgcaccgactcggccacccgggacatcagtgagggtggggagtcccccgttgttcagtccgatgaggaggaagttcaggtggacactgccctggccacatcacacactgacagagaggccactccggatggtggtgaggacagcgactcttaaattgggacatgggcgttgtctggccacactggaatccagttttggctgtatgcggaattccacctggaaagccaggttgttttatagaggttcttgatttttacataattgccaataatgtgtgagaaacttaaagaa

SEQ ID NO: 96192 - protein, 356 aa, Artificial Sequence
  derived and/or modified sequence
MDSSEEHAGCPARGTCPVFLAMSAGTVRYAPSGLCPVLEGNLREEPWGTDSPPQPDQGLPPPLAAVPVPWKSTDPCQGHRESPGALVETSAGEEAQGQEGPAAAQLDVLRLRSSSMEIREKGSEFLKEELHRAQKELKLKDEECERLSKVREQLEQELEELTASLFEEAHKMVREANMKQAASEKQLKEARGKVDTILFAEFQAWRESPTLDKTCPFLERVYREDVGPCLDFTMQELSVLVRAAVEDNTLTIEPVASQTLPTVKVAEVDCSSTNTCALSGLTRTCRHRIRLGDSKSHYYISPSSRARITAVCNFFTYIRYIQQGLVRQDAEPMFWEIMRLRKEMSLAKLGFFPQEA

SEQ ID NO: 96193 - DNA, 1071 bp, Artificial Sequence
  derived and/or modified sequence
atggacagcagcgaggagcacgccggctgccccgccagaggcacctgccccgtgttcctggccatgagcgccggcaccgtgagatacgcccccagcggcctgtgccccgtgctggagggcaacctgagagaggagccctggggcaccgacagccccccccagcccgaccagggcctgcccccccccctggccgccgtgcccgtgccctggaagagcaccgacccctgccagggccacagagagagccccggcgccctggtggagaccagcgccggcgaggaggcccagggccaggagggccccgccgccgcccagctggacgtgctgagactgagaagcagcagcatggagatcagagagaagggcagcgagttcctgaaggaggagctgcacagagcccagaaggagctgaagctgaaggacgaggagtgcgagagactgagcaaggtgagagagcagctggagcaggagctggaggagctgaccgccagcctgttcgaggaggcccacaagatggtgagagaggccaacatgaagcaggccgccagcgagaagcagctgaaggaggccagaggcaaggtggacaccatcctgttcgccgagttccaggcctggagagagagccccaccctggacaagacctgccccttcctggagagagtgtacagagaggacgtgggcccctgcctggacttcaccatgcaggagctgagcgtgctggtgagagccgccgtggaggacaacaccctgaccatcgagcccgtggccagccagaccctgcccaccgtgaaggtggccgaggtggactgcagcagcaccaacacctgcgccctgagcggcctgaccagaacctgcagacacagaatcagactgggcgacagcaagagccactactacatcagccccagcagcagagccagaatcaccgccgtgtgcaacttcttcacctacatcagatacatccagcagggcctggtgagacaggacgccgagcccatgttctgggagatcatgagactgagaaaggagatgagcctggccaagctgggcttcttcccccaggaggcctag

SEQ ID NO: 96194 - DNA, 1071 bp, Artificial Sequence
  derived and/or modified sequence
atggacagttctgaggaacacgccggatgtcccgccaggggaacttgcccggtctttctcgcgatgagtgccggaaccgtccggtatgcccctagtggtctgtgtcccgtgctagaggggaatctgagagaggagccatggggaactgatagccctcctcaacccgaccagggcctgcctcctccgctggctgcagtgcctgtgccgtggaagagcacagatccctgtcaaggacaccgggaaagcccaggcgctcttgtggaaacctccgcaggtgaagaagcccagggacaagaggggccagcggccgcccagctagacgtcttgagactgcgctccagtagcatggagatccgagagaagggcagcgagtttttgaaagaggagttacatagagctcagaaggagcttaaactcaaggatgaggagtgtgaacgactgtctaaagtcagggaacagctagagcaggagctcgaagagcttactgcgtccttatttgaagaggctcacaaaatggttagagaagccaatatgaagcaagccgcctcggaaaaacagctgaaggaagcaaggggcaaggtggacaccatcctattcgcagaatttcaggcgtggagagagtcccccacgctggacaaaacatgcccctttctggagagagtgtacagagaggatgtggggccctgcctggattttacaatgcaggaactgtccgttttggtaagagccgccgtggaagataacaccttgactatagagccggtcgcttctcagactctacctacagtgaaagtcgcagaggtcgactgtagttcaactaatacctgtgctttaagcggcttaacacgcacctgccgccacaggatcaggctgggggatagcaaatctcactactacatctccccatcatctcgggccagaattaccgcagtgtgtaacttttttacttatatcaggtacatccagcagggtctcgtgcgccaggatgccgagcccatgttctgggagatcatgaggctccgcaaagaaatgtccctcgctaagctcgggttctttccccaggaagcgtag

SEQ ID NO: 96195 - DNA, 1071 bp, Artificial Sequence
  derived and/or modified sequence
atggacagcagcgaggagcacgccggctgcccagcccggggcacctgccctgtgttcctggccatgtctgctggcaccgtgcgctatgcccccagcggcctgtgccctgtgctggagggcaacctgcgggaggagccctggggcacagacagccccccccagcctgaccagggcctgcccccacccctggccgctgtgcctgtgccctggaagagcacagacccctgccagggccaccgggagagccctggggccctggtggagaccagcgctggggaggaggcccagggccaggagggccctgctgctgcccagctggatgtgctgcggctgcggagcagctccatggagatccgggagaagggcagcgagttcctgaaggaggagctgcaccgggcccagaaggagctgaagctgaaggatgaagaatgtgagcggctgagcaaggtgcgggagcagctggagcaggagctggaggagctgacagccagcctgtttgaggaggcccacaagatggtgcgggaggccaacatgaagcaggccgccagcgagaagcagctgaaggaggcccggggcaaggtggacaccatcctgtttgctgagttccaggcctggagggagagccccaccctggacaagacctgccccttcctggagcgggtgtaccgggaggatgtgggcccctgcctggacttcaccatgcaggagctgtctgtgctggtgcgggctgctgtggaggacaacaccctgaccatcgagcctgtggccagccagaccctgcccaccgtgaaggtggccgaggtggactgcagcagcaccaacacctgtgccctgagcggcctgaccaggacctgccgccaccgcatccggctgggggacagcaagagccactactacatcagccccagcagccgggcccgcatcacagctgtgtgcaacttcttcacctacatccgctacatccagcagggcctggtgcggcaggatgctgagcccatgttctgggagatcatgaggctgaggaaggagatgagcctggccaagctgggcttcttcccccaggaggcctag

SEQ ID NO: 96196 - DNA, 1071 bp, Artificial Sequence
  derived and/or modified sequence
atggacagcagcgaggagcacgccggctgccccgcccggggcacctgtcccgtcttcctggcaatgtctgcgggcacagtcaggtacgcccccagtggcctgtgccccgtgctggaaggtaatttacgcgaggagccctgggggaccgactcccctccgcagcccgaccaggggctaccccccccccttgcagcggttcccgtaccatggaaatctacagatccatgccaggggcatcgtgagtcacctggcgccctagtcgagaccagtgctggagaagaggcccaaggtcaagaaggtcctgcggctgcacagctcgacgtgctgcggcttagaagctcgtccatggaaattcgggagaagggatcagagtttttaaaagaagagctacaccgagcacaaaaagaactgaagctgaaggacgaagaatgtgagagattatccaaggtgagagaacagttagaacaggagctggaggagttgacagctagtctatttgaagaagcccacaagatggtacgagaagctaatatgaagcaggctgccagtgaaaagcagctcaaggaggctcggggaaaagtcgacacaattctctttgctgagttccaggcgtggagggaatcaccgacattagataaaacctgtccctttctcgagagagtttaccgggaggatgtcggcccatgcctcgatttcacaatgcaggagctgtcggtgctggtacgagctgccgtcgaggataacacattgactatcgagccggtggctagccaaacactgccaaccgttaaggtcgctgaggtggattgctcaagtactaacacatgcgctctcagtggtctaacaaggacctgtaggcatagaatcagactgggggactcaaaaagccactattatatctcgccatcatctagggcacgcattactgcggtttgtaatttcttcacatacatacgctacattcagcaggggctcgtcagacaggacgccgaaccaatgttttgggaaataatgcggctgagaaaagaaatgtcactggcaaagctggggttcttccctcaggaagcctag

SEQ ID NO: 96197 - DNA, 1071 bp, Artificial Sequence
  derived and/or modified sequence
atggattcttctgaggaacacgccggatgccctgcgaggggtacctgcccagtgttcctggccatgtctgcgggaaccgtcagatacgctccctcgggactgtgccccgtcctggaaggcaacctcagagaggagccatggggcactgatagcccgcctcagcccgaccagggcctcccacctccactcgcagctgttcccgtgccgtggaagagtactgatccttgtcaggggcaccgggagtcaccaggcgcactggtggagacttccgctggagaagaggcccagggacaggaaggacccgctgcagcccaactggacgtgctgcgactccggtcttctagtatggaaatcagggagaagggcagtgagtttctgaaagaggagctacatcgggcacaaaaagagctgaagctcaaggacgaggaatgtgaaaggctgtcaaaggtacgtgagcagttggagcaggagctcgaggagttgaccgctagtcttttcgaagaggcccacaagatggtgcgggaggctaacatgaaacaggctgcctcggagaagcaacttaaggaagcgagaggtaaggtcgatacaatcctatttgcagaattccaggcgtggcgggagtcccctaccttagataaaacatgtccatttcttgaacgggtgtacagggaagacgttggaccatgcctcgatttcactatgcaagaactgagcgtactggtgagagccgctgtggaggataacaccctcacaattgagcctgtcgcttcacagacgttgcctaccgtaaaagttgcagaagtggactgttcgtccaccaatacatgcgcgctgtccggactgaccaggacgtgtaggcacaggattcgactgggcgacagtaagagccattactatatctccccttcttccagggcaaggattactgctgtctgcaatttctttacgtacatccgttacatccagcagggactggtccggcaagacgctgaacccatgttttgggagatcatgaggctgagaaaggagatgtctctggccaaactcggctttttcccacaggaagcctag

SEQ ID NO: 96198 - DNA, 2125 bp, Artificial Sequence
  derived and/or modified sequence
ctggtggggggaagaaggctcctgctacctcccttcccggcaccctccagagggaccctcagtctggccttgcaagcatggactcttctgaggagcacgctgggtgccccgcccgagggacatgtcccgtgttcctggccatgagtgcagggactgtccgctacgccccatcaggcctgtgccctgtacttgaggggaacttgagagaagagccctggggcacagacagcccaccccagccagaccagggcctcccgccgccccttgcagctgtcccggtcccctggaagagcacggacccctgccaaggccacagggagtccccaggagccctggtggagacctctgcaggggaggaggcccaaggccaggagggccccgcagccgcccagctggacgtgttgcgcctgcgcagctcttccatggagatccgagagaagggctccgagttcctgaaggaggagctgcacagagcgcagaaggagctgaagctaaaggacgaggaatgtgagcggctgtccaaggtgcgggagcagctagaacaggagctggaagagctgacggccagcctgtttgaggaagctcacaagatggttcgagaagccaacatgaagcaggcggcatcagaaaagcagctgaaggaggctcggggcaaggtggacacaatcctgtttgcagagttccaggcctggagggaatcccccaccctggacaagacctgccccttcctggaaagggtgtaccgagaggacgtgggcccctgcctggacttcacaatgcaggagctctcggtgctggtacgggccgccgtggaggacaacacgctcaccattgagccggtggcttcgcagacgctgcccacagtgaaggtggccgaggttgactgtagcagcaccaacacatgtgccctgagcgggctgacccgcacctgccgccaccgaatccggctcggggactccaaaagccattactacatctcgccatcttcccgggccaggatcaccgcagtgtgcaacttcttcacctacatccgctacatccagcaaggcctggtgcggcaggacgcagagcccatgttctgggagatcatgaggttgcggaaggagatgtcactggccaagctcggcttcttcccccaggaggcttagggcgcggcccaggcctgaaggggagctctgagacagagcaaacacccaccccagaacaagccgacacacagggagacgggggcctggagccagccctgagccagaggcagaatggatggacagacaggccatggaggcagcactgagccagcaccacacgtccatcctgggacagacgggcctggacttcacggcaagacccccctctcttccccactgggttctgccaccaccaggaggatttcaagaaagcaccaaagaccagggagctcggatccatactcggggggcctcagcccttgggaggggacacctgaggcagccagcgccccctccccagtccccagaactgcctgcaggtgccttgttgctggcttgtcttcagaaagggactgttctgggtggctggatctccagggtaccctccaccccagctgccaagccctgggccagcagcacccccttgtggccatcctgtgccttgttcccggtggcctccctattggactactaggaggggctggcagggcctccatagcacagaattgccccaaagccttgttaagatgagtcaagacccctcccccgcttcctcccttcctttcccccttcctccctcccccttcataaaggcctcccttgtcaccttccctcccaccccgtctcagccctgtgctcctggaggccctgctcccaaaaccgctggaaggactggggcactttctgccacagtagaacacagacagggcttcagatcacccacgcctgttttcagctgtgggtggccatgcagacacgcgccctggcatgtggggcctgggtgggcaggcaggacctgggccctcccacccatcagagcccactcaggaccagcgttcggagctcccacctggacgcatccctcaccacgtccggatttccttctttggatggaatgtaacgcgatctctatttaataaaggcaggctttgttggta

SEQ ID NO: 96199 - protein, 145 aa, Artificial Sequence
  derived and/or modified sequence
MLGHCCYFWQVWPASEALAAGPTPSTGSSSPSWKQHIGTSLQKTRGSLPTTTLTSGAGQSTSTGKNPAAGRSLEGALPAGVWPCFAQSPCTGGQQTPSSTGLRSCLVRSPGGKQQRGEAHWGGGAISGVLWEWALHCKIAVTHWA

SEQ ID NO: 96200 - protein, 752 aa, Artificial Sequence
  derived and/or modified sequence
MALLAMHSWRWAAAAAAFEKRRHSAILIRPLVSVSGSGPQWRPHQLGALGTARAYQIPESLKSITWQRLGKGNSGQFLDAAKALQVWPLIEKRTCWHGHAGGGLHTDPKEGLKDVDTRKIIKAMLSYVWPKDRPDLRARVAISLGFLGGAKAMNIVVPFMFKYAVDSLNQMSGNMLNLSDAPNTVATMATAVLIGYGVSRAGAAFFNEVRNAVFGKVAQNSIRRIAKNVFLHLHNLDLGFHLSRQTGALSKAIDRGTRGISFVLSALVFNLLPIMFEVMLVSGVLYYKCGAQFALVTLGTLGTYTAFTVAVTRWRTRFRIEMNKADNDAGNAAIDSLLNYETVKYFNNERYEAQRYDGFLKTYETASLKSTSTLAMLNFGQSAIFSVGLTAIMVLASQGIVAGTLTVGDLVMVNGLLFQLSLPLNFLGTVYRETRQALIDMNTLFTLLKVDTQIKDKVMASPLQITPQTATVAFDNVHFEYIEGQKVLSGISFEVPAGKKVAIVGGSGSGKSTIVRLLFRFYEPQKGSIYLAGQNIQDVSLESLRRAVGVVPQDAVLFHNTIYYNLLYGNISASPEEVYAVAKLAGLHDAILRMPHGYDTQVGERGLKLSGGEKQRVAIARAILKDPPVILYDEATSSLDSITEETILGAMKDVVKHRTSIFIAHRLSTVVDADEIIVLDQGKVAERGTHHGLLANPHSIYSEMWHTQSSRVQNHDNPKWEAKKENISKEEERKKLQEEIVNSVKGCGNCSC

SEQ ID NO: 96201 - DNA, 2259 bp, Artificial Sequence
  derived and/or modified sequence
atggcattgctggccatgcacagctggcggtgggcagcagccgccgcggccttcgaaaaaagacggcacagcgctatcctgattcgccccctcgtcagcgtgagcggaagcgggcctcagtggcgtccacaccagctaggagcattagggaccgcgagagcctatcagattcccgagtctctgaagtctatcacttggcagaggcttggtaaaggcaacagcggccagttcttggacgccgccaaggccctccaggtctggccgctcattgagaagcggacgtgctggcacggccacgccggtggcgggctgcatactgaccctaaagagggcctgaaggatgtcgatacccgtaagattatcaaggctatgctcagttacgtctggcccaaagacaggcccgacttacgggctcgcgtagccatcagcctgggattcttaggaggggctaaggctatgaacatagttgtgccttttatgttcaagtacgccgtggactccctgaatcagatgtctgggaacatgctcaatttgtctgacgcaccgaataccgtggccactatggccacagccgtactgatcggctacggcgttagtagggctggagctgccttctttaacgaagtcagaaacgccgtgttcggcaaggtggctcaaaactctattcgtcgcatcgctaagaacgtctttttgcacctccacaatcttgatctggggtttcacctctcgaggcagacgggggctctgtccaaagccatcgatcgaggcactcgtggtatctcctttgtgttgagtgccctcgtgttcaaccttctgcctatcatgttcgaagttatgctcgtgtctggggtgctgtattacaaatgcggggctcagttcgccctagtcactttaggaactctgggtacctacactgcctttacagtcgcagtcactcggtggcgcaccaggtttcgcattgagatgaacaaggctgacaacgacgccgggaacgccgccatcgatagccttctgaattacgagaccgtgaagtatttcaacaatgagcgctatgaagctcagcggtacgacgggttcctgaagacctacgaaacggcatctctcaagtcgactagcactcttgccatgctgaacttcggccagtccgcaatcttcagtgtcggtctcactgccatcatggtgcttgcctctcagggcatagtggctggaacacttactgtcggtgacctggtaatggtcaatggcctcttatttcagctctcactccccctcaatttcctcgggaccgtttaccgggagactcggcaggcattgatcgatatgaacactctgttcaccctgctcaaggtagatacccagatcaaggacaaggtgatggcatctcccctccagattacccctcagacggcaacagtggccttcgataatgtgcatttcgagtacattgagggtcaaaaagtgctgagcggcattagcttcgaggttcccgcgggcaagaaagtggccattgtgggaggcagtggatctggcaagagcactatcgtccgactgctgtttagattctacgaaccacagaaaggatccatctatctcgccggccagaacatccaggacgtcagtttggaaagtctgagacgcgccgtgggcgtggtgccgcaggacgctgtgctctttcacaatacaatttattacaatttgctgtacggcaatatcagtgccagccccgaggaagtctacgcggttgcgaaacttgcagggttgcacgacgccattctgcgaatgccacacggctatgatactcaggtcggcgagaggggccttaagctctccggaggcgagaagcagcgcgtcgctatcgcccgtgccatactgaaagatcctcccgtcatactgtacgacgaagcaacgagcagtctcgacagtatcaccgaggagaccatccttggcgcaatgaaggacgtggtaaaacaccgcactagcattttcatagctcacaggctctccactgttgtggacgctgatgagatcatcgtcctggaccaaggaaaggtggctgagaggggaacacatcacggccttctcgcaaaccctcattcaatttattccgaaatgtggcacacccaaagcagccgagtgcaaaaccatgacaaccccaaatgggaggccaaaaaggagaatattagcaaagaagaagaacggaaaaaactccaggaggagattgtgaattcagtcaaaggatgcggtaattgttcttgttag

SEQ ID NO: 96202 - DNA, 2259 bp, Artificial Sequence
  derived and/or modified sequence
atggccctgctggccatgcacagctggcgctgggccgctgctgctgctgcctttgagaagagaagacacagcgccatcctgatccggcccctggtgtctgtgtctggcagcggcccccagtggaggccccaccagctgggcgccctgggcacagcccgggcctaccagatccctgagagcctgaagagcatcacctggcagaggctgggcaaaggaaacagcggccagttcctggatgctgccaaggccctgcaggtgtggcccctcatcgagaagaggacctgctggcacggccacgccggcggcggcctgcacacagaccccaaggagggcctgaaggatgtggacaccaggaagatcatcaaggccatgctgtcctatgtgtggcccaaggacagaccagacctgcgggcccgggtggccatcagcctgggcttcctgggcggggccaaggccatgaacatcgtggtgcccttcatgttcaagtatgctgtggacagcctgaaccagatgagcggcaacatgctgaacctgagtgatgcccccaacacagtggccaccatggccacagctgtgctgattggctacggcgtgtccagagctggagctgccttcttcaatgaggtgagaaatgctgtgtttgggaaggtggcccagaacagcatcagaagaattgccaagaatgtgttcctgcacctgcacaacctggacctgggcttccacctgagccggcagacaggagccctgagcaaggccatcgaccggggcacccggggcatcagctttgtgctgagcgccctggtgttcaacctgctgcccatcatgtttgaggtgatgctggtgtctggagtgctgtactacaagtgtggggcccagtttgccctggtgaccctgggcaccctgggcacctacacagccttcaccgtggccgtgacccgctggaggacccgcttccgcatcgagatgaacaaggctgacaatgatgctggaaatgctgccatcgacagcctgctgaactatgagaccgtgaagtacttcaacaatgaaagatatgaggcccagagatatgatggcttcctgaagacctatgaaacagccagcctgaagagcaccagcaccctggccatgctgaactttggccagagcgccatcttctctgtgggcctgacagccatcatggtgctggccagccagggcatcgtggccggcaccctgactgtgggggacctggtgatggtgaatggcctgctcttccagctgagcctgcccctgaacttcctgggcaccgtgtaccgggagacccggcaggccctgattgacatgaacaccctcttcaccctgctgaaggtggacacccagatcaaggacaaggtgatggccagccccctgcagatcaccccccagacagccaccgtggcctttgacaacgtgcactttgagtacatcgagggccagaaggtgctgagcggcatcagctttgaggtgcctgctgggaagaaggtggccatcgtgggcggcagcggcagcggcaagagcaccatcgtgcggctgctcttccgcttctatgagccccagaagggcagcatctacctggccggccagaacatccaggatgtgtccctggagagcctgcggcgggctgtgggcgtggtgccccaggatgctgtgctcttccacaacaccatctactacaacctgctgtatggcaacatcagcgccagccctgaggaggtgtatgctgtggccaagctggccggcctgcatgatgccatcctgaggatgccccacggctatgacacccaggtgggggagcggggcctgaagctgagcggcggggagaagcagagggtggccatcgcccgggccatcctgaaggacccccctgtgatcctgtatgatgaggccaccagcagcctggacagcatcacagaggagaccatcctgggcgccatgaaggatgtggtgaagcacaggaccagcatcttcatcgcccaccggctgagcacagtggtggatgctgatgagatcatcgtgctggaccagggcaaggtggccgagcggggcacccaccacggcctgctggccaacccccacagcatctacagcgagatgtggcacacccagagcagccgggtgcagaaccacgacaaccccaagtgggaggccaagaaggagaacatcagcaaggaggaggagaggaagaagctgcaggaggagatcgtgaacagcgtgaagggctgcggcaactgcagctgctag

SEQ ID NO: 96203 - DNA, 2259 bp, Artificial Sequence
  derived and/or modified sequence
atggccctgctggccatgcacagctggcggtgggccgccgccgccgcggcatttgaaaagagaaggcactccgccattctcattaggcccctggtgtcagtgtcagggagtggtcctcagtggcggccgcatcaactgggtgctctgggcacagcccgcgcgtaccagatacccgaaagccttaagagcattacatggcagcggctgggaaaaggcaactctggtcagtttctggatgctgccaaggccctgcaggtatggccgcttatcgaaaagagaacatgctggcacggacatgccggcggggggcttcacaccgacccaaaggaaggtctgaaagacgttgatacccgaaagatcattaaggccatgctcagctacgtctggcctaaggacaggcccgatctgagggctagggttgctatttcgcttgggttccttgggggtgctaaggccatgaatatcgtcgtcccatttatgttcaagtatgccgttgactctttaaaccaaatgtctggcaatatgctgaatctttccgacgctcctaatacagttgctacaatggctacagcggtgttgatcggctacggggtcagtagagctggagcagccttctttaacgaagtgaggaacgctgtctttggtaaggtcgcccagaatagtatccggcggattgccaagaacgtatttctacatctgcacaatctggatttagggtttcatctatcccggcaaaccggagcgcttagcaaggcaattgacaggggtactcggggtattagctttgtgctttcagcgttggtattcaacttactccccataatgtttgaagtgatgctcgtgagcggggtcctttattataaatgcggagcgcagttcgcgctcgttacgttggggaccttaggcacttacaccgcattcacagttgctgtgacacgctggagaactagatttcggatcgagatgaataaggcggataatgacgctggtaatgccgccatagattccctgctgaactatgagacagtaaaatattttaataatgaacgatatgaggcgcagcgatacgacggatttctcaagacttatgagactgccagtctaaagtcaaccagcaccctggcgatgctgaactttggacaaagtgccatcttcagcgttggtttgactgcaattatggtcctagctagccagggcattgtcgcgggaactctcacggtgggagatcttgtgatggtcaatgggctgctgtttcagctgagccttcccttgaatttcttgggaacagtgtaccgggaaaccagacaggcactgattgatatgaacacattatttacactcctgaaggtcgacactcagattaaagacaaagttatggccagtccgttacagattacgccacagaccgccaccgtcgcgttcgacaacgtgcatttcgaatatatcgagggtcagaaagtgctctctggcatttcctttgaggtccccgccggcaaaaaagtggctatagtgggcggctccggctccggaaaatctacaatcgtgagactccttttccggttttacgaaccccagaaagggtcaatatatctggccgggcaaaacatccaggatgtttccttggagtcactgcgacgtgccgttggggtcgttcctcaagatgcagtgctgttccacaacacgatttattacaatctcctgtacgggaatatctccgcctcacccgaagaagtctacgccgtggcaaagctggccggcttgcacgatgctatattacgcatgccccacggctacgacacacaggtgggagagcggggcctgaagctgtctggtggtgaaaaacaacgcgttgccatcgccagagccatactgaaggatccacctgttattctgtacgatgaagcaacaagtagcctggatagcataaccgaggaaaccattttgggcgctatgaaggacgtcgtgaaacacagaacttccatttttatcgcacatcggctgtcgacagtcgtggacgctgatgaaatcattgtcttggaccagggtaaggtggctgagcgcgggacccatcatggtctgttagctaacccgcattctatttactctgaaatgtggcatacgcaaagcagccgagttcagaaccatgataacccaaaatgggaggccaagaaggaaaacattagcaaagaagaggagaggaaaaagctgcaggaggagatcgtgaatagtgtgaaaggatgtggcaattgttcgtgctag

SEQ ID NO: 96204 - DNA, 2259 bp, Artificial Sequence
  derived and/or modified sequence
atggctctgttagcaatgcactcctggcgctgggccgcagccgcagcagcgttcgaaaagcgtagacattccgccattttaatcaggccattggtgtcagtaagcggctcagggcctcagtggcggccacatcagctcggggctttagggactgctcgggcttatcagatccctgagagcctgaagtccattacttggcaacgccttggcaaaggaaattccggccagtttctggatgctgcaaaagcgctacaagtatggccactgatagagaaacgtacttgctggcacggccacgccggaggcggtcttcacaccgatccaaaagaaggtttaaaagatgtcgacaccagaaaaatcattaaagccatgctaagttatgtgtggcctaaggaccgcccagatctcagggccagggtggctatctcactggggttcttgggtggagcaaaggccatgaatatcgttgtcccctttatgttcaagtatgctgtggactcattgaaccagatgagcgggaatatgctgaacctatccgacgcgccaaacactgtggcaacgatggccaccgccgttctgatcggctatggcgtgtcaagggcaggcgctgccttctttaatgaggttcggaatgccgtgtttggcaaggttgcccaaaactccatcaggcgcattgctaaaaatgtgttcctccatctacacaacctagacttaggttttcatttatcgaggcagactggggctttgagcaaggctatcgaccgcggaacacgcggaatttccttcgtgctgagcgcactcgtgttcaatctgttgcccatcatgttcgaagtcatgctcgttagtggcgtgctctattacaagtgtggcgctcaatttgcgttggtgacgctgggcaccttgggaacctacacagcgttcacagtggctgttactcggtggcggacccgattcaggattgagatgaacaaggctgataatgacgcgggtaacgctgctatagattcgttgttgaattacgagacagttaagtactttaataatgagcggtatgaggcccagcgatatgacgggttcctgaagacctacgaaaccgctagcctgaaaagtacttccacgctcgctatgctgaacttcggccaatcagctatttttagtgttggcctgacagccattatggtgctggcttctcagggcattgtggccggtaccctcaccgttggggatcttgttatggtcaacggcctgctgtttcagctcagcctccccctgaatttcctcggcacagtgtatcgggaaacgagacaggccctaattgacatgaatactctgttcacgctactgaaggtagatacacagataaaagataaagtgatggcctccccactacagatcaccccacagaccgccactgttgcgtttgataacgtccactttgaatacatcgagggtcagaaagtgcttagtggcatttcgttcgaagtccctgccggaaagaaggtcgctatcgtggggggatctggtagcggaaagtctactattgtacgattgctgttcagattttatgagccccagaaggggtctatctaccttgctggacagaatattcaggacgtgagcctagagagcttgagaagagctgtaggggtagtgccccaagacgctgtcctttttcataatacaatctattacaatctgctgtatgggaacatatcagccagtccggaggaggtctacgccgtcgcaaaactcgccggacttcatgatgccatcttgcgcatgccacatggttatgatacgcaagtcggggagcggggtttaaagttatccggaggcgagaagcagcgtgtcgccatagctcgggcaatcttgaaagatccaccagtgatcttgtatgatgaggccacgtccagcctggattccatcacagaagaaaccatactgggcgctatgaaagatgtggttaaacacagaacaagcatcttcatcgctcacaggctgtcaacagtcgtcgatgctgatgaaattattgtgctggatcaaggcaaagtagccgagcgtggaacccaccatgggctgctggccaacccacactcgatctacagcgagatgtggcacacccaatccagcagagttcagaatcatgataatccgaaatgggaggcaaaaaaggaaaatattagcaaggaggaggaacggaaaaaattgcaagaggagattgtgaatagcgtaaagggctgcggcaattgttcatgttag

SEQ ID NO: 96205 - DNA, 2353 bp, Artificial Sequence
  derived and/or modified sequence
cgctcaagatggcgctgctcgcgatgcattcttggcgctgggcggccgcggcggctgctttcgaaaagcgccggcactccgcgattctgatccggcctttagtctctgttagcggctcaggtccgcagtggaggccacatcaactcggcgccttgggaaccgctcgagcctaccagattccagagtcattaaaaagtatcacatggcagagattgggaaaaggcaattcaggacagttcttagatgctgcaaaggctctccaggtatggccactgatagaaaagaggacatgttggcatggtcatgcaggaggaggactccacacagacccaaaagaagggttaaaagatgttgatactcggaaaatcataaaagcaatgctttcttatgtgtggcccaaagacaggccagatctacgagctagagttgccatttcgctgggatttttgggtggtgcaaaggccatgaatattgtggttcccttcatgtttaaatatgctgtagacagcctcaaccagatgtcgggaaacatgctgaacctgagtgatgcaccaaatacagttgcaaccatggcaacagcagttctgattggctatggtgtatcaagagctggagctgctttttttaacgaagttcgaaatgcagtatttggcaaggtagcccagaattcaatccgaagaatagccaaaaatgtctttctccatcttcacaacctggatctgggttttcacctgagcagacagacgggagctttatctaaggctattgacagaggaacaaggggtatcagttttgtcctgagtgctttggtatttaatcttcttcccatcatgtttgaagtgatgcttgtcagtggtgttttgtattacaaatgcggtgcccagtttgctttggtaacccttggaacacttggtacatacacagcattcacagttgcagtcacacggtggagaactagatttagaatagaaatgaacaaagcagataatgatgcaggtaatgctgctatagactcactgctgaattatgaaactgtgaagtattttaataatgaaagatatgaagcacagagatatgatggatttttgaagacgtatgagactgcttcattgaaaagtacctctactctggctatgctgaactttggtcaaagtgctattttcagtgtcggtttaacagctataatggtgctcgccagtcagggaattgtggcaggtacccttactgttggagatctagtaatggtgaatggactgctttttcagctttcattacccctgaactttctgggaactgtatatagagagactagacaagcactcatagatatgaacaccttgtttactctactcaaggtagacacccaaattaaagacaaagtgatggcatctccccttcagatcacaccacagacagctaccgtggcctttgataatgtgcattttgaatacattgagggccagaaagtccttagtggaatatcctttgaagtccctgcaggaaagaaagtggccattgtaggaggtagtgggtcagggaaaagcacaatagtgaggctattatttcgcttctatgagcctcaaaagggtagcatttatcttgctggtcaaaatatacaagatgtgagcctggaaagccttcggagggcagtgggagtggtacctcaggatgctgtcctcttccataatactatttattacaacctcttatatggaaacatcagtgcttcacctgaggaagtgtatgcagtggcaaaattagctggacttcatgatgcaattcttcgaatgccacatggatatgacacccaagtaggggaacgaggactcaagctttcaggaggagaaaagcaaagagtagcaattgcaagagccattttgaaggaccccccagtcatactctatgatgaagctacttcatcgttagattcgattactgaagagactattcttggtgccatgaaggatgtggtcaaacacagaacttctattttcattgcacacagattgtcaacagtggttgatgcagatgaaatcattgtcttggatcagggtaaggtagccgaacgtggtacccaccatggtttgcttgctaaccctcatagtatctattcagaaatgtggcatacacagagcagccgtgtgcagaaccatgataaccccaaatgggaagcaaagaaagaaaatatatccaaagaggaggaaagaaagaaactacaagaagaaattgtcaatagtgtgaaaggctgtggaaactgttcgtgctaagtcacataagacattttctttttttgttgttttggactacatatttgcactgaagcagaattgttttattaaaaaaatcatacatt

SEQ ID NO: 96206 - DNA, 2259 bp, Artificial Sequence
  derived and/or modified sequence
atggccctgctggccatgcacagctggagatgggccgccgccgccgccgccttcgagaagagaagacacagcgccatcctgatcagacccctggtgagcgtgagcggcagcggcccccagtggagaccccaccagctgggcgccctgggcaccgccagagcctaccagatccccgagagcctgaagagcatcacctggcagagactgggcaagggcaacagcggccagttcctggacgccgccaaggccctgcaggtgtggcccctgatcgagaagagaacctgctggcacggccacgccggcggcggcctgcacaccgaccccaaggagggcctgaaggacgtggacaccagaaagatcatcaaggccatgctgagctacgtgtggcccaaggacagacccgacctgagagccagagtggccatcagcctgggcttcctgggcggcgccaaggccatgaacatcgtggtgcccttcatgttcaagtacgccgtggacagcctgaaccagatgagcggcaacatgctgaacctgagcgacgcccccaacaccgtggccaccatggccaccgccgtgctgatcggctacggcgtgagcagagccggcgccgccttcttcaacgaggtgagaaacgccgtgttcggcaaggtggcccagaacagcatcagaagaatcgccaagaacgtgttcctgcacctgcacaacctggacctgggcttccacctgagcagacagaccggcgccctgagcaaggccatcgacagaggcaccagaggcatcagcttcgtgctgagcgccctggtgttcaacctgctgcccatcatgttcgaggtgatgctggtgagcggcgtgctgtactacaagtgcggcgcccagttcgccctggtgaccctgggcaccctgggcacctacaccgccttcaccgtggccgtgaccagatggagaaccagattcagaatcgagatgaacaaggccgacaacgacgccggcaacgccgccatcgacagcctgctgaactacgagaccgtgaagtacttcaacaacgagagatacgaggcccagagatacgacggcttcctgaagacctacgagaccgccagcctgaagagcaccagcaccctggccatgctgaacttcggccagagcgccatcttcagcgtgggcctgaccgccatcatggtgctggccagccagggcatcgtggccggcaccctgaccgtgggcgacctggtgatggtgaacggcctgctgttccagctgagcctgcccctgaacttcctgggcaccgtgtacagagagaccagacaggccctgatcgacatgaacaccctgttcaccctgctgaaggtggacacccagatcaaggacaaggtgatggccagccccctgcagatcaccccccagaccgccaccgtggccttcgacaacgtgcacttcgagtacatcgagggccagaaggtgctgagcggcatcagcttcgaggtgcccgccggcaagaaggtggccatcgtgggcggcagcggcagcggcaagagcaccatcgtgagactgctgttcagattctacgagccccagaagggcagcatctacctggccggccagaacatccaggacgtgagcctggagagcctgagaagagccgtgggcgtggtgccccaggacgccgtgctgttccacaacaccatctactacaacctgctgtacggcaacatcagcgccagccccgaggaggtgtacgccgtggccaagctggccggcctgcacgacgccatcctgagaatgccccacggctacgacacccaggtgggcgagagaggcctgaagctgagcggcggcgagaagcagagagtggccatcgccagagccatcctgaaggacccccccgtgatcctgtacgacgaggccaccagcagcctggacagcatcaccgaggagaccatcctgggcgccatgaaggacgtggtgaagcacagaaccagcatcttcatcgcccacagactgagcaccgtggtggacgccgacgagatcatcgtgctggaccagggcaaggtggccgagagaggcacccaccacggcctgctggccaacccccacagcatctacagcgagatgtggcacacccagagcagcagagtgcagaaccacgacaaccccaagtgggaggccaagaaggagaacatcagcaaggaggaggagagaaagaagctgcaggaggagatcgtgaacagcgtgaagggctgcggcaactgcagctgctag

SEQ ID NO: 96207 - protein, 712 aa, Artificial Sequence
  derived and/or modified sequence
MALLAMHSWRWAAAAAAFEKRRHSAILIRPLVSVSGSGPQWRPHQLGALGTARAYQIPESLKSITWQRLGKGNSGQFLDAAKALQVWPLIEKRTCWHGHAGGGLHTDPKEGAMNIVVPFMFKYAVDSLNQMSGNMLNLSDAPNTVATMATAVLIGYGVSRAGAAFFNEVRNAVFGKVAQNSIRRIAKNVFLHLHNLDLGFHLSRQTGALSKAIDRGTRGISFVLSALVFNLLPIMFEVMLVSGVLYYKCGAQFALVTLGTLGTYTAFTVAVTRWRTRFRIEMNKADNDAGNAAIDSLLNYETVKYFNNERYEAQRYDGFLKTYETASLKSTSTLAMLNFGQSAIFSVGLTAIMVLASQGIVAGTLTVGDLVMVNGLLFQLSLPLNFLGTVYRETRQALIDMNTLFTLLKVDTQIKDKVMASPLQITPQTATVAFDNVHFEYIEGQKVLSGISFEVPAGKKVAIVGGSGSGKSTIVRLLFRFYEPQKGSIYLAGQNIQDVSLESLRRAVGVVPQDAVLFHNTIYYNLLYGNISASPEEVYAVAKLAGLHDAILRMPHGYDTQVGERGLKLSGGEKQRVAIARAILKDPPVILYDEATSSLDSITEETILGAMKDVVKHRTSIFIAHRLSTVVDADEIIVLDQGKVAERGTHHGLLANPHSIYSEMWHTQSSRVQNHDNPKWEAKKENISKEEERKKLQEEIVNSVKGCGNCSC

SEQ ID NO: 96208 - DNA, 2139 bp, Artificial Sequence
  derived and/or modified sequence
atggccttgcttgcaatgcatagttggcggtgggccgcagccgccgcggcattcgaaaaacggagacacagtgccatcctgattcgccccctcgtgagcgtgtccggaagtggtccgcaatggcgacctcatcaactgggagcacttggtacggcgagagcatatcaaatacccgaatctcttaaaagcattacctggcagcgcctgggaaaggggaactctgggcagtttctggacgctgcaaaagcactccaggtgtggcctctgatcgagaagcgcacctgctggcacggccatgcgggtggtggcctccatacagaccccaaggaaggtgccatgaatatcgtcgtgcccttcatgttcaaatatgctgtcgactctcttaatcagatgagcggcaatatgctgaacctctctgatgcaccaaatacggtggccacgatggcaacagccgtactgatagggtatggcgtgagcagagctggagcggccttctttaatgaggtccgcaatgccgtgttcggaaaagtggcacaaaatagtatcaggagaatagctaagaacgtttttttacatttgcacaatcttgatctcggttttcatctgtctcgccagacaggagcccttagcaaggctatcgaccgtggcactagaggtatttcgttcgtgctgagcgcgctggtttttaacctgttgccgatcatgtttgaagtgatgctggtgagcggagtgttgtactacaagtgcggagcacagttcgcactcgtgaccctgggcactctcggcacatacaccgcctttacggttgctgtgaccagatggcgtactaggttccggattgaaatgaataaggctgacaatgatgctggcaacgctgccatagattccctgcttaattatgaaaccgtgaaatatttcaataatgaacggtacgaagcacaacggtacgacgggttcttaaagacctacgaaactgcgagtctgaagtctacctctactctggcaatgctaaattttggccagtctgccatcttttcagtaggacttacagcaattatggtgttggccagtcagggaatcgttgccggaactctgaccgttggagatctggttatggtgaatggcctactgtttcagctttcattgcccctgaattttcttgggacagtttatcgggaaaccagacaggctctcatcgacatgaacacactcttcactcttttgaaggtcgatacacagatcaaggacaaggtgatggcgtctcctctccagataacaccacagacagccaccgtggcgtttgacaatgtgcatttcgaatacatcgagggacagaaagtactctcgggaatatcttttgaggtgcctgctggaaagaaggtggccattgtgggaggctccggcagtggcaagagtacaattgtgcgcttgctcttcagattttacgaaccccagaagggatccatatacttggctggccaaaacatacaggacgtttctctggagtcgctaagacgcgcggtgggcgtggtgcctcaagatgccgtcctgtttcacaatacgatctactataatctactctatggcaacatcagcgccagtccggaagaggtatatgcagtggcgaagctagctggcctgcatgatgccattttaagaatgccacacggatatgatacacaagtcggagaacgtggattgaaactgtccggcggcgaaaagcagcgggtagccatcgcaagagctattctcaaagatccgcctgtgatactgtatgacgaggctaccagttcactggacagtatcacagaggagaccattctcggtgccatgaaggacgtggtgaaacaccgtacaagcatttttattgcccatagactgagcactgttgttgatgcagatgagataattgtgcttgatcaaggaaaagtcgccgaaagaggcactcatcacgggttgctggctaacccccattctatttacagcgagatgtggcatacacaatcgagcagggttcaaaaccacgataaccccaagtgggaggccaagaaggagaatattagcaaggaggaggaacggaaaaagctgcaagaagagatcgttaattcagtcaaaggttgcggcaattgttcttgctag

SEQ ID NO: 96209 - DNA, 2139 bp, Artificial Sequence
  derived and/or modified sequence
atggccctgctggccatgcacagctggcgctgggccgctgctgctgctgcctttgagaagagaagacacagcgccatcctgatccggcccctggtgtctgtgtctggcagcggcccccagtggaggccccaccagctgggcgccctgggcacagcccgggcctaccagatccctgagagcctgaagagcatcacctggcagaggctgggcaaaggaaacagcggccagttcctggatgctgccaaggccctgcaggtgtggcccctcatcgagaagaggacctgctggcacggccacgccggcggcggcctgcacacagaccccaaggagggcgccatgaacatcgtggtgcccttcatgttcaagtatgctgtggacagcctgaaccagatgagcggcaacatgctgaacctgagtgatgcccccaacacagtggccaccatggccacagctgtgctgattggctacggcgtgtccagagctggagctgccttcttcaatgaggtgagaaatgctgtgtttgggaaggtggcccagaacagcatcagaagaattgccaagaatgtgttcctgcacctgcacaacctggacctgggcttccacctgagccggcagacaggagccctgagcaaggccatcgaccggggcacccggggcatcagctttgtgctgagcgccctggtgttcaacctgctgcccatcatgtttgaggtgatgctggtgtctggagtgctgtactacaagtgtggggcccagtttgccctggtgaccctgggcaccctgggcacctacacagccttcaccgtggccgtgacccgctggaggacccgcttccgcatcgagatgaacaaggctgacaatgatgctggaaatgctgccatcgacagcctgctgaactatgagaccgtgaagtacttcaacaatgaaagatatgaggcccagagatatgatggcttcctgaagacctatgaaacagccagcctgaagagcaccagcaccctggccatgctgaactttggccagagcgccatcttctctgtgggcctgacagccatcatggtgctggccagccagggcatcgtggccggcaccctgactgtgggggacctggtgatggtgaatggcctgctcttccagctgagcctgcccctgaacttcctgggcaccgtgtaccgggagacccggcaggccctgattgacatgaacaccctcttcaccctgctgaaggtggacacccagatcaaggacaaggtgatggccagccccctgcagatcaccccccagacagccaccgtggcctttgacaacgtgcactttgagtacatcgagggccagaaggtgctgagcggcatcagctttgaggtgcctgctgggaagaaggtggccatcgtgggcggcagcggcagcggcaagagcaccatcgtgcggctgctcttccgcttctatgagccccagaagggcagcatctacctggccggccagaacatccaggatgtgtccctggagagcctgcggcgggctgtgggcgtggtgccccaggatgctgtgctcttccacaacaccatctactacaacctgctgtatggcaacatcagcgccagccctgaggaggtgtatgctgtggccaagctggccggcctgcatgatgccatcctgaggatgccccacggctatgacacccaggtgggggagcggggcctgaagctgagcggcggggagaagcagagggtggccatcgcccgggccatcctgaaggacccccctgtgatcctgtatgatgaggccaccagcagcctggacagcatcacagaggagaccatcctgggcgccatgaaggatgtggtgaagcacaggaccagcatcttcatcgcccaccggctgagcacagtggtggatgctgatgagatcatcgtgctggaccagggcaaggtggccgagcggggcacccaccacggcctgctggccaacccccacagcatctacagcgagatgtggcacacccagagcagccgggtgcagaaccacgacaaccccaagtgggaggccaagaaggagaacatcagcaaggaggaggagaggaagaagctgcaggaggagatcgtgaacagcgtgaagggctgcggcaactgcagctgctag

SEQ ID NO: 96210 - DNA, 2139 bp, Artificial Sequence
  derived and/or modified sequence
atggccctgctggccatgcacagctggcggtgggccgccgccgccgccgcctttgagaagaggaggcactctgctatactcatccgcccacttgtgtcagtttccggatctggtccccagtggcgaccccaccagctaggcgccctgggaaccgcgcgggcctatcaaatacccgagagcctcaaatcaattacatggcagaggctgggtaaaggcaactctggacagttcctggacgctgcgaaagcgcttcaggtttggcccctcatcgaaaagaggacttgctggcatggccatgctggaggaggcctgcacacagacccaaaagagggggctatgaacattgtggtccccttcatgtttaagtatgcagtcgattctctaaaccaaatgagcggcaacatgctgaacttatccgatgcccccaacacagtggccaccatggcaacagccgtcttgatcgggtacggcgtttccagagccggtgccgccttcttcaatgaagtcagaaacgcagtttttgggaaagtggctcagaacagtattaggaggattgccaagaatgtgttccttcatttacataatctggacctgggcttccacctgtccaggcagaccggggccctaagcaaagctattgatcgtgggacccggggtatatcttttgtgctgtcagcccttgtatttaatctgctgccaattatgtttgaagtgatgcttgtgagcggtgttctgtattataaatgcggggcccagttcgcacttgtcaccctgggcaccctgggcacctacactgcctttaccgtcgccgtgacgaggtggcggactcggttcaggatcgaaatgaacaaggctgataatgacgccggcaacgcggccatcgactccctgctgaactacgagacagtcaagtatttcaataacgaaaggtatgaagctcaaagatacgacgggttcctcaagacatacgagaccgcctccctgaagagcacgtccaccttggcaatgcttaatttcggccagtctgcgatatttagcgtgggcctgactgctattatggttctggccagccaagggattgtcgccggtactctgaccgtgggggatcttgtgatggtcaatggccttctgttccagctgtctctgcctctgaatttcctgggcaccgtttatagagaaactagacaagctttaatcgacatgaatacattgtttacccttctgaaagtggatactcagataaaagacaaggtgatggcaagccctctccagataacaccccaaactgccactgtggccttcgacaacgtgcacttcgagtatatagagggccagaaggttttgtccggaatttcctttgaagtgccggcaggcaaaaaggtggccattgtcgggggctctgggtcaggaaagagtacaattgtgagattgttatttcgtttctatgagccacaaaagggatccatctaccttgctgggcagaatatccaagacgtgtcactcgagagtctgaggcgagctgtgggtgttgtgccacaggatgccgtgctgtttcacaataccatctactacaacttactgtatggaaatatatccgcttcacccgaggaggtctatgccgtggccaagctggccggactgcacgacgccattttaagaatgcctcacggatacgacacccaagtcggtgaacgcggcctgaagctgtctggcggcgagaaacaacgcgtggccattgcaagagccattttgaaagaccctcctgtaatcctgtacgacgaggccacttcttctctggattctatcaccgaggagaccattctcggcgcaatgaaggacgtggtcaaacacagaacttctatcttcattgcccatagactctctaccgttgtggatgcggatgaaattattgtccttgaccaggggaaagtagccgaacgtggaacccaccacggtctgttggctaatcctcactcaatctattcggagatgtggcacacccagagctctcgtgtacaaaatcacgataatccaaaatgggaggctaagaaggagaacatttccaaagaagaagagcgaaaaaagctccaggaggagatcgtgaatagcgttaagggctgtggcaactgttcctgctag

SEQ ID NO: 96211 - DNA, 2139 bp, Artificial Sequence
  derived and/or modified sequence
atggccctgctcgcaatgcacagttggcgctgggctgctgccgctgcagcatttgagaaaaggcggcatagcgccatcttgattagacccttagttagcgtttctggcagtgggccacagtggcgccctcaccagcttggggctctagggaccgctcgggcatatcagattcccgagtccctgaagtctatcacatggcagaggctgggtaagggaaacagcgggcagttcctggacgctgcaaaggcccttcaggtttggcccttgatcgaaaagcgaacatgttggcacgggcatgcgggtggaggtctgcacactgaccccaaggagggcgcaatgaacatcgtcgtgccattcatgttcaaatatgccgtggattcactgaatcaaatgtcgggcaatatgctcaatctgtcggatgcgcctaacactgtggcgacgatggccactgcggttctgataggttatggagttagccgcgctggggctgccttctttaacgaggtacgtaacgcggtgtttgggaaggttgcccagaattccattcggagaattgcgaagaatgtttttctgcacctgcacaatctcgatttaggcttccacctgagtagacagacaggggctctgagtaaggcaattgatcgcggaacccggggaatcagtttcgtgctgagcgccttggtcttcaatctgctgcctatcatgtttgaagttatgctagtttccggagttctgtattataaatgcggcgctcagttcgctctggttaccttaggcacactcggaacgtacactgcattcacggtggcagtgacaaggtggagaacgagatttcgaattgaaatgaacaaggcagataatgacgccggaaacgccgcaattgattccttgctgaactacgaaaccgtgaagtatttcaacaacgagagatatgaggcgcagcgctacgacgggtttctaaagacttatgagactgcctctctgaaatctacaagcacactcgccatgctgaatttcggacagtcagctattttctcagttggtctcactgcaatcatggtcctggcaagccaggggatagtggcgggaaccctgactgttggagacttggtaatggttaacggacttttgttccagctgagcttgccccttaactttttaggcactgtgtatcgggagactagacaggccctgatcgacatgaacactttgtttactctgctaaaagtcgacacccagatcaaggataaggtcatggcgagtcccctgcagattactccgcaaactgcgactgtggcttttgacaatgtgcattttgaatatattgagggacagaaagttttgtctggcattagctttgaagtgcctgcagggaagaaggtggcaattgtgggcggttcaggaagtggaaaatctacgatcgtgagattactgttcagattctacgagccgcaaaagggctctatttatctcgccggtcagaatattcaggacgtatccttggaatctcttaggcgtgccgtaggagtggtcccgcaggacgctgtgctctttcacaacacaatctactacaatctgttgtacgggaatataagcgcaagtcctgaggaagtgtacgctgtggccaagttggcaggcctgcacgacgctattcttaggatgcctcacggctacgacacacaggtgggcgaacggggattgaaacttagcggtggtgagaaacagcgggtggctatcgcacgggctattctaaaggaccctcccgtgatcctgtatgacgaagcaacgagctctctggacagtattactgaggagacgatcctgggagcaatgaaggatgtggttaagcaccggacctctatttttatcgcccatcggctctccaccgtagtggacgcggacgagattatcgtgctggaccagggcaaagtagctgagcggggaacccaccacgggctattggctaacccacactccatctatagcgagatgtggcacactcagtccagcagggtgcagaaccacgataaccccaagtgggaagctaagaaggagaatatctctaaggaagaggagcggaagaaactgcaggaggagatagtgaactccgtgaagggttgcggcaattgcagttgttag

SEQ ID NO: 96212 - DNA, 2234 bp, Artificial Sequence
  derived and/or modified sequence
gctcaagatggcgctgctcgcgatgcattcttggcgctgggcggccgcggcggctgctttcgaaaagcgccggcactccgcgattctgatccggcctttagtctctgttagcggctcaggtccgcagtggaggccacatcaactcggcgccttgggaaccgctcgagcctaccagattccagagtcattaaaaagtatcacatggcagagattgggaaaaggcaattcaggacagttcttagatgctgcaaaggctctccaggtatggccactgatagaaaagaggacatgttggcatggtcatgcaggaggaggactccacacagacccaaaagaaggggccatgaatattgtggttcccttcatgtttaaatatgctgtagacagcctcaaccagatgtcgggaaacatgctgaacctgagtgatgcaccaaatacagttgcaaccatggcaacagcagttctgattggctatggtgtatcaagagctggagctgctttttttaacgaagttcgaaatgcagtatttggcaaggtagcccagaattcaatccgaagaatagccaaaaatgtctttctccatcttcacaacctggatctgggttttcacctgagcagacagacgggagctttatctaaggctattgacagaggaacaaggggtatcagttttgtcctgagtgctttggtatttaatcttcttcccatcatgtttgaagtgatgcttgtcagtggtgttttgtattacaaatgcggtgcccagtttgctttggtaacccttggaacacttggtacatacacagcattcacagttgcagtcacacggtggagaactagatttagaatagaaatgaacaaagcagataatgatgcaggtaatgctgctatagactcactgctgaattatgaaactgtgaagtattttaataatgaaagatatgaagcacagagatatgatggatttttgaagacgtatgagactgcttcattgaaaagtacctctactctggctatgctgaactttggtcaaagtgctattttcagtgtcggtttaacagctataatggtgctcgccagtcagggaattgtggcaggtacccttactgttggagatctagtaatggtgaatggactgctttttcagctttcattacccctgaactttctgggaactgtatatagagagactagacaagcactcatagatatgaacaccttgtttactctactcaaggtagacacccaaattaaagacaaagtgatggcatctccccttcagatcacaccacagacagctaccgtggcctttgataatgtgcattttgaatacattgagggccagaaagtccttagtggaatatcctttgaagtccctgcaggaaagaaagtggccattgtaggaggtagtgggtcagggaaaagcacaatagtgaggctattatttcgcttctatgagcctcaaaagggtagcatttatcttgctggtcaaaatatacaagatgtgagcctggaaagccttcggagggcagtgggagtggtacctcaggatgctgtcctcttccataatactatttattacaacctcttatatggaaacatcagtgcttcacctgaggaagtgtatgcagtggcaaaattagctggacttcatgatgcaattcttcgaatgccacatggatatgacacccaagtaggggaacgaggactcaagctttcaggaggagaaaagcaaagagtagcaattgcaagagccattttgaaggaccccccagtcatactctatgatgaagctacttcatcgttagattcgattactgaagagactattcttggtgccatgaaggatgtggtcaaacacagaacttctattttcattgcacacagattgtcaacagtggttgatgcagatgaaatcattgtcttggatcagggtaaggtagccgaacgtggtacccaccatggtttgcttgctaaccctcatagtatctattcagaaatgtggcatacacagagcagccgtgtgcagaaccatgataaccccaaatgggaagcaaagaaagaaaatatatccaaagaggaggaaagaaagaaactacaagaagaaattgtcaatagtgtgaaaggctgtggaaactgttcgtgctaagtcacataagacattttctttttttgttgttttggactacatatttgcactgaagcagaattgttttattaaaaaaatcatacattcc

SEQ ID NO: 96213 - DNA, 2139 bp, Artificial Sequence
  derived and/or modified sequence
atggccctgctggccatgcacagctggagatgggccgccgccgccgccgccttcgagaagagaagacacagcgccatcctgatcagacccctggtgagcgtgagcggcagcggcccccagtggagaccccaccagctgggcgccctgggcaccgccagagcctaccagatccccgagagcctgaagagcatcacctggcagagactgggcaagggcaacagcggccagttcctggacgccgccaaggccctgcaggtgtggcccctgatcgagaagagaacctgctggcacggccacgccggcggcggcctgcacaccgaccccaaggagggcgccatgaacatcgtggtgcccttcatgttcaagtacgccgtggacagcctgaaccagatgagcggcaacatgctgaacctgagcgacgcccccaacaccgtggccaccatggccaccgccgtgctgatcggctacggcgtgagcagagccggcgccgccttcttcaacgaggtgagaaacgccgtgttcggcaaggtggcccagaacagcatcagaagaatcgccaagaacgtgttcctgcacctgcacaacctggacctgggcttccacctgagcagacagaccggcgccctgagcaaggccatcgacagaggcaccagaggcatcagcttcgtgctgagcgccctggtgttcaacctgctgcccatcatgttcgaggtgatgctggtgagcggcgtgctgtactacaagtgcggcgcccagttcgccctggtgaccctgggcaccctgggcacctacaccgccttcaccgtggccgtgaccagatggagaaccagattcagaatcgagatgaacaaggccgacaacgacgccggcaacgccgccatcgacagcctgctgaactacgagaccgtgaagtacttcaacaacgagagatacgaggcccagagatacgacggcttcctgaagacctacgagaccgccagcctgaagagcaccagcaccctggccatgctgaacttcggccagagcgccatcttcagcgtgggcctgaccgccatcatggtgctggccagccagggcatcgtggccggcaccctgaccgtgggcgacctggtgatggtgaacggcctgctgttccagctgagcctgcccctgaacttcctgggcaccgtgtacagagagaccagacaggccctgatcgacatgaacaccctgttcaccctgctgaaggtggacacccagatcaaggacaaggtgatggccagccccctgcagatcaccccccagaccgccaccgtggccttcgacaacgtgcacttcgagtacatcgagggccagaaggtgctgagcggcatcagcttcgaggtgcccgccggcaagaaggtggccatcgtgggcggcagcggcagcggcaagagcaccatcgtgagactgctgttcagattctacgagccccagaagggcagcatctacctggccggccagaacatccaggacgtgagcctggagagcctgagaagagccgtgggcgtggtgccccaggacgccgtgctgttccacaacaccatctactacaacctgctgtacggcaacatcagcgccagccccgaggaggtgtacgccgtggccaagctggccggcctgcacgacgccatcctgagaatgccccacggctacgacacccaggtgggcgagagaggcctgaagctgagcggcggcgagaagcagagagtggccatcgccagagccatcctgaaggacccccccgtgatcctgtacgacgaggccaccagcagcctggacagcatcaccgaggagaccatcctgggcgccatgaaggacgtggtgaagcacagaaccagcatcttcatcgcccacagactgagcaccgtggtggacgccgacgagatcatcgtgctggaccagggcaaggtggccgagagaggcacccaccacggcctgctggccaacccccacagcatctacagcgagatgtggcacacccagagcagcagagtgcagaaccacgacaaccccaagtgggaggccaagaaggagaacatcagcaaggaggaggagagaaagaagctgcaggaggagatcgtgaacagcgtgaagggctgcggcaactgcagctgctag

SEQ ID NO: 96214 - protein, 702 aa, Artificial Sequence
  derived and/or modified sequence
MALLAMHSWRWAAAAAAFEKRRHSAILIRPLVSVSGSGPQWRPHQLGALGTARAYQALQVWPLIEKRTCWHGHAGGGLHTDPKEGLKDVDTRKIIKAMLSYVWPKDRPDLRARVAISLGFLGGAKAMNIVVPFMFKYAVDSLNQMSGNMLNLSDAPNTVATMATAVLIGYGVSRAGAAFFNEVRNAVFGKVAQNSIRRIAKNVFLHLHNLDLGFHLSRQTGALSKAIDRGTRGISFVLSALVFNLLPIMFEVMLVSGVLYYKCGAQFALVTLGTLGTYTAFTVAVTRWRTRFRIEMNKADNDAGNAAIDSLLNYETVKYFNNERYEAQRYDGFLKTYETASLKSTSTLAMLNFGQSAIFSVGLTAIMVLASQGIVAGTLTVGDLVMVNGLLFQLSLPLNFLGTVYRETRQALIDMNTLFTLLKVDTQIKDKVMASPLQITPQTATVAFDNVHFEYIEGQKVLSGISFEVPAGKKVAIVGGSGSGKSTIVRLLFRFYEPQKGSIYLAGQNIQDVSLESLRRAVGVVPQDAVLFHNTIYYNLLYGNISASPEEVYAVAKLAGLHDAILRMPHGYDTQVGERGLKLSGGEKQRVAIARAILKDPPVILYDEATSSLDSITEETILGAMKDVVKHRTSIFIAHRLSTVVDADEIIVLDQGKVAERGTHHGLLANPHSIYSEMWHTQSSRVQNHDNPKWEAKKENIS

SEQ ID NO: 96215 - protein, 726 aa, Artificial Sequence
  derived and/or modified sequence
MALLAMHSWRWAAAAAAFEKRRHSAILIRPLVSVSGSGPQWRPHQLGALGTARAYQALQVWPLIEKRTCWHGHAGGGLHTDPKEGLKDVDTRKIIKAMLSYVWPKDRPDLRARVAISLGFLGGAKAMNIVVPFMFKYAVDSLNQMSGNMLNLSDAPNTVATMATAVLIGYGVSRAGAAFFNEVRNAVFGKVAQNSIRRIAKNVFLHLHNLDLGFHLSRQTGALSKAIDRGTRGISFVLSALVFNLLPIMFEVMLVSGVLYYKCGAQFALVTLGTLGTYTAFTVAVTRWRTRFRIEMNKADNDAGNAAIDSLLNYETVKYFNNERYEAQRYDGFLKTYETASLKSTSTLAMLNFGQSAIFSVGLTAIMVLASQGIVAGTLTVGDLVMVNGLLFQLSLPLNFLGTVYRETRQALIDMNTLFTLLKVDTQIKDKVMASPLQITPQTATVAFDNVHFEYIEGQKVLSGISFEVPAGKKVAIVGGSGSGKSTIVRLLFRFYEPQKGSIYLAGQNIQDVSLESLRRAVGVVPQDAVLFHNTIYYNLLYGNISASPEEVYAVAKLAGLHDAILRMPHGYDTQVGERGLKLSGGEKQRVAIARAILKDPPVILYDEATSSLDSITEETILGAMKDVVKHRTSIFIAHRLSTVVDADEIIVLDQGKVAERGTHHGLLANPHSIYSEMWHTQSSRVQNHDNPKWEAKKENISKEEERKKLQEEIVNSVKGCGNCSC

SEQ ID NO: 96216 - DNA, 2109 bp, Artificial Sequence
  derived and/or modified sequence
atggcccttctcgcaatgcattcctggaggtgggccgctgctgcagctgccttcgagaagcgtagacactccgccatattaatcaggcccctggtctcagtgagtggttccggaccacagtggcgaccacatcagctcggtgcactaggaaccgccagggcttatcaggccctgcaggtatggcctcttattgaaaagcggacctgctggcacggccatgcaggaggcggactgcacacggaccctaaagaaggcctgaaagatgtagatacacggaaaattatcaaagcaatgctgtcttatgtgtggccgaaagacagacctgatctgagagcccgtgttgcaatctcgctcgggtttctagggggggccaaagctatgaacattgttgtgccgttcatgttcaagtatgctgtggatagccttaaccaaatgtccggaaacatgctgaatctgtctgacgcccccaatacagtggccactatggctacagccgtgctgattggatatggggtgtccagagcgggagcggcatttttcaacgaagtgcggaacgcagtgttcgggaaagtcgctcagaattctatcaggcgcattgccaaaaacgtcttcttgcatctacacaacctggatctgggcttccatttgtctcgccaaacaggcgccttatcaaaagcaatagaccgaggcaccagggggatctcatttgtgctcagcgctctggtcttcaatcttctaccgatcatgttcgaggttatgctggtatcaggtgtcctctattacaagtgcggggcacaattcgcgctggttactcttggtaccttagggacttacactgcatttactgtggctgtgactcgttggcgtacccggttccgcatcgagatgaataaggctgacaacgatgccggcaacgcggctatcgactctttgctcaactacgagaccgtgaaatatttcaataacgagaggtatgaagcacagcgttacgatggattccttaaaacatacgaaaccgcatccctgaagagcacctccactctggctatgctgaactttggccagtctgccattttttcagttggcctgactgctattatggtcctggcctcccagggaatagtggctggaactctgacagtgggtgacttggtcatggttaatggactgctgtttcagctgtcccttcctctgaatttcttgggtaccgtttatcgcgaaaccaggcaggccttaattgacatgaatacgctcttcacattgctgaaggtcgatacccagatcaaagataaggtcatggcatctcccctgcagatcaccccccaaacagccactgtagcattcgacaatgtgcattttgagtacattgagggacagaaggtgctttccggcatctcgtttgaagttcccgcagggaaaaaagtggccatcgtgggcggatcaggatcgggaaaatcaaccatcgtgcgactgttgtttcgattttatgagcctcagaagggatcgatttacctagccggccagaacatccaagacgtgagcctcgaaagcttgcggagggcggtcggcgttgtcccgcaggacgccgtactgtttcacaataccatttactataacctgctgtacgggaacatcagtgctagccccgaggaagtctacgccgttgcgaagctggccggtctgcacgacgccattctccgtatgccacatggatatgatactcaggtgggagagagaggcttaaagttgtcgggcggcgagaagcagagagtcgcaatagcccgggcaattctgaaagacccccccgttatcctgtacgacgaggccacatcatcactggattccataaccgaggagaccattctgggggctatgaaggatgtagtgaaacatagaacctccatcttcattgcacaccgactgtccaccgtggtggacgcggacgaaatcatagtcctagaccagggcaaggtggccgaacgggggacccatcatgggctgctggccaaccctcattcgatctatagcgagatgtggcacacccagtcctcaagggttcagaaccacgataatccaaagtgggaggcaaagaaggagaacatctcatag

SEQ ID NO: 96217 - DNA, 2181 bp, Artificial Sequence
  derived and/or modified sequence
atggcactactggccatgcactcttggcgttgggctgccgctgctgccgccttcgagaagagacgtcacagtgccatcctaatccggccgctcgtctcggtgagcggcagtggtccacagtggaggccgcaccaattaggggccctcgggacagcccgggcataccaggctctccaagtttggcccctgattgagaaacgcacttgctggcatgggcatgcgggcggaggactacacactgatcccaaagaaggcctcaaggacgtagacacgcgaaaaatcatcaaagccatgttgtcctatgtgtggccaaaagatcgcccagatcttagagctcgggtcgccatttcattaggctttctcggaggggcaaaggccatgaatatcgtcgtcccatttatgttcaagtacgctgtggacagcttaaaccaaatgagcggcaacatgctgaacctcagtgacgctcccaacaccgtagctacaatggccaccgctgtgctgatcggatatggcgtgtctcgcgccggggctgccttttttaacgaggtcagaaacgctgtgttcgggaaggtggctcagaacagcatccggcgcattgccaaaaatgtgttccttcatctgcacaatttggacctcgggtttcacttgagccgtcaaactggcgcattgtcaaaggcgatcgaccgaggcactagaggcatctcattcgtcctcagtgctttggtgttcaacctcctcccgattatgttcgaggtaatgctggtgtccggtgtactctattacaaatgtggggcacagtttgccctggtgactttaggcactctggggacctacactgcattcaccgtagctgtgacacggtggcggaccagatttaggatcgagatgaataaggcggacaatgatgccgggaatgccgcaattgacagcctactgaactacgagactgtgaaatacttcaacaacgaacgctatgaggctcaacgatatgacggatttctaaaaacatacgaaacagcgtccctgaaatccacctctaccctggccatgcttaactttggacagagcgccatttttagtgtggggctgacagctatcatggtgttggcaagccagggaattgttgcaggtacattgacagtgggcgaccttgtgatggtcaacggccttctgtttcagctctccctccccttaaacttcctgggcacggtgtaccgtgaaacaagacaggcgctcattgatatgaacaccctgtttacactgctcaaagtggatactcaaatcaaggacaaggtgatggctagccccctccagataactccccaaaccgctacagttgcttttgataacgtacactttgaatacattgaaggacagaaggtgctcagtggaatatccttcgaagttcccgctggaaaaaaagtggccatcgttggtggaagcggcagtggaaaaagcactatagtgcgtctgttgttccgattctatgaaccacaaaaaggctcaatatacctcgccgggcagaacatccaggatgtcagcctggagtccttgcgtcgcgccgtgggggtggttcctcaggacgcggtcttgtttcacaacacgatatactacaaccttctttatggtaacatcagcgcatcaccggaggaggtctacgcagtggccaagttagctggattgcacgacgcaatcctaaggatgccacacggctacgatactcaggtgggcgaacgcggactgaagctctccggaggagagaagcagcgcgtagctatcgcccgagcaatcctgaaggatcctccagtgatactctatgacgaagcaacttcctccctggacagcattaccgaagagaccatccttggggccatgaaagacgtggttaagcaccgcacaagcattttcattgcccacaggctgagcactgtggttgacgcagacgagataattgtgctggatcaagggaaggtggcagaaagaggcacccaccatggcctgctggcaaaccctcatagcatttacagcgaaatgtggcacacacaaagttcaagggtgcagaatcacgacaatccaaaatgggaggccaagaaggagaatataagcaaagaggaggagagaaaaaaactgcaggaggagatcgtgaattcagtgaagggatgtgggaattgcagctgctag

SEQ ID NO: 96218 - DNA, 2109 bp, Artificial Sequence
  derived and/or modified sequence
atggccctgctggccatgcacagctggcgctgggccgctgctgctgctgcctttgagaagagaagacacagcgccatcctgatccggcccctggtgtctgtgtctggcagcggcccccagtggaggccccaccagctgggcgccctgggcacagcccgggcctaccaggccctgcaggtgtggcccctcatcgagaagaggacctgctggcacggccacgccggcggcggcctgcacacagaccccaaggagggcctgaaggatgtggacaccaggaagatcatcaaggccatgctgtcctatgtgtggcccaaggacagaccagacctgcgggcccgggtggccatcagcctgggcttcctgggcggggccaaggccatgaacatcgtggtgcccttcatgttcaagtatgctgtggacagcctgaaccagatgagcggcaacatgctgaacctgagtgatgcccccaacacagtggccaccatggccacagctgtgctgattggctacggcgtgtccagagctggagctgccttcttcaatgaggtgagaaatgctgtgtttgggaaggtggcccagaacagcatcagaagaattgccaagaatgtgttcctgcacctgcacaacctggacctgggcttccacctgagccggcagacaggagccctgagcaaggccatcgaccggggcacccggggcatcagctttgtgctgagcgccctggtgttcaacctgctgcccatcatgtttgaggtgatgctggtgtctggagtgctgtactacaagtgtggggcccagtttgccctggtgaccctgggcaccctgggcacctacacagccttcaccgtggccgtgacccgctggaggacccgcttccgcatcgagatgaacaaggctgacaatgatgctggaaatgctgccatcgacagcctgctgaactatgagaccgtgaagtacttcaacaatgaaagatatgaggcccagagatatgatggcttcctgaagacctatgaaacagccagcctgaagagcaccagcaccctggccatgctgaactttggccagagcgccatcttctctgtgggcctgacagccatcatggtgctggccagccagggcatcgtggccggcaccctgactgtgggggacctggtgatggtgaatggcctgctcttccagctgagcctgcccctgaacttcctgggcaccgtgtaccgggagacccggcaggccctgattgacatgaacaccctcttcaccctgctgaaggtggacacccagatcaaggacaaggtgatggccagccccctgcagatcaccccccagacagccaccgtggcctttgacaacgtgcactttgagtacatcgagggccagaaggtgctgagcggcatcagctttgaggtgcctgctgggaagaaggtggccatcgtgggcggcagcggcagcggcaagagcaccatcgtgcggctgctcttccgcttctatgagccccagaagggcagcatctacctggccggccagaacatccaggatgtgtccctggagagcctgcggcgggctgtgggcgtggtgccccaggatgctgtgctcttccacaacaccatctactacaacctgctgtatggcaacatcagcgccagccctgaggaggtgtatgctgtggccaagctggccggcctgcatgatgccatcctgaggatgccccacggctatgacacccaggtgggggagcggggcctgaagctgagcggcggggagaagcagagggtggccatcgcccgggccatcctgaaggacccccctgtgatcctgtatgatgaggccaccagcagcctggacagcatcacagaggagaccatcctgggcgccatgaaggatgtggtgaagcacaggaccagcatcttcatcgcccaccggctgagcacagtggtggatgctgatgagatcatcgtgctggaccagggcaaggtggccgagcggggcacccaccacggcctgctggccaacccccacagcatctacagcgagatgtggcacacccagagcagccgggtgcagaaccacgacaaccccaagtgggaggccaagaaggagaacatctcctag

SEQ ID NO: 96219 - DNA, 2181 bp, Artificial Sequence
  derived and/or modified sequence
atggccctgctggccatgcacagctggcgctgggccgctgctgctgctgcctttgagaagagaagacacagcgccatcctgatccggcccctggtgtctgtgtctggcagcggcccccagtggaggccccaccagctgggcgccctgggcacagcccgggcctaccaggccctgcaggtgtggcccctcatcgagaagaggacctgctggcacggccacgccggcggcggcctgcacacagaccccaaggagggcctgaaggatgtggacaccaggaagatcatcaaggccatgctgtcctatgtgtggcccaaggacagaccagacctgcgggcccgggtggccatcagcctgggcttcctgggcggggccaaggccatgaacatcgtggtgcccttcatgttcaagtatgctgtggacagcctgaaccagatgagcggcaacatgctgaacctgagtgatgcccccaacacagtggccaccatggccacagctgtgctgattggctacggcgtgtccagagctggagctgccttcttcaatgaggtgagaaatgctgtgtttgggaaggtggcccagaacagcatcagaagaattgccaagaatgtgttcctgcacctgcacaacctggacctgggcttccacctgagccggcagacaggagccctgagcaaggccatcgaccggggcacccggggcatcagctttgtgctgagcgccctggtgttcaacctgctgcccatcatgtttgaggtgatgctggtgtctggagtgctgtactacaagtgtggggcccagtttgccctggtgaccctgggcaccctgggcacctacacagccttcaccgtggccgtgacccgctggaggacccgcttccgcatcgagatgaacaaggctgacaatgatgctggaaatgctgccatcgacagcctgctgaactatgagaccgtgaagtacttcaacaatgaaagatatgaggcccagagatatgatggcttcctgaagacctatgaaacagccagcctgaagagcaccagcaccctggccatgctgaactttggccagagcgccatcttctctgtgggcctgacagccatcatggtgctggccagccagggcatcgtggccggcaccctgactgtgggggacctggtgatggtgaatggcctgctcttccagctgagcctgcccctgaacttcctgggcaccgtgtaccgggagacccggcaggccctgattgacatgaacaccctcttcaccctgctgaaggtggacacccagatcaaggacaaggtgatggccagccccctgcagatcaccccccagacagccaccgtggcctttgacaacgtgcactttgagtacatcgagggccagaaggtgctgagcggcatcagctttgaggtgcctgctgggaagaaggtggccatcgtgggcggcagcggcagcggcaagagcaccatcgtgcggctgctcttccgcttctatgagccccagaagggcagcatctacctggccggccagaacatccaggatgtgtccctggagagcctgcggcgggctgtgggcgtggtgccccaggatgctgtgctcttccacaacaccatctactacaacctgctgtatggcaacatcagcgccagccctgaggaggtgtatgctgtggccaagctggccggcctgcatgatgccatcctgaggatgccccacggctatgacacccaggtgggggagcggggcctgaagctgagcggcggggagaagcagagggtggccatcgcccgggccatcctgaaggacccccctgtgatcctgtatgatgaggccaccagcagcctggacagcatcacagaggagaccatcctgggcgccatgaaggatgtggtgaagcacaggaccagcatcttcatcgcccaccggctgagcacagtggtggatgctgatgagatcatcgtgctggaccagggcaaggtggccgagcggggcacccaccacggcctgctggccaacccccacagcatctacagcgagatgtggcacacccagagcagccgggtgcagaaccacgacaaccccaagtgggaggccaagaaggagaacatcagcaaggaggaggagaggaagaagctgcaggaggagatcgtgaacagcgtgaagggctgcggcaactgcagctgctag

SEQ ID NO: 96220 - DNA, 2109 bp, Artificial Sequence
  derived and/or modified sequence
atggccctgctggccatgcacagctggcggtgggccgccgccgccgccgccttcgagaagaggcgccactcagccattctgatccgcccacttgttagtgtatccgggtcaggccctcagtggcgcccacaccagctgggggccttgggcacggctcgggcgtaccaggccctgcaggtgtggcccctcattgagaaacggacctgttggcatggacatgcaggcggcggactgcacactgaccctaaagagggactgaaagatgtggatacgcgaaagatcattaaggccatgctaagttatgtgtggccaaaagatcggcctgacctgcgagcaagggtggcgatttccctcgggtttcttggtggcgcgaaagctatgaacatcgttgtgccatttatgttcaagtacgccgtggactctctgaaccagatgtccgggaacatgttgaacctatccgacgccccaaatacggtggccactatggccactgctgtgctcatcggttatggggtgtcacgagcaggagccgcattttttaatgaagtccggaacgccgtgttcggtaaggtcgcgcagaactctatccgaagaatcgccaaaaacgtgtttcttcatcttcacaacctggatctggggttccatttgagcagacagacaggagcgctctcaaaagcaattgataggggaacaagaggtatcagcttcgttttgtcggccctggttttcaacctgctgcccattatgtttgaagtgatgcttgtgagtggagtgctgtactacaagtgcggggctcagttcgcattagtgactctgggtactctcggaacatatacggcctttacagtggccgtgaccagatggagaacccggttccgcatcgaaatgaacaaagcagataacgacgccggaaatgctgccattgactctctcctgaattacgagaccgtcaaatacttcaataacgaaaggtatgaggcccagcgttatgacggatttctgaagacttacgagactgcatctctcaagtcgacctccacattagcgatgcttaactttggtcaatccgcaatcttttcggttggactcacggccataatggtactcgccagccagggtattgtagctgggacgctgaccgtaggcgatttagtgatggtcaacggccttctgtttcaactcagtctgcccctgaacttcttgggtacggtctacagggaaacgcgccaggccttaattgatatgaacaccttatttacgcttctaaaagtggacactcagatcaaggacaaagtgatggcaagtccgctccagatcactcctcagacagcgacggtggcattcgataatgtccacttcgagtacatcgaagggcagaaggtgctgtctggaatctcctttgaggtaccggccggcaaaaaggtggcgatcgttgggggatcagggtcaggaaaatctaccattgtcaggctacttttccgcttctacgaaccccagaagggaagcatctaccttgctggccagaatattcaggacgtctccctcgaatctctgcggcgtgccgtcggtgtcgtgccacaggatgctgtgttgtttcataatacgatctactacaaccttctgtacgggaatatctccgctagtcctgaagaggtttacgccgtggcgaaattagccggcctccatgatgcaatcttgaggatgcctcacggctacgatacccaggtaggcgaacgcggactcaagctatcaggcggcgagaaacagagagtcgcgattgcccgggcgatcctgaaagaccctcctgtgatattgtacgatgaagccacttccagtctcgattctattacagaagaaactattcttggcgccatgaaggacgtggtgaagcaccggacctccatcttcattgcccaccgcttgtcgacagttgtggatgccgacgagatcattgtgctggatcaggggaaagtggccgagcggggcacccatcacgggctactcgcaaacccacactctatttattcagaaatgtggcacacacaatcttctagggttcagaaccatgacaatccaaagtgggaagccaaaaaggagaatatttcatag

SEQ ID NO: 96221 - DNA, 2181 bp, Artificial Sequence
  derived and/or modified sequence
atggccctgctggccatgcacagctggcggtgggccgccgccgccgccgcctttgagaagcggcgacatagtgccatcttgataagaccattggtgtccgtgagcggaagcggcccccagtggagaccccatcagttgggcgccctcggtaccgctcgcgcttaccaggctctgcaggtgtggccgttgatcgaaaaaaggacatgttggcacggtcatgctggaggcggccttcacactgatcccaaggagggactcaaggatgtggatacccggaaaatcattaaggcaatgctttcttacgtgtggcccaaggatcgccctgatttaagagctcgcgtggcaattagtctgggcttcttaggcggcgcaaaggctatgaacatcgtggttcccttcatgtttaaatatgccgtggacagcttaaatcagatgagcggcaatatgcttaacctgtccgacgctcctaataccgtggcaactatggctaccgccgtgctgatcggctatggagttagtcgtgctggtgctgcttttttcaatgaagtccgtaacgccgtgttcgggaaggtcgcacaaaacagcattcgtagaatcgctaaaaatgtgttcctccatcttcacaatttagacctgggttttcacctgtctagacaaactggcgccctgagtaaggccatcgataggggaactcgtggcatatcattcgtgctgtcagcattggtatttaacctactcccaattatgttcgaggtgatgctcgtgtccggagtgctatattacaaatgcggcgctcagttcgccctggttactctcgggacactaggcacatacaccgcctttactgtcgccgtgactcgttggcggacacgctttcggattgagatgaataaagccgacaacgatgcggggaacgccgccatagattctttgttgaactatgaaactgttaagtacttcaacaacgagcgatatgaggcacagagatacgacggctttctgaaaacctacgagaccgccagtctgaaatctacttctacgttagctatgctgaacttcggccagagcgctatattctccgtgggcctgaccgccattatggtgctggcatcccagggcatagtcgctggaactctgacagttggcgatctcgtcatggtcaatggcttactgtttcagctcagtctccctctgaattttctcggtactgtctaccgcgaaacccggcaggctctaattgatatgaatacactatttactcttctcaaagtcgatacacagataaaagacaaagtcatggctagccccctccaaattaccccccaaacagccaccgtcgcattcgacaacgtgcacttcgaatacattgaaggccagaaggtcctgtctgggatctcattcgaagtccctgctgggaaaaaggtagccatagtaggtggttctgggagcggtaaatcaaccatcgtgagacttctgttccgcttctatgagccacaaaaagggtccatttatttggctggccagaacatccaggatgtgtccctagaaagtctacggcgagccgtgggtgtggtacctcaggatgccgtgctgttccacaacactatttattataatttactgtatggcaacatcagtgccagtccggaggaggtgtacgccgtggcgaagctggctggactccacgacgccatcctgcgaatgccccacgggtatgatacccaggtgggagagcgaggacttaagctgtcaggtggggagaagcagagagtcgcaatcgccagagccatcttaaaggacccccccgtgatcctgtatgatgaggccaccagcagcctcgactcgattaccgaggaaaccatcttgggagcaatgaaagacgtggtcaagcaccggacatccattttcattgcacataggctgagcactgtagtagacgccgatgagattattgtgttggatcagggaaaggtggccgaacgtggcactcaccacggccttctggcaaatccccatagtatctattccgagatgtggcacacccagagcagtcgggtacagaatcacgataatccaaaatgggaagcaaaaaaggaaaatatcagtaaggaggaagaacgtaagaagctccaggaggagatcgtgaactcagtgaaaggttgtggcaactgctcatgttag

SEQ ID NO: 96222 - DNA, 2109 bp, Artificial Sequence
  derived and/or modified sequence
atggccctattggctatgcacagctggcggtgggcggctgcggcagctgccttcgagaagagacggcattcagcaatcctaatccgccctctcgtttcggtctctggttcaggcccacagtggcgacctcaccagctcggcgcattgggcaccgccagagcctatcaggccctgcaggtctggccactcattgagaaaagaacatgctggcacggtcacgcagggggaggtttgcacactgaccccaaggaaggacttaaggatgtggatacgcggaagatcatcaaagccatgctgagctacgtatggccaaaggaccgaccggacctgagggcaagggtcgccatttcgctcgggttcctggggggtgctaaggccatgaacattgtcgtccccttcatgttcaaatatgcagtggatagtctgaatcagatgtccggcaacatgctgaatctttctgatgcgcctaacactgtggctactatggcaaccgcagtgctcatcggttacggagtcagccgagcaggcgctgcgttcttcaatgaagtgaggaacgctgtgttcgggaaagttgcccagaacagtatcaggaggattgctaagaatgtgttcctccacctgcacaatctagacctgggcttccatctcagtcgacagactggcgcactatctaaggccattgatcgcggaaccagaggaatctcctttgtgcttagcgctctggtgtttaatctgctgccgattatgttcgaggtcatgctggtgtccggcgtgctatactataagtgtggtgcccagtttgccctagtgacactaggaacccttggaacttacaccgccttcactgttgcagtgacaagatggcggaccagattcagaattgagatgaacaaagctgacaatgacgctggcaatgccgctatagactcgctactgaattacgaaacagtgaaatactttaacaacgaacgctacgaggctcagcggtatgatggattccttaagacatacgagaccgcaagtctgaagtccaccagtaccctcgcaatgttaaacttcggccagagcgccatcttctcagtgggcctgaccgcgatcatggtcctggcctcccagggcattgtggccggaacgctcaccgtgggggatctggtcatggtaaacggactgctttttcaactgtcacttccactgaactttcttggcactgtttaccgcgagacgcggcaggcattgatcgatatgaataccctcttcactttgctcaaagtggatacccagattaaggataaagtgatggcgagtcctctccaaattacacctcaaacagcaaccgtcgctttcgataatgtgcacttcgaatatatcgagggacagaaggtgctgtcaggcatttcattcgaggtacccgctggcaagaaggtggctatcgtcggcggttccgggagtgggaagagtacaatcgtgcggctgctctttagattttatgagcctcagaaaggatcaatctacctggctgggcagaatatacaagacgtctccctcgagtcgctgcgacgggctgtcggcgtggtccctcaggacgccgtgttgttccacaacaccatttattataatctgttgtatggcaacataagcgcatcgcccgaggaggtgtacgctgtcgccaaattggccggacttcacgacgctattctgcgaatgccccatggatatgacactcaggtgggagaaagagggctaaaactttcaggcggagaaaagcagagggtggctatcgccagggccatcctgaaagatcctccagtgatcctctacgacgaggcaacctcctcgctcgacagtataactgaggaaacaattctaggagccatgaaagacgtggtgaagcacaggacgagcatcttcattgcacatcgactttccacggtggttgacgctgacgagattatagtgcttgaccagggaaaggtcgctgaacggggtacacaccacgggctgctagcaaaccctcactctatctacagtgagatgtggcacactcaatcgtcaagagtgcagaatcacgataatcctaaatgggaggcaaagaaggagaatatctcttag

SEQ ID NO: 96223 - DNA, 2181 bp, Artificial Sequence
  derived and/or modified sequence
atggcactgctcgctatgcatagctggaggtgggcggctgccgctgccgctttcgagaaaaggcgccactctgccatcttgatcaggcccctcgtctcagtgtctggcagcggaccccagtggcgccctcatcagttaggtgccctgggcactgctcgcgcatatcaagcactccaggtctggcctcttatcgagaaacgcacatgctggcatggtcacgcgggagggggactacacactgatcccaaagagggcctgaaggatgtcgatacgaggaagatcataaaggctatgctgtcatacgtgtggccaaaagataggccagacttgcgcgctagggttgccatcagcctggggttcctcggcggagctaaggcaatgaatatcgtggtacccttcatgttcaagtacgccgtggactcattgaatcagatgagcggtaacatgctcaatctgtccgacgcgcctaatacagttgccacaatggccaccgcagttctgattggttacggggtgtctcgagcaggagccgcattctttaatgaggtcaggaacgctgtcttcgggaaggtggcccagaacagtatacgcaggatagcaaagaacgtgttcctgcacctgcacaatctggatcttggctttcacctgtcaaggcaaacaggagccttgtccaaagctattgaccgagggacacgaggtatatcttttgttctatcagctttggtgttcaatcttctgccgattatgtttgaagtgatgctggtctctggcgttttgtactacaaatgcggggcacagtttgctctcgtaaccctcggcaccttaggcacgtacaccgctttcaccgtagctgtgaccaggtggagaacacggttccgtattgagatgaataaggctgacaatgacgccggtaacgctgcaatcgacagtttactgaactacgaaaccgtcaagtactttaataacgagcgatacgaggcacagcgttatgacggctttttgaagacttatgaaaccgccagtctgaaaagcacctccaccttggctatgctcaatttcggccagtctgctattttctcagtgggcctgacagccattatggtgctggcaagtcagggtattgtcgctggcaccttgacggtaggcgacctggtaatggttaatggactgctcttccaactctccttacccttaaactttctggggacggtgtacagggagacccggcaagccctcattgacatgaacactctgtttactttgctgaaagtggatacccagattaaagataaggttatggcctcaccactgcagatcactccacagactgcgaccgtggcctttgataatgttcatttcgagtatatcgaggggcaaaaggtcctgtccggcatctctttcgaagtgccagcagggaaaaaggttgcaatcgtcggcggttcagggtcggggaagagcactatcgtgcgattactctttagattttacgagccgcaaaaaggcagtatttatctcgcaggtcagaatatccaggacgttagcttagaatccttacgccgagctgtgggcgtggttcctcaggatgccgtgctgttccataatactatctattacaatctgctctacggcaacatcagtgcgagcccagaagaggtctacgcagtagctaagttagctggcctgcacgatgccattctgcgcatgccacatggctacgacactcaggtgggagagagagggctcaaactgtctggaggcgaaaaacagagagtggcaatcgccagagcaatcctgaaggacccgccagtcattctgtatgatgaagccacatcaagcctggactccattactgaggagaccatcctgggagctatgaaagacgtggtgaaacaccggacctccattttcattgcccatcgtctttctaccgttgtcgatgcagatgaaataattgtcctggaccagggcaaggtagctgagagggggactcaccacggactcctggcaaatccacactcgatatacagcgaaatgtggcacacccaaagtagtagagtgcagaaccatgataacccaaaatgggaggccaagaaggagaatatatctaaggaagaggagagaaaaaaactgcaggaggagatcgttaactcggtgaaaggatgcggcaactgctcttgctag

SEQ ID NO: 96224 - DNA, 2116 bp, Artificial Sequence
  derived and/or modified sequence
ctcgctcaagatggcgctgctcgcgatgcattcttggcgctgggcggccgcggcggctgctttcgaaaagcgccggcactccgcgattctgatccggcctttagtctctgttagcggctcaggtccgcagtggaggccacatcaactcggcgccttgggaaccgctcgagcctaccaggctctccaggtatggccactgatagaaaagaggacatgttggcatggtcatgcaggaggaggactccacacagacccaaaagaagggttaaaagatgttgatactcggaaaatcataaaagcaatgctttcttatgtgtggcccaaagacaggccagatctacgagctagagttgccatttcgctgggatttttgggtggtgcaaaggccatgaatattgtggttcccttcatgtttaaatatgctgtagacagcctcaaccagatgtcgggaaacatgctgaacctgagtgatgcaccaaatacagttgcaaccatggcaacagcagttctgattggctatggtgtatcaagagctggagctgctttttttaacgaagttcgaaatgcagtatttggcaaggtagcccagaattcaatccgaagaatagccaaaaatgtctttctccatcttcacaacctggatctgggttttcacctgagcagacagacgggagctttatctaaggctattgacagaggaacaaggggtatcagttttgtcctgagtgctttggtatttaatcttcttcccatcatgtttgaagtgatgcttgtcagtggtgttttgtattacaaatgcggtgcccagtttgctttggtaacccttggaacacttggtacatacacagcattcacagttgcagtcacacggtggagaactagatttagaatagaaatgaacaaagcagataatgatgcaggtaatgctgctatagactcactgctgaattatgaaactgtgaagtattttaataatgaaagatatgaagcacagagatatgatggatttttgaagacgtatgagactgcttcattgaaaagtacctctactctggctatgctgaactttggtcaaagtgctattttcagtgtcggtttaacagctataatggtgctcgccagtcagggaattgtggcaggtacccttactgttggagatctagtaatggtgaatggactgctttttcagctttcattacccctgaactttctgggaactgtatatagagagactagacaagcactcatagatatgaacaccttgtttactctactcaaggtagacacccaaattaaagacaaagtgatggcatctccccttcagatcacaccacagacagctaccgtggcctttgataatgtgcattttgaatacattgagggccagaaagtccttagtggaatatcctttgaagtccctgcaggaaagaaagtggccattgtaggaggtagtgggtcagggaaaagcacaatagtgaggctattatttcgcttctatgagcctcaaaagggtagcatttatcttgctggtcaaaatatacaagatgtgagcctggaaagccttcggagggcagtgggagtggtacctcaggatgctgtcctcttccataatactatttattacaacctcttatatggaaacatcagtgcttcacctgaggaagtgtatgcagtggcaaaattagctggacttcatgatgcaattcttcgaatgccacatggatatgacacccaagtaggggaacgaggactcaagctttcaggaggagaaaagcaaagagtagcaattgcaagagccattttgaaggaccccccagtcatactctatgatgaagctacttcatcgttagattcgattactgaagagactattcttggtgccatgaaggatgtggtcaaacacagaacttctattttcattgcacacagattgtcaacagtggttgatgcagatgaaatcattgtcttggatcagggtaaggtagccgaacgtggtacccaccatggtttgcttgctaaccctcatagtatctattcagaaatgtggcatacacagagcagccgtgtgcagaaccatgataaccccaaatgggaagcaaagaaagaaaatatatcc

SEQ ID NO: 96225 - DNA, 2302 bp, Artificial Sequence
  derived and/or modified sequence
ctcggttcctctttcctcgctcaagatggcgctgctcgcgatgcattcttggcgctgggcggccgcggcggctgctttcgaaaagcgccggcactccgcgattctgatccggcctttagtctctgttagcggctcaggtccgcagtggaggccacatcaactcggcgccttgggaaccgctcgagcctaccaggctctccaggtatggccactgatagaaaagaggacatgttggcatggtcatgcaggaggaggactccacacagacccaaaagaagggttaaaagatgttgatactcggaaaatcataaaagcaatgctttcttatgtgtggcccaaagacaggccagatctacgagctagagttgccatttcgctgggatttttgggtggtgcaaaggccatgaatattgtggttcccttcatgtttaaatatgctgtagacagcctcaaccagatgtcgggaaacatgctgaacctgagtgatgcaccaaatacagttgcaaccatggcaacagcagttctgattggctatggtgtatcaagagctggagctgctttttttaacgaagttcgaaatgcagtatttggcaaggtagcccagaattcaatccgaagaatagccaaaaatgtctttctccatcttcacaacctggatctgggttttcacctgagcagacagacgggagctttatctaaggctattgacagaggaacaaggggtatcagttttgtcctgagtgctttggtatttaatcttcttcccatcatgtttgaagtgatgcttgtcagtggtgttttgtattacaaatgcggtgcccagtttgctttggtaacccttggaacacttggtacatacacagcattcacagttgcagtcacacggtggagaactagatttagaatagaaatgaacaaagcagataatgatgcaggtaatgctgctatagactcactgctgaattatgaaactgtgaagtattttaataatgaaagatatgaagcacagagatatgatggatttttgaagacgtatgagactgcttcattgaaaagtacctctactctggctatgctgaactttggtcaaagtgctattttcagtgtcggtttaacagctataatggtgctcgccagtcagggaattgtggcaggtacccttactgttggagatctagtaatggtgaatggactgctttttcagctttcattacccctgaactttctgggaactgtatatagagagactagacaagcactcatagatatgaacaccttgtttactctactcaaggtagacacccaaattaaagacaaagtgatggcatctccccttcagatcacaccacagacagctaccgtggcctttgataatgtgcattttgaatacattgagggccagaaagtccttagtggaatatcctttgaagtccctgcaggaaagaaagtggccattgtaggaggtagtgggtcagggaaaagcacaatagtgaggctattatttcgcttctatgagcctcaaaagggtagcatttatcttgctggtcaaaatatacaagatgtgagcctggaaagccttcggagggcagtgggagtggtacctcaggatgctgtcctcttccataatactatttattacaacctcttatatggaaacatcagtgcttcacctgaggaagtgtatgcagtggcaaaattagctggacttcatgatgcaattcttcgaatgccacatggatatgacacccaagtaggggaacgaggactcaagctttcaggaggagaaaagcaaagagtagcaattgcaagagccattttgaaggaccccccagtcatactctatgatgaagctacttcatcgttagattcgattactgaagagactattcttggtgccatgaaggatgtggtcaaacacagaacttctattttcattgcacacagattgtcaacagtggttgatgcagatgaaatcattgtcttggatcagggtaaggtagccgaacgtggtacccaccatggtttgcttgctaaccctcatagtatctattcagaaatgtggcatacacagagcagccgtgtgcagaaccatgataaccccaaatgggaagcaaagaaagaaaatatatccaaagaggaggaaagaaagaaactacaagaagaaattgtcaatagtgtgaaaggctgtggaaactgttcgtgctaagtcacataagacattttctttttttgttgttttggactacatatttgcactgaagcagaattgttttattaaaaaaatcatacattcccattttct

SEQ ID NO: 96226 - DNA, 2109 bp, Artificial Sequence
  derived and/or modified sequence
atggccctgctggccatgcacagctggagatgggccgccgccgccgccgccttcgagaagagaagacacagcgccatcctgatcagacccctggtgagcgtgagcggcagcggcccccagtggagaccccaccagctgggcgccctgggcaccgccagagcctaccaggccctgcaggtgtggcccctgatcgagaagagaacctgctggcacggccacgccggcggcggcctgcacaccgaccccaaggagggcctgaaggacgtggacaccagaaagatcatcaaggccatgctgagctacgtgtggcccaaggacagacccgacctgagagccagagtggccatcagcctgggcttcctgggcggcgccaaggccatgaacatcgtggtgcccttcatgttcaagtacgccgtggacagcctgaaccagatgagcggcaacatgctgaacctgagcgacgcccccaacaccgtggccaccatggccaccgccgtgctgatcggctacggcgtgagcagagccggcgccgccttcttcaacgaggtgagaaacgccgtgttcggcaaggtggcccagaacagcatcagaagaatcgccaagaacgtgttcctgcacctgcacaacctggacctgggcttccacctgagcagacagaccggcgccctgagcaaggccatcgacagaggcaccagaggcatcagcttcgtgctgagcgccctggtgttcaacctgctgcccatcatgttcgaggtgatgctggtgagcggcgtgctgtactacaagtgcggcgcccagttcgccctggtgaccctgggcaccctgggcacctacaccgccttcaccgtggccgtgaccagatggagaaccagattcagaatcgagatgaacaaggccgacaacgacgccggcaacgccgccatcgacagcctgctgaactacgagaccgtgaagtacttcaacaacgagagatacgaggcccagagatacgacggcttcctgaagacctacgagaccgccagcctgaagagcaccagcaccctggccatgctgaacttcggccagagcgccatcttcagcgtgggcctgaccgccatcatggtgctggccagccagggcatcgtggccggcaccctgaccgtgggcgacctggtgatggtgaacggcctgctgttccagctgagcctgcccctgaacttcctgggcaccgtgtacagagagaccagacaggccctgatcgacatgaacaccctgttcaccctgctgaaggtggacacccagatcaaggacaaggtgatggccagccccctgcagatcaccccccagaccgccaccgtggccttcgacaacgtgcacttcgagtacatcgagggccagaaggtgctgagcggcatcagcttcgaggtgcccgccggcaagaaggtggccatcgtgggcggcagcggcagcggcaagagcaccatcgtgagactgctgttcagattctacgagccccagaagggcagcatctacctggccggccagaacatccaggacgtgagcctggagagcctgagaagagccgtgggcgtggtgccccaggacgccgtgctgttccacaacaccatctactacaacctgctgtacggcaacatcagcgccagccccgaggaggtgtacgccgtggccaagctggccggcctgcacgacgccatcctgagaatgccccacggctacgacacccaggtgggcgagagaggcctgaagctgagcggcggcgagaagcagagagtggccatcgccagagccatcctgaaggacccccccgtgatcctgtacgacgaggccaccagcagcctggacagcatcaccgaggagaccatcctgggcgccatgaaggacgtggtgaagcacagaaccagcatcttcatcgcccacagactgagcaccgtggtggacgccgacgagatcatcgtgctggaccagggcaaggtggccgagagaggcacccaccacggcctgctggccaacccccacagcatctacagcgagatgtggcacacccagagcagcagagtgcagaaccacgacaaccccaagtgggaggccaagaaggagaacatcagctag

SEQ ID NO: 96227 - DNA, 2181 bp, Artificial Sequence
  derived and/or modified sequence
atggccctgctggccatgcacagctggagatgggccgccgccgccgccgccttcgagaagagaagacacagcgccatcctgatcagacccctggtgagcgtgagcggcagcggcccccagtggagaccccaccagctgggcgccctgggcaccgccagagcctaccaggccctgcaggtgtggcccctgatcgagaagagaacctgctggcacggccacgccggcggcggcctgcacaccgaccccaaggagggcctgaaggacgtggacaccagaaagatcatcaaggccatgctgagctacgtgtggcccaaggacagacccgacctgagagccagagtggccatcagcctgggcttcctgggcggcgccaaggccatgaacatcgtggtgcccttcatgttcaagtacgccgtggacagcctgaaccagatgagcggcaacatgctgaacctgagcgacgcccccaacaccgtggccaccatggccaccgccgtgctgatcggctacggcgtgagcagagccggcgccgccttcttcaacgaggtgagaaacgccgtgttcggcaaggtggcccagaacagcatcagaagaatcgccaagaacgtgttcctgcacctgcacaacctggacctgggcttccacctgagcagacagaccggcgccctgagcaaggccatcgacagaggcaccagaggcatcagcttcgtgctgagcgccctggtgttcaacctgctgcccatcatgttcgaggtgatgctggtgagcggcgtgctgtactacaagtgcggcgcccagttcgccctggtgaccctgggcaccctgggcacctacaccgccttcaccgtggccgtgaccagatggagaaccagattcagaatcgagatgaacaaggccgacaacgacgccggcaacgccgccatcgacagcctgctgaactacgagaccgtgaagtacttcaacaacgagagatacgaggcccagagatacgacggcttcctgaagacctacgagaccgccagcctgaagagcaccagcaccctggccatgctgaacttcggccagagcgccatcttcagcgtgggcctgaccgccatcatggtgctggccagccagggcatcgtggccggcaccctgaccgtgggcgacctggtgatggtgaacggcctgctgttccagctgagcctgcccctgaacttcctgggcaccgtgtacagagagaccagacaggccctgatcgacatgaacaccctgttcaccctgctgaaggtggacacccagatcaaggacaaggtgatggccagccccctgcagatcaccccccagaccgccaccgtggccttcgacaacgtgcacttcgagtacatcgagggccagaaggtgctgagcggcatcagcttcgaggtgcccgccggcaagaaggtggccatcgtgggcggcagcggcagcggcaagagcaccatcgtgagactgctgttcagattctacgagccccagaagggcagcatctacctggccggccagaacatccaggacgtgagcctggagagcctgagaagagccgtgggcgtggtgccccaggacgccgtgctgttccacaacaccatctactacaacctgctgtacggcaacatcagcgccagccccgaggaggtgtacgccgtggccaagctggccggcctgcacgacgccatcctgagaatgccccacggctacgacacccaggtgggcgagagaggcctgaagctgagcggcggcgagaagcagagagtggccatcgccagagccatcctgaaggacccccccgtgatcctgtacgacgaggccaccagcagcctggacagcatcaccgaggagaccatcctgggcgccatgaaggacgtggtgaagcacagaaccagcatcttcatcgcccacagactgagcaccgtggtggacgccgacgagatcatcgtgctggaccagggcaaggtggccgagagaggcacccaccacggcctgctggccaacccccacagcatctacagcgagatgtggcacacccagagcagcagagtgcagaaccacgacaaccccaagtgggaggccaagaaggagaacatcagcaaggaggaggagagaaagaagctgcaggaggagatcgtgaacagcgtgaagggctgcggcaactgcagctgctag

SEQ ID NO: 96228 - protein, 265 aa, Artificial Sequence
  derived and/or modified sequence
MAWWKSWDLTETLKSELSGKFERLIVALMYPPYRYEAKELHDAMKGLGTKEGVIIEILASRTKNQLREIMKAYEEDYGSSLEEDIQADTSGYLERILVCLLQGSRDDVSSFVDPGLALQDAQDLYAAGEKIRGTDEMKFITILCTRSATHLLRVFEEYEKIANKSIEDSIKSETHGSLEEAMLTVVKCTQNLHSYFAERLYYAMKGAGTRDGTLIRNIVSRSEIDLNLIKCHFKKMYGKTLSSMIMEDTSGDYKNALLSLVGSDP

SEQ ID NO: 96229 - protein, 265 aa, Artificial Sequence
  derived and/or modified sequence
MAWWKAWDLTETLKSELSGKFERLIVALMYPPYRYEAKELHDAMKGLGTKEGVIIEILASRTKNQLREIMKAYEEDYGSSLEEDIQADTSGYLERILVCLLQGSRDDVSSFVDPALALQDAQDLYAAGENIRGTDEMKFITILCTRSATHLLRVFEEYEKIANKSIEDSIKSETHGSLEEAMLTVVKCTQNLHSYFAERLYYAMKGAGTRDGTLIRNIVSRSEIDLNLIKCHFKKMYGKTLSSMIMEDTSGDYKNALLSLVGSDP

SEQ ID NO: 96230 - DNA, 798 bp, Artificial Sequence
  derived and/or modified sequence
atggcctggtggaagagctgggacctgaccgagaccctgaagagcgagctgagcggcaagttcgagagactgatcgtggccctgatgtaccccccctacagatacgaggccaaggagctgcacgacgccatgaagggcctgggcaccaaggagggcgtgatcatcgagatcctggccagcagaaccaagaaccagctgagagagatcatgaaggcctacgaggaggactacggcagcagcctggaggaggacatccaggccgacaccagcggctacctggagagaatcctggtgtgcctgctgcagggcagcagagacgacgtgagcagcttcgtggaccccggcctggccctgcaggacgcccaggacctgtacgccgccggcgagaagatcagaggcaccgacgagatgaagttcatcaccatcctgtgcaccagaagcgccacccacctgctgagagtgttcgaggagtacgagaagatcgccaacaagagcatcgaggacagcatcaagagcgagacccacggcagcctggaggaggccatgctgaccgtggtgaagtgcacccagaacctgcacagctacttcgccgagagactgtactacgccatgaagggcgccggcaccagagacggcaccctgatcagaaacatcgtgagcagaagcgagatcgacctgaacctgatcaagtgccacttcaagaagatgtacggcaagaccctgagcagcatgatcatggaggacaccagcggcgactacaagaacgccctgctgagcctggtgggcagcgacccctag

SEQ ID NO: 96231 - DNA, 798 bp, Artificial Sequence
  derived and/or modified sequence
atggcctggtggaaggcctgggacctgaccgagaccctgaagagcgagctgagcggcaagttcgagagactgatcgtggccctgatgtaccccccctacagatacgaggccaaggagctgcacgacgccatgaagggcctgggcaccaaggagggcgtgatcatcgagatcctggccagcagaaccaagaaccagctgagagagatcatgaaggcctacgaggaggactacggcagcagcctggaggaggacatccaggccgacaccagcggctacctggagagaatcctggtgtgcctgctgcagggcagcagagacgacgtgagcagcttcgtggaccccgccctggccctgcaggacgcccaggacctgtacgccgccggcgagaacatcagaggcaccgacgagatgaagttcatcaccatcctgtgcaccagaagcgccacccacctgctgagagtgttcgaggagtacgagaagatcgccaacaagagcatcgaggacagcatcaagagcgagacccacggcagcctggaggaggccatgctgaccgtggtgaagtgcacccagaacctgcacagctacttcgccgagagactgtactacgccatgaagggcgccggcaccagagacggcaccctgatcagaaacatcgtgagcagaagcgagatcgacctgaacctgatcaagtgccacttcaagaagatgtacggcaagaccctgagcagcatgatcatggaggacaccagcggcgactacaagaacgccctgctgagcctggtgggcagcgacccctag

SEQ ID NO: 96232 - DNA, 798 bp, Artificial Sequence
  derived and/or modified sequence
atggcatggtggaagtcttgggatcttaccgagactcttaaatctgaactcagcggtaaattcgagcgattaatagtggccttaatgtatccgccatatcgttacgaggctaaagagctgcacgacgctatgaaggggctcgggaccaaggaaggggtaattatcgaaattctggcttcacggacaaaaaaccaactgcgagaaattatgaaggcatatgaagaggactatggcagtagtctggaggaggacatccaggcagacacaagcggctacctggaacgaattcttgtctgcctgttgcagggaagccgcgatgacgtatcctcctttgtagatccagggttagctctgcaggatgcacaggatctgtatgccgctggcgaaaaaatacgagggactgacgagatgaagtttattaccatcttgtgcacaagaagcgccacgcatttactcagggtgtttgaagaatatgagaagattgccaataagagcatcgaagattctattaaaagtgaaacccatggtagcctggaagaagctatgctgacggtggtgaaatgcactcaaaatttacactcttacttcgctgagcgactgtactacgccatgaagggtgcgggaacaagggacgggaccctgatccgcaatattgtctcccgctcggaaatagatcttaacctgattaagtgtcatttcaaaaagatgtacggcaagaccctttcaagcatgattatggaagatacctcaggggattataagaacgcgctgctgtccctcgtggggtcagatccatag

SEQ ID NO: 96233 - DNA, 798 bp, Artificial Sequence
  derived and/or modified sequence
atggcctggtggaaggcttgggacttgaccgaaacactcaagagtgaactgtccggcaagttcgaacggctgattgtggcattaatgtatccaccctaccggtacgaggcaaaagagctgcatgacgcaatgaaggggcttggcaccaaggagggggtgatcattgagattctggcttcacgcaccaagaatcaattgcgagaaatcatgaaggcttatgaagaggactatggtagctccctggaggaagatatccaggcggacacctccgggtacttggaacgcatcctcgtgtgcctcttacagggttcacgggacgatgtgtcgtccttcgtcgatccagccctggctttgcaggatgcgcaagacctgtacgccgcaggagaaaacattaggggcactgacgaaatgaagttcattactatcctgtgcacccgatctgccactcatctcctgagagtctttgaggagtatgaaaagatcgccaacaagagcattgaagattctatcaaaagcgaaactcatggctccttggaagaagcaatgctgacggttgttaaatgtacacagaatcttcatagctattttgcggagcggctctattatgccatgaagggcgccggcaccagagacggcaccctgatccgcaatattgtttccagatccgagatcgacctaaacctaattaaatgtcactttaagaaaatgtacgggaagacactctcatccatgattatggaggacacttccggcgactacaagaacgccctattgtccttggttggctctgacccgtag

SEQ ID NO: 96234 - DNA, 798 bp, Artificial Sequence
  derived and/or modified sequence
atggcctggtggaagtcctgggacctgacagagaccctgaagtctgagctgagcggcaagtttgagcggctgattgtggccctgatgtacccaccctaccgctatgaggccaaggagctgcatgatgccatgaagggcctgggcaccaaggagggcgtcatcatcgagatcctggccagcaggaccaagaaccagctgcgggagatcatgaaggcctatgaagaagattatggcagcagcctggaggaggacatccaggccgacaccagcggctacctggagcgcatcctggtgtgcctgctgcagggcagcagagatgatgtgagcagctttgtggaccccggcctggccctgcaggatgcccaggacctgtatgctgctggggagaagatccggggcacagatgagatgaagttcatcaccatcctgtgcaccaggtctgccacccacctgctgcgggtgtttgaggagtatgagaagatcgccaacaagagcattgaagattccatcaagtctgagacccacggcagcctggaggaggccatgctgactgtggtgaagtgcacccagaacctgcacagctactttgctgagcggctgtactatgccatgaagggagctggcaccagagatggcaccctcatccggaacatcgtgagccgctcagaaattgacctgaacctgatcaagtgccacttcaagaagatgtatggcaagaccctgagctccatgatcatggaggacaccagcggggactacaagaatgccctgctgagcctggtgggcagtgacccctag

SEQ ID NO: 96235 - DNA, 798 bp, Artificial Sequence
  derived and/or modified sequence
atggcctggtggaaggcctgggacctgacagagaccctgaagtctgagctgagcggcaagtttgagcggctgattgtggccctgatgtacccaccctaccgctatgaggccaaggagctgcatgatgccatgaagggcctgggcaccaaggagggcgtcatcatcgagatcctggccagcaggaccaagaaccagctgcgggagatcatgaaggcctatgaagaagattatggcagcagcctggaggaggacatccaggccgacaccagcggctacctggagcgcatcctggtgtgcctgctgcagggcagcagagatgatgtgagcagctttgtggaccctgccctggccctgcaggatgcccaggacctgtatgctgctggggagaacatccggggcacagatgagatgaagttcatcaccatcctgtgcaccaggtctgccacccacctgctgcgggtgtttgaggagtatgagaagatcgccaacaagagcattgaagattccatcaagtctgagacccacggcagcctggaggaggccatgctgactgtggtgaagtgcacccagaacctgcacagctactttgctgagcggctgtactatgccatgaagggagctggcaccagagatggcaccctcatccggaacatcgtgagccgctcagaaattgacctgaacctgatcaagtgccacttcaagaagatgtatggcaagaccctgagctccatgatcatggaggacaccagcggggactacaagaatgccctgctgagcctggtgggcagtgacccctag

SEQ ID NO: 96236 - DNA, 798 bp, Artificial Sequence
  derived and/or modified sequence
atggcctggtggaagagctgggacctgaccgagaccctgaagagcgagctttccggtaagtttgagcgcctgatcgtggctcttatgtatcctccttatcgctatgaagcaaaggagctgcacgacgctatgaaggggctgggaacaaaagagggcgtcattatcgaaattttggcctctcgcaccaaaaatcagctcagggagataatgaaggcgtatgaagaagattatggctcctccttagaagaggacattcaagcagacacaagcgggtacctggagcggatcttagtctgtctattgcagggatctagggatgatgtgtcttcttttgtggatccaggcttggctctgcaagacgcccaggacctgtatgccgcaggcgagaaaataaggggtactgatgaaatgaagttcataactatactatgtacgagaagcgcaacgcaccttttgagggtttttgaggagtatgagaaaattgctaacaaaagtatcgaagattcaattaagtcggaaacacatggcagtctggaggaggcaatgcttaccgttgtcaagtgcactcaaaacctgcacagttatttcgcagagaggctgtactacgccatgaagggagcggggaccagggacgggacgctgatacggaatatcgtctcccgttctgagatcgacttgaatctcatcaagtgccacttcaaaaaaatgtacggaaagaccctgagttctatgatcatggaggacacgagcggtgactacaaaaatgccttactgagtttggtggggagcgacccttag

SEQ ID NO: 96237 - DNA, 798 bp, Artificial Sequence
  derived and/or modified sequence
atggcctggtggaaggcctgggacctgaccgagaccctgaagagcgagctaagcggaaaatttgaaaggctaatcgtggccttgatgtatccaccctacagatacgaggcaaaggagctccacgacgcaatgaagggtctcggaaccaaagagggggtgataattgaaattctcgcatcacgaactaagaaccagctgcgggagatcatgaaagcatacgaggaggattacggctcttctctggaagaagatattcaggcggacacatccggttacttggaaaggatactggtgtgccttctgcaggggtcaagggacgatgtctcatcctttgtggatccagctctcgctctgcaagatgcacaggatctgtatgccgcgggcgagaacatcaggggcactgacgaaatgaagttcattactatcctctgtactcggagtgccacacacttgctgcgtgtctttgaggaatatgaaaaaatagccaataagagcatcgaggactccatcaagtccgaaactcacgggtcccttgaggaggcgatgttgactgtggtgaagtgcactcagaacctccacagttactttgcggagcggctgtattacgcgatgaagggggcagggacccgagatggaacgctcatcaggaatattgtaagccggtccgaaatagacttgaacctcataaagtgccattttaagaaaatgtatggtaagaccctttcttctatgataatggaagacacctctggggactacaaaaacgcgcttcttagtttagttggatctgatccatag

SEQ ID NO: 96238 - DNA, 1179 bp, Artificial Sequence
  derived and/or modified sequence
agacgtgtggagtcccagcagaggccaacctgtgtctcttcatctccctgggaaaggtgcccccgaggtgaaagagatggcctggtggaaatcctgggacctcactgagaccttgaagtctgagctcagtggcaagtttgagaggctcattgtggcccttatgtacccgccatacagatacgaagccaaggagctgcatgacgccatgaagggcttaggaaccaaggagggtgtcatcattgagatcctggcctctcggaccaagaaccagctgcgggagataatgaaggcgtatgaggaagactatgggtccagcctggaggaggacatccaagcagacacaagtggctacctggagaggatcctggtgtgcctcctgcagggcagcagggatgatgtgagcagctttgtggacccaggactggccctccaagacgcacaggatctgtatgcggcaggcgagaagattcgtgggactgatgagatgaaattcatcaccatcctgtgcacgcgcagtgccactcacctgctgagagtgtttgaagagtatgagaaaattgccaacaagagcattgaggacagcatcaagagtgagacccatggctcactggaggaggccatgctcactgtggtgaaatgcacccaaaacctccacagctactttgcagagagactctactatgccatgaagggagcagggacgcgtgatgggaccctgataagaaacatcgtttcaaggagcgagattgacttaaatcttatcaaatgtcacttcaagaagatgtacggcaagaccctcagcagcatgatcatggaagacaccagcggcgactacaagaacgccctgctgagcctggtgggcagcgacccctgaggcacagaagaacaagagcaaagaccatgaagccagagtctccaggactcctcactcaacctcggccatggacgcaggttgggtgtgaggggggtcccagcctttcagtcttctatttccctatttccagtgctttccagccgggtttctgacccagagggtggaaccggcctggactcctcttcccaacttcctccaggtcatttcccagtgtgagcacaatgccaaccttagtgtttctccagccagacagatgcctcagcatgaagggcttggggacttgtggatcattccttcctccctgc

SEQ ID NO: 96239 - DNA, 1179 bp, Artificial Sequence
  derived and/or modified sequence
agacgtgtggagtcccagcagaggccaacctgtgtctcttcatctccgtgagaaaggtgcccccgaagtgaaagagatggcctggtggaaagcctgggacctcactgagaccttgaagtctgagctcagtggcaagtttgagaggctcattgtggcccttatgtacccgccatacagatacgaagccaaggagctgcatgacgccatgaagggcttaggaaccaaggagggtgtcatcattgagatcctggcctctcggaccaagaaccagctgcgggagataatgaaggcgtatgaggaagactatgggtccagcctggaggaggacatccaagcagacacaagtggctacctggagaggatcctggtgtgcctcctgcagggcagcagggatgatgtgagcagctttgtggacccggcactggccctccaagacgcacaggatctgtatgcggcaggcgagaatattcgtgggactgatgagatgaaattcatcaccatcctgtgcacgcgcagtgccactcacctgctgagagtgtttgaagagtatgagaaaattgccaacaagagcattgaggacagcatcaagagtgagacccatggctcactggaggaggccatgctcactgtggtgaaatgcacccaaaacctccacagctactttgcagagagactctactatgccatgaagggagcagggacgcgtgatgggaccctgataagaaacatcgtttcaaggagcgagattgacttaaatcttatcaaatgtcacttcaagaagatgtacggcaagaccctcagcagcatgatcatggaagacaccagcggtgactacaagaacgccctgctgagcctggtgggcagcgacccctgaggcacagaagaacaagagcaaagaccatgaagccagagtctccaggactcctcactcaacctcggccatggacgcaggttgggtgtgaggggggtcccagcctttcggtcttctatttccctatttccagtgctttccagccgggtttctgacccagagggtggaaccggcctggactcctcttcccaacttcctccaggtcatttcccagtgtgagcacaatgccaaccttagtgtttctccagccagacagatgcctcagcatgaagggcttggggacttgtggatcattccttcctccctgc

SEQ ID NO: 96240 - DNA, 798 bp, Artificial Sequence
  derived and/or modified sequence
atggcctggtggaaatcctgggacttgactgaaaccctgaaaagtgagttatcaggaaaattcgagcgcctgatcgtggctttaatgtaccctccctaccgctacgaagccaaagagctccacgatgcaatgaaaggactgggtaccaaggaaggcgtaattatcgagatcctggccagtagaaccaaaaaccagctgagggaaatcatgaaggcctatgaggaagattacggatcatcactggaggaggatattcaagcggatacttccgggtatctagagaggatcttggtatgcttactgcagggctcacgggatgacgtgtcaagcttcgtggaccccggtctagcacttcaagacgcccaagacctttatgccgcaggcgaaaaaatacgagggaccgatgaaatgaagtttataactatcttatgcacccgatcggcgacacatctcctccgggtgtttgaagaatatgagaagatcgccaataaatcgatcgaggactccatcaaatcggaaacccacggatctctcgaggaagccatgctaacagtggtcaaatgtacccagaatctgcattcttattttgccgagcggctttattatgccatgaagggggcaggaactcgggacgggacccttattcggaacatcgtctcccggtctgaaattgaccttaaccttatcaagtgtcacttcaagaaaatgtacggcaagactctgagctctatgattatggaagatactagcggcgattacaaaaacgctctgctttcactggtcggctccgatccttag

SEQ ID NO: 96241 - DNA, 798 bp, Artificial Sequence
  derived and/or modified sequence
atggcctggtggaaggcttgggatttaactgaaactctaaagtctgagctcagcggtaaatttgagagactcatcgtcgcactgatgtaccctccatataggtacgaggcaaaagagttacatgacgcaatgaagggactgggcaccaaagagggtgtgattattgagattctggctagcaggaccaaaaatcaactgcgggagataatgaaggcatatgaggaggactacggctctagtttggaagaggatattcaggccgacactagtgggtacttagagcgaattctggtctgtctgctgcaggggtcacgcgatgacgtaagtagtttcgtcgaccccgctcttgccctgcaggacgcccaggatctttacgccgctggagagaatatccggggaacagatgaaatgaagttcatcactatactgtgcacccgaagcgcaacccacctgctgagagtcttcgaagaatatgaaaaaatcgccaataaatctatcgaggacagtatcaagtcagaaactcacggatcgttggaggaagccatgctgacagtcgttaagtgtacccagaacctccattcctatttcgctgagagactttattacgctatgaaaggagcaggaacgcgcgatggcactctgattagaaatatagttagcaggtccgagattgacctgaatttgataaagtgtcattttaagaaaatgtacggtaaaaccctgagtagtatgattatggaggacacttcaggagactacaagaacgccctactttctctcgtggggagtgacccctag

SEQ ID NO: 96242 - DNA, 798 bp, Artificial Sequence
  derived and/or modified sequence
atggcctggtggaagagctgggacctcacagagacactgaaatcagagctctccggcaaatttgagcgcttgatcgtcgcgctgatgtatcccccctaccggtatgaggcaaaagaattgcatgacgccatgaaagggctcggcacaaaagagggcgtcatcatcgaaatcctggcttcgagaacaaaaaatcagttaagggaaattatgaaagcctacgaagaagattacgggagctccttagaggaggatatacaagcagacacaagcggctacctggaacggatcctggtatgcttactccaaggctcacgagacgatgtaagttcttttgttgatcccggcttggctctgcaggacgcacaggacctatacgcagctggagagaaaatccgtggcactgatgagatgaagttcataacgatcttgtgtactcggagcgctactcatctcctgagggtcttcgaggaatacgagaaaattgcaaacaagtccatcgaagatagtattaagtccgagacccacggttcattggaagaggcgatgttaaccgtcgttaagtgcacccaaaatttgcactcttatttcgcggagcgactttattatgccatgaagggggccggcacaagagacgggacactaattaggaatatcgttagtcgtagcgagatcgacctgaacttaatcaaatgccatttcaaaaaaatgtatggcaagaccctctccagcatgattatggaggatacctcaggggactacaagaatgctcttctgtccctagtggggtccgatccttag

SEQ ID NO: 96243 - DNA, 798 bp, Artificial Sequence
  derived and/or modified sequence
atggcctggtggaagagctgggacctgaccgagaccctgaagagcgaactttcgggaaaattcgaacggctcattgttgccctgatgtacccgccatatcggtacgaggcaaaggagcttcacgacgctatgaaaggcctggggacaaaagagggggttatcatcgaaatactggcttctcgaaccaagaatcagctgagagaaataatgaaagcctatgaagaggactacggctccagcctggaggaagatattcaagccgacacttccggctacctcgagcgcattctggtgtgtctgcttcaggggagtagggatgacgtgtccagctttgttgatcccggcctcgccttacaggatgcccaggacttgtatgcagctggagaaaaaattcgagggaccgacgaaatgaagtttattactatactctgcacaaggtctgctacgcacctcctgcgggtgttcgaggagtacgagaagattgcgaacaagtccatcgaagattcaatcaaaagcgaaacccacggatctctagaggaagccatgcttactgtagtcaaatgtacgcagaatcttcattcttactttgccgaacggctttattacgccatgaagggggcagggacccgagatggaacccttatacggaacattgtttcccggtccgagattgacttgaacctgattaaatgtcattttaaaaaaatgtacgggaaaactcttagctcaatgattatggaggacacttctggcgactataagaatgctctgctctctctggtgggttctgacccctag

SEQ ID NO: 96244 - DNA, 1179 bp, Artificial Sequence
  derived and/or modified sequence
agacgtgtggagtcccagcagaggccaacctgtgtctcttcatctccctgggaaaggtgcccccgaggtgaaagagatggcctggtggaaatcctgggacctcactgagaccttgaagtctgagctcagtggcaagtttgagaggctcattgtggcccttatgtacccgccatacagatacgaagccaaggagctgcatgacgccatgaagggcttaggaaccaaggagggtgtcatcattgagatcctggcctctcggaccaagaaccagctgcgggagataatgaaggcgtatgaggaagactatgggtccagcctggaggaggacatccaagcagacacaagtggctacctggagaggatcctggtgtgcctcctgcagggcagcagggatgatgtgagcagctttgtggacccaggactggccctccaagacgcacaggatctgtatgcggcaggcgagaagattcgtgggactgatgagatgaaattcatcaccatcctgtgcacgcgcagtgccactcacctgctgagagtgtttgaagagtatgagaaaattgccaacaagagcattgaggacagcatcaagagtgagacccatggctcactggaggaggccatgctcactgtggtgaaatgcacccaaaacctccacagctactttgcagagagactctactatgccatgaagggagcagggacgcgtgatgggaccctgataagaaacatcgtttcaaggagcgagattgacttaaatcttatcaaatgtcacttcaagaagatgtacggcaagaccctcagcagcatgatcatggaagacaccagcggtgactacaagaacgccctgctgagcctggtgggcagcgacccctgaggcacagaagaacaagagcaaagaccatgaagccagagtctccaggactcctcactcaacctcggccatggacgcaggttgggtgtgaggggggtcccagcctttcggtcttctatttccctatttccagtgctttccagccgggtttctgacccagagggtggaaccggcctggactcctcttcccaacttcctccaggtcatttcccagtgtgagcacaatgccaaccttagtgtttctccagccagacagatgcctcagcatgaagggcttggggacttgtggatcattccttcctccctgc

SEQ ID NO: 96245 - DNA, 798 bp, Artificial Sequence
  derived and/or modified sequence
atggcctggtggaaaagctgggacctgactgagactctgaaaagcgaactctccgggaaatttgaaagactaatcgtagcgctgatgtatcctccatacagatacgaagctaaggagctacatgatgctatgaaaggtcttggtactaaggagggagtcatcattgaaatcttggcaagcagaaccaagaatcagctcagggagatcatgaaggcgtatgaagaggactacggtagcagccttgaggaggatatacaggctgacacctccgggtacctggaacgtatcttagtttgtctgctgcaagggagccgcgacgatgtctcttcgttcgtggatccagggctggccctgcaagacgcccaagatctctacgcagctggtgaaaaaatacggggtacagacgagatgaagttcatcactattctttgcaccaggtcggctacacacctgctaagggttttcgaggagtacgagaaaatcgcaaataaatcgatagaagatagcatcaaaagtgagacccatgggagtctggaagaggccatgctgaccgttgtgaagtgcacccagaacttgcatagctactttgcagagcgactgtattatgctatgaaaggagcgggaacccgcgatggcacacttatcagaaatatcgtctcacgcagcgagattgacctgaatttgataaagtgccatttcaagaaaatgtatgggaagacactgtcttccatgatcatggaggatacttcgggcgattataaaaacgcactcctgagcctggtggggtccgatccatag

SEQ ID NO: 96246 - protein, 411 aa, Artificial Sequence
  derived and/or modified sequence
MTPEDPEETQPLLGPPGGSAPRGRRVFLAAFAAALGPLSFGFALGYSSPAIPSLQRAAPPAPRLDDAAASWFGAVVTLGAAAGGVLGGWLVDRAGRKLSLLLCSVPFVAGFAVITAAQDVWMLLGGRLLTGLACGVASLVAPVYISEIAYPAVRGLLGSCVQLMVVVGILLAYLAGWVLEWRWLAVLGCVPPSLMLLLMCFMPETPRFLLTQHRRQEAMAALRFLWGSEQGWEDPPIGAEQSFHLALLRQPGIYKPFIIGVSLMAFQQLSGVNAVMFYAETIFEEAKFKDSSLASVVVGVIQVLFTAVAALIMDRAGRRLLLVLSGVVMVFSTSAFGAYFKLTQGGPGNSSHVAISAPVSAQPVDASVGLAWLAVGSMCLFIAGGPQALWSLLACLRFLHLQCPFHFVLCP

SEQ ID NO: 96247 - DNA, 1236 bp, Artificial Sequence
  derived and/or modified sequence
atgactccagaagatccggaggagactcaaccattactgggtcctcccggagggtccgccccccggggccgacgcgtcttcctggcggcttttgccgccgccctgggaccccttagttttggattcgcactcggctactcctcgcccgcaattccctcactgcaacgcgccgccccaccggcccccaggctcgatgacgccgcagcaagctggttcggcgccgtggttaccctcggagcagccgcggggggcgtgctcggtggctggttggtcgatcgcgcagggcgaaagctgtctctcctgctatgtagtgtgcccttcgtcgccggattcgccgtgatcacagcggctcaggacgtctggatgcttctcggcgggaggttactgactggactggcttgtggagtggccagtcttgtggcacccgtgtatatcagcgaaatagcttatcctgccgtgcggggcctcctgggatcatgcgtccagctcatggtcgtggtgggcattctactcgcgtatctggccggttgggttctcgagtggcgctggctggccgttttaggctgtgtgcctccatccctgatgttgttgctgatgtgtttcatgcctgagacaccacggttcctactcacccagcatcggcgtcaggaagctatggcagccctaaggtttctctgggggagcgagcaaggctgggaagacccccccattggggccgagcagtctttccatctggctctcctgcgtcagcctggaatatataagcccttcattatcggagttagcttgatggcattccagcaactgtcgggcgttaacgcagtcatgttctatgccgaaaccattttcgaggaagcaaaatttaaggactcttctcttgcatctgttgttgtgggcgtgattcaggtgctgtttacagcggtggctgcactgattatggatcgggccggacgccggctcctgctggtgctgagcggggtggttatggtattctcgacttcagccttcggagcctattttaagcttactcagggtgggccaggtaattcatcccacgtagcgatctcagcccccgtgtccgctcagcccgtcgacgcctctgtcggcctggcctggctggcagttggcagcatgtgcctgttcatcgctggaggcccccaagccctatggtctttgctcgcctgcctccgctttctacatctgcagtgtccttttcacttcgttctgtgtccttag

SEQ ID NO: 96248 - DNA, 1236 bp, Artificial Sequence
  derived and/or modified sequence
atgaccccagaggaccctgaggagacccagcccctgctgggccccccaggcggcagcgccccccggggccggcgggtcttcctggccgcctttgctgctgccctgggccccctgagctttggatttgccctgggctacagcagccctgccatccccagcctgcagagagctgcccccccagccccccggctggatgatgctgctgcctcctggtttggagctgtggtgaccctgggcgctgctgctgggggcgtgctgggcggctggctggtggaccgggccggcaggaagctgagcctgctgctgtgcagcgtgccctttgtggccggctttgctgtgatcacagctgcccaggatgtgtggatgctgctgggcggccgcctgctgaccggcctggcctgtggggtggccagcctggtggcccctgtgtacatcagcgagatcgcctacccagctgtgcggggcctgctgggcagctgtgtgcagctgatggtggtggtgggcatcctgctggcctacctggccggctgggtgctggagtggcgctggctggccgtgctgggctgtgtgccccccagcctgatgctgctgctgatgtgcttcatgcctgagaccccccgcttcctgctgacccagcaccggcggcaggaggccatggccgccctgcgcttcctgtggggcagcgagcagggctgggaggacccccccatcggggctgagcagagcttccacctggccctgctgcggcagcccggcatctacaagcccttcatcattggagtgtccctgatggccttccagcagctgagcggcgtgaatgctgtgatgttttatgcagagaccatctttgaggaggccaagttcaaggacagcagcctggcctctgtggtggtgggcgtcatccaggtgctcttcaccgctgtggccgccctgatcatggaccgggccggccggcggctgctgctggtgctgtctggagtggtgatggtgttcagcaccagcgccttcggggcctacttcaagctgacccagggcggccctggcaacagcagccacgtggccatcagcgcccctgtgtctgcccagcctgtggatgcctctgtgggcctggcctggctggccgtgggctccatgtgcctcttcatcgccggcggcccccaggccctgtggagcctgctggcctgcctgcgcttcctgcacctgcagtgccccttccactttgtgctgtgcccctag

SEQ ID NO: 96249 - DNA, 1236 bp, Artificial Sequence
  derived and/or modified sequence
atgacccccgaggaccccgaggagacccagcccctgctgggcccccccggaggtagcgcgcccagaggaaggcgggtctttctggctgcattcgccgccgctttgggcccactgtcttttggctttgccctgggctatagctctccagccattccaagcctccagcgagctgccccaccagctccccgattagatgacgcagccgcatcatggttcggtgctgttgttaccctcggtgccgctgctgggggagttttgggtggatggctcgtggaccgcgccggtcggaaactttcactgctcctgtgttcagtgccctttgtagccgggtttgccgttatcaccgctgcccaggatgtgtggatgcttctcggtggccgtctcctgactgggttagcctgcggtgtggcgagccttgttgctccagtctacatttcagaaatcgcctatccagctgtgcgggggctcctggggagttgcgtccagctgatggttgtggtgggtattctcctggcctacctagccgggtgggtgctcgagtggcgctggctcgccgtgttgggctgtgtacccccttcactgatgttactcttaatgtgtttcatgcccgagacacctcggttcctgttaacacagcatcgcagacaggaggccatggccgcactcagatttctctggggctcagagcaggggtgggaggaccctccgattggagccgagcagtcctttcatctagctctcctcaggcagcctggcatttataagccttttatcataggggtgtctctgatggcgttccagcagctctcaggcgtgaatgcggtcatgttctatgccgagacaatatttgaagaggcaaagtttaaggatagctctctggcgtcagtcgttgttggtgtgattcaggtgcttttcaccgcggtggctgccttaattatggatcgagccggaaggcgattgttgcttgttttgtcgggtgtggtgatggtgtttagcactagcgcctttggcgcatatttcaagctgacccagggaggtccaggaaactccagtcatgtggcaatcagcgcacccgtgagtgcacagccggtggacgcttccgtcggactcgcttggcttgccgtaggcagcatgtgcttgttcattgcaggcggcccccaggccttatggtctctcctggcttgcctgagatttttgcaccttcagtgcccttttcactttgttctctgtccctag

SEQ ID NO: 96250 - DNA, 1236 bp, Artificial Sequence
  derived and/or modified sequence
atgactcccgaagatcctgaagagacccaaccactcctgggcccacccggagggagtgcccctcgaggcaggagggtatttctcgccgctttcgcagcagcactgggtcccttgtctttcggttttgcattgggctatagctctcccgcaattccatctttacaaagagcagcgcctcctgctcccagactcgatgatgctgcagctagctggtttggcgcagtggtcacgctcggcgctgccgctggtggcgtcctggggggatggctggtggaccgagctgggaggaaattgtctctcctgttgtgctcggtcccgttcgtggccggttttgccgtgattacagcagcccaggatgtatggatgctgctgggaggcaggctgcttacaggcctcgcgtgcggtgtcgctagtctggtggccccagtgtacattagtgaaattgcctaccccgcagttagaggtctcctcggatcttgcgtacagctgatggtggttgtcggcatccttctcgcgtatttagcaggttgggtgctggaatggcgctggctggcggttcttggttgcgtgcctccatctcttatgcttctcctgatgtgctttatgcccgagacccctaggttcctgttgacacagcatcgcaggcaggaggctatggctgcgctccggttcttgtggggaagcgagcaggggtgggaggatcctccaatcggcgcagagcagtcattccacctcgcgttgctgaggcagcctgggatatataagccttttatcattggcgtgtcacttatggccttccagcagctgagcggagttaacgctgtgatgttctacgcagaaaccatttttgaggaagctaagtttaaagatagctctctggcttcggtggttgttggcgttatacaggttctgttcaccgccgttgccgctctgatcatggatagagccggtcgccgtctgctgcttgtcttatctggtgtggtgatggtgttctccacaagcgcctttggcgcttatttcaaattgacccagggcggtcccggaaactcaagccacgtggctatctccgccccagtttctgcccagccagtggatgcttcggtgggcttggcttggttagccgtcgggtctatgtgcctgtttatcgcgggaggtcctcaggctttatggagcctgttggcatgtctgcggttcctacacctgcagtgccccttccattttgtgctttgcccctag

SEQ ID NO: 96251 - DNA, 1937 bp, Artificial Sequence
  derived and/or modified sequence
atgacgcccgaggacccagaggaaacccagccgcttctggggcctcctggcggcagcgcgccccgcggccgccgcgtcttcctcgccgccttcgccgctgccctgggcccactcagcttcggcttcgcgctcggctacagctccccggccatccctagcctgcagcgcgccgcgcccccggccccgcgcctggacgacgccgccgcctcctggttcggggctgtcgtgaccctgggtgccgcggcggggggagtgctgggcggctggctggtggaccgcgccgggcgcaagctgagcctcttgctgtgctccgtgcccttcgtggccggctttgccgtcatcaccgcggcccaggacgtgtggatgctgctggggggccgcctcctcaccggcctggcctgcggtgttgcctccctagtggccccggtctacatctccgaaatcgcctacccagcagtccgggggttgctcggctcctgtgtgcagctaatggtcgtcgtcggcatcctcctggcctacctggcaggctgggtgctggagtggcgctggctggctgtgctgggctgcgtgcccccctccctcatgctgcttctcatgtgcttcatgcccgagaccccgcgcttcctgctgactcagcacaggcgccaggaggccatggccgccctgcggttcctgtggggctccgagcagggctgggaagacccccccatcggggctgagcagagctttcacctggccctgctgcggcagcccggcatctacaagcccttcatcatcggcgtctccctgatggccttccagcagctgtcgggggtcaacgccgtcatgttctatgcagagaccatctttgaagaggccaagttcaaggacagcagcctggcctcggtcgtcgtgggtgtcatccaggtgctgttcacagctgtggcggctctcatcatggacagagcagggcggaggctgctcctggtcttgtcaggtgtggtcatggtgttcagcacgagtgccttcggcgcctacttcaagctgacccagggtggccctggcaactcctcgcacgtggccatctcggcgcctgtctctgcacagcctgttgatgccagcgtggggctggcctggctggccgtgggcagcatgtgcctcttcatcgccggaggtcctcaggccctatggagccttctggcttgcctccgctttctgcatcttcagtgtccttttcactttgttctgtgtccctgaaactaaaggaaagactctggaacaaatcacagcccattttgaggggcgatgacagccactcactaggggatggagcaagcctgtgactccaagctgggcccaagcccagagcccctgcctgccccaggggagccagaatccagccccttggagccttggtctgcagggtccctccttcctgtcatgctccctccagcccatgacccggggctaggaggctcactgcctcctgttccagctcctgctgctgctctgaggactcaggaacaccttcgagctttgcagacctgcggtcagccctccatgcgcaagactaaagcagcggaagaggaggtgggcctctaggatctttgtcttctggctggaggtgcttttggaggttgggtgctgggcattcagtcgctcctctcacgcggctgccttatcgggaaggaaatttgtttgccaaataaagactgacacagaaaatcaggtcagtgtctctgggctttgtgcaagctcagtttgaaaagggtttattcccatcactgcccaggacaccctgtggctttacttgctcatggtcagccaagcttacccttcacactgagaagtcatttctggctacttccttgggctcagttccctgggtcatcagccatcaaatcttgttgagtttaaaaaataaacagcaaaaaaaaacaaaacaaaacaaaaaaaaa

SEQ ID NO: 96252 - DNA, 1236 bp, Artificial Sequence
  derived and/or modified sequence
atgacccccgaggaccccgaggagacccagcccctgctgggcccccccggcggcagcgcccccagaggcagaagagtgttcctggccgccttcgccgccgccctgggccccctgagcttcggcttcgccctgggctacagcagccccgccatccccagcctgcagagagccgccccccccgcccccagactggacgacgccgccgccagctggttcggcgccgtggtgaccctgggcgccgccgccggcggcgtgctgggcggctggctggtggacagagccggcagaaagctgagcctgctgctgtgcagcgtgcccttcgtggccggcttcgccgtgatcaccgccgcccaggacgtgtggatgctgctgggcggcagactgctgaccggcctggcctgcggcgtggccagcctggtggcccccgtgtacatcagcgagatcgcctaccccgccgtgagaggcctgctgggcagctgcgtgcagctgatggtggtggtgggcatcctgctggcctacctggccggctgggtgctggagtggagatggctggccgtgctgggctgcgtgccccccagcctgatgctgctgctgatgtgcttcatgcccgagacccccagattcctgctgacccagcacagaagacaggaggccatggccgccctgagattcctgtggggcagcgagcagggctgggaggacccccccatcggcgccgagcagagcttccacctggccctgctgagacagcccggcatctacaagcccttcatcatcggcgtgagcctgatggccttccagcagctgagcggcgtgaacgccgtgatgttctacgccgagaccatcttcgaggaggccaagttcaaggacagcagcctggccagcgtggtggtgggcgtgatccaggtgctgttcaccgccgtggccgccctgatcatggacagagccggcagaagactgctgctggtgctgagcggcgtggtgatggtgttcagcaccagcgccttcggcgcctacttcaagctgacccagggcggccccggcaacagcagccacgtggccatcagcgcccccgtgagcgcccagcccgtggacgccagcgtgggcctggcctggctggccgtgggcagcatgtgcctgttcatcgccggcggcccccaggccctgtggagcctgctggcctgcctgagattcctgcacctgcagtgccccttccacttcgtgctgtgcccctag

SEQ ID NO: 96253 - DNA, 645 bp, Artificial Sequence
  derived and/or modified sequence
atggcttttcagcaactcagcggtgtgaatgccgtaatgttctacgcagaaactatctttgaggaagccaaatttaaggactcctccctcgccagcgtcgtcgtgggggtcattcaggtcttgttcacggcagtggctgcccttattatggaccgcgccggccggcgactgcttctggtcttgtcgggggtcgtcatggtgttctcaacgtccgcatttggcgcctacttcaaacttacacagggcggccccggcaacagcagtcatgtggccatcagcgcacctgtatccgctcagcctgtcgatgcctcggtcggacttgcctggctggcagtggggagcatgtgcctcttcatagccggcttcgcggttgggtggggccctatcccatggctcctcatgtcggagattttccctttacacgtcaagggtgtggccaccgggatctgcgttctaaccaactggcttatggctttcttggtaaccaaggagttcagctctcttatggaggtgctgagaccatacggcgctttctggctggcaagcgcattttgtattttctctgttctcttcacgttattttgcgttcctgagactaagggcaaaactctcgaacaaatcaccgcccatttcgaaggaagatag

SEQ ID NO: 96254 - DNA, 798 bp, Artificial Sequence
  derived and/or modified sequence
atggtcgtagtgggcattctgctggcttacctggcaggctgggttttggagtggaggtggctggccgtgctcggctgcgtgccccctagcctcatgcttctgctcatgtgctttatgccggagacgccacgctttcttctaacccaacatagaaggcaggaggctatggccgccctgagatttctgtgggggagcgagcagggttgggaggaccccccaattggcgctgaacagtcttttcacctggcgctattacggcagccaggcatctataagccgttcatcatcggtgtcagtctgatggcgtttcagcaactgtctggcgtcaacgctgtgatgttctatgccgaaactatcttcgaggaggcaaagtttaaagacagctctttggccagtgtcgtcgtaggagtcatccaggtgctgtttacagccgtcgccgctctgatcatggatcgtgcaggacgtcggcttctccttgtgctctccggcgtggtgatggtcttttccacgtcagcctttggcgcatacttcaagttaacacagggaggcccagggaattcaagtcacgtggccatctcagcccctgtcagtgcacagcccgttgatgcttcagtggggttggcttggctggcggtagggagcatgtgcttatttattgcgggatttgcagtgggatggggtcctatcccctggctgctgatgagtgaaattttcccattgcatgttaaaggcgtcgccaccggtatatgtgtcctgacaaattggctgatggcttttctcgtgacaaaggagttttag

SEQ ID NO: 96255 - DNA, 645 bp, Artificial Sequence
  derived and/or modified sequence
atggccttccagcagctgtctggagtgaatgctgtgatgttttatgcagagaccatctttgaggaggccaagttcaaggacagcagcctggcctctgtggtggtgggcgtcatccaggtgctcttcaccgctgtggccgccctgatcatggacagagctggaagaaggctgctgctggtgctgagcggcgtggtgatggtgttcagcaccagcgcctttggagcctacttcaagctgacccagggcggccctggcaacagcagccacgtggccatcagcgcccctgtgtctgcccagcctgtggatgcctctgtgggcctggcctggctggccgtgggctccatgtgcctcttcatcgccggctttgctgtgggctggggccccatcccctggctgctgatgtctgagatcttccccctgcacgtgaagggcgtggccaccggcatctgtgtgctgaccaactggctgatggccttcctggtgaccaaggagttcagcagcctgatggaggtgctgcggccctatggagccttctggctggccagcgccttctgcatcttctctgtgctcttcaccctcttctgtgtgcctgagaccaagggcaagaccctggagcagatcacagcccactttgagggccgctag

SEQ ID NO: 96256 - DNA, 798 bp, Artificial Sequence
  derived and/or modified sequence
atggtggtggtgggcatcctgctggcctacctggccggctgggtgctggagtggcgctggctggccgtgctgggctgtgtgccccccagcctgatgctgctgctgatgtgcttcatgcctgagaccccccgcttcctgctgacccagcaccggcggcaggaggccatggccgccctgcgcttcctgtggggcagcgagcagggctgggaggacccccccatcggggctgagcagagcttccacctggccctgctgcggcagcccggcatctacaagcccttcatcatcggcgtgtccctgatggccttccagcagctgtctggagtgaatgctgtgatgttttatgcagagaccatctttgaggaggccaagttcaaggacagcagcctggcctctgtggtggtgggcgtcatccaggtgctcttcaccgctgtggccgccctgatcatggacagagctggaagaaggctgctgctggtgctgagcggcgtggtgatggtgttcagcaccagcgcctttggagcctacttcaagctgacccagggcggccctggcaacagcagccacgtggccatcagcgcccctgtgtctgcccagcctgtggatgcctctgtgggcctggcctggctggccgtgggctccatgtgcctcttcatcgccggctttgctgtgggctggggccccatcccctggctgctgatgtctgagatcttccccctgcacgtgaagggcgtggccaccggcatctgtgtgctgaccaactggctgatggccttcctggtgaccaaggagttctag

SEQ ID NO: 96257 - DNA, 645 bp, Artificial Sequence
  derived and/or modified sequence
atggccttccagcagctgagcggcgtgaacgccgtgatgttctacgcagagactattttcgaggaagcaaaattcaaagactcatccctcgcgagtgtggtggttggggtcatccaggtcctgtttaccgcggtcgcagctctgattatggaccgcgctggcagaagactcttgttagttttgtccggcgtggtgatggtttttagcacaagcgcatttggcgcttatttcaagttaactcagggcggcccaggaaactcctcccacgtggcgatttccgcccctgtttccgcccagccagtcgacgcgtctgtgggcctggcgtggttggctgtgggcagtatgtgcttatttatagcgggatttgcggtcggatgggggccaatcccatggctgctcatgtctgagatcttccccctccacgtcaaaggggtggctactgggatctgcgtgttaacgaattggttaatggcttttctggtgacaaaggaattctcatcattaatggaggtgctccggccctatggcgcattttggctggctagcgcattttgcattttttctgtccttttcacactgttttgtgtgccagaaactaaggggaagacactggaacagatcaccgctcacttcgagggacggtag

SEQ ID NO: 96258 - DNA, 798 bp, Artificial Sequence
  derived and/or modified sequence
atggtggtggtgggcatcctgctggcctacctggccggctgggtgttagagtggcgctggctggcagtgctgggttgcgtccctccatcactgatgctgctactgatgtgtttcatgcccgagactcctcgttttctcctcacacagcataggcgccaagaggctatggccgcactcagatttctgtggggtagcgagcaggggtgggaggacccaccaattggcgcagagcaatccttccacctggcgctactgcggcagcctggaatctataagccattcatcattggagtgagcttgatggcctttcaacagctctccggagtcaatgccgtgatgttctacgccgagactatattcgaggaggccaagttcaaagattcaagtttggcttccgtagtcgtcggcgtcatccaggtactattcacagccgttgccgccttgattatggacagggccggtcgtcgactgttgctggtgttgtccggcgtggtgatggtcttttccacatctgcatttggcgcctatttcaagcttacacagggggggccgggaaattcaagtcacgtggctatttctgcccccgtgtcagcccagcccgtcgatgcttcggttgggctggcatggctggcagtcgggagtatgtgcctgttcatcgccggctttgctgtagggtggggcccgattccatggctgttgatgtctgagatcttccctctgcatgtgaaaggagtcgctactggtatatgtgtattaaccaattggttaatggcgtttctggtcaccaaggaattctag

SEQ ID NO: 96259 - DNA, 645 bp, Artificial Sequence
  derived and/or modified sequence
atggccttccagcagttatccggcgtgaatgccgtcatgttttacgctgaaaccattttcgaggaggctaagttcaaggattcatcattggcctcggttgttgtcggcgtcatccaggtgctgttcaccgccgttgccgcactgatcatggacagagccggtcgacgactgctgctggttctaagcggggtcgtgatggtgttcagtacctctgcgtttggggcatactttaaactcacccaaggaggtccgggaaattccagccacgtagccatttccgccccagtgtccgctcagccggttgacgctagcgttggtcttgcctggttggccgtcggatccatgtgtctgttcattgccggatttgcagtcggttgggggccaattccatggctcctgatgtccgagatttttcccctccacgtgaagggggtggctacggggatctgtgtgttgaccaactggttgatggcctttttagtgaccaaagagttcagctcccttatggaagtgcttcggccatacggtgccttttggctggccagtgccttttgcattttctccgtcctgtttaccctcttctgcgtgccagagacaaagggaaagacactggaacagattaccgcccacttcgaagggcgatag

SEQ ID NO: 96260 - DNA, 798 bp, Artificial Sequence
  derived and/or modified sequence
atggtcgtcgtcggcatcctgttggcatacttggccggttgggtgctggagtggagatggctggccgtcctcggatgtgtgccccctagcttaatgctgctcttgatgtgctttatgcctgaaacaccaaggtttctgttaacccaacacaggaggcaggaagctatggccgcactgcgctttctgtggggatcagagcagggatgggaggaccccccaatcggagccgagcaatcttttcatctggccctccttcgtcagccagggatttataagccattcatcattggagtcagcctcatggctttccaacaactgtccggagtgaacgcagtgatgttctacgcagagacaatcttcgaggaggctaagttcaaggactccagcttagcctcagtggtggtgggcgtgatccaggtcttgttcactgccgtggcagccctgattatggaccgcgcaggaaggaggctcttgctggtgctgagtggagtggtgatggtctttagtacgtccgcctttggcgcatactttaaactgactcaggggggtccgggaaattcctctcatgtggctatcagtgccccagtcagcgcacagccagtcgatgccagtgtgggattggcttggctcgcagtaggcagtatgtgcctatttatcgctggcttcgccgttggctggggaccgatcccctggctgcttatgagtgaaatttttcccctgcacgtcaagggggtggccactggaatctgtgtcctgacaaattggctcatggctttcctcgtcacgaaggagttctag

SEQ ID NO: 96261 - DNA, 914 bp, Artificial Sequence
  derived and/or modified sequence
ccgacatgacgcccgaggacccagaggaaacccagccgcttctggggcctcctggcggcaggtctacatctccgaaatcgcctacccagcagtccgggggttgctcggctcctgtgtgcagctaatggtcgtcgtcggcatcctcctggcctacctggcagagctttcacctggccctgctgcggcagcccggcatctacaagcccttcatcatcggcgtctccctgatggccttccagcagctgtcgggggtcaacgccgtcatgttctatgcagagaccatctttgaagaggccaagttcaaggacagcagcctggcctcggtcgtcgtgggtgtcatccaggtgctgttcacagctgtggcggctctcatcatggacagagcagggcggaggctgctcctggtcttgtcaggtgtggtcatggtgttcagcacgagtgccttcggcgcctacttcaagctgacccagggtggccctggcaactcctcgcacgtggccatctcggcgcctgtctctgcacagcctgttgatgccagcgtggggctggcctggctggccgtgggcagcatgtgcctcttcatcgccggctttgcggtgggctgggggcccatcccctggctcctcatgtcagagatcttccctctgcatgtcaagggcgtggcgacaggcatctgcgtcctcaccaactggctcatggcctttctcgtgaccaaggagttcagcagcctcatggaggtcctcaggccctatggagccttctggcttgcctccgctttctgcatcttcagtgtccttttcactttgttctgtgtccctgaaactaaaggaaagactctggaacaaatcacagcccattttgaggggcgatgacagccactcactaggggatggagcaagcctgtgactccaagc

SEQ ID NO: 96262 - DNA, 645 bp, Artificial Sequence
  derived and/or modified sequence
atggccttccagcagctgagcggcgtgaacgccgtgatgttctacgccgagaccatcttcgaggaggccaagttcaaggacagcagcctggccagcgtggtggtgggcgtgatccaggtgctgttcaccgccgtggccgccctgatcatggacagagccggcagaagactgctgctggtgctgagcggcgtggtgatggtgttcagcaccagcgccttcggcgcctacttcaagctgacccagggcggccccggcaacagcagccacgtggccatcagcgcccccgtgagcgcccagcccgtggacgccagcgtgggcctggcctggctggccgtgggcagcatgtgcctgttcatcgccggcttcgccgtgggctggggccccatcccctggctgctgatgagcgagatcttccccctgcacgtgaagggcgtggccaccggcatctgcgtgctgaccaactggctgatggccttcctggtgaccaaggagttcagcagcctgatggaggtgctgagaccctacggcgccttctggctggccagcgccttctgcatcttcagcgtgctgttcaccctgttctgcgtgcccgagaccaagggcaagaccctggagcagatcaccgcccacttcgagggcagatag

SEQ ID NO: 96263 - DNA, 798 bp, Artificial Sequence
  derived and/or modified sequence
atggtggtggtgggcatcctgctggcctacctggccggctgggtgctggagtggagatggctggccgtgctgggctgcgtgccccccagcctgatgctgctgctgatgtgcttcatgcccgagacccccagattcctgctgacccagcacagaagacaggaggccatggccgccctgagattcctgtggggcagcgagcagggctgggaggacccccccatcggcgccgagcagagcttccacctggccctgctgagacagcccggcatctacaagcccttcatcatcggcgtgagcctgatggccttccagcagctgagcggcgtgaacgccgtgatgttctacgccgagaccatcttcgaggaggccaagttcaaggacagcagcctggccagcgtggtggtgggcgtgatccaggtgctgttcaccgccgtggccgccctgatcatggacagagccggcagaagactgctgctggtgctgagcggcgtggtgatggtgttcagcaccagcgccttcggcgcctacttcaagctgacccagggcggccccggcaacagcagccacgtggccatcagcgcccccgtgagcgcccagcccgtggacgccagcgtgggcctggcctggctggccgtgggcagcatgtgcctgttcatcgccggcttcgccgtgggctggggccccatcccctggctgctgatgagcgagatcttccccctgcacgtgaagggcgtggccaccggcatctgcgtgctgaccaactggctgatggccttcctggtgaccaaggagttctag

SEQ ID NO: 96264 - protein, 134 aa, Artificial Sequence
  derived and/or modified sequence
MALSVLRLALLLLAVTFAGSARSGPGERGPPEKSGFGSQTGGGPCPAPGGLGDGTRAPVTGGSPEDLPASLIPQFGLFSKYRTPNCSQYRLPGCPRHFNPVCGSDMSTYANECTLCMKIREGGHNIKIIRNGPC

SEQ ID NO: 96265 - DNA, 405 bp, Artificial Sequence
  derived and/or modified sequence
atggctctcagtgtgttacggctcgcactgctattgcttgccgtgacattcgccggctccgcgagatctgggcccggcgagagggggccccctgagaagtctggctttggctcccagactggaggaggcccctgcccggcaccaggcggtcttggcgacggcactcgagctccagtgacaggcggttctcccgaggatctcccggctagtctcataccccaattcggactgttctctaaatatcggacgcccaactgctctcagtaccgcctgccaggctgtcccagacatttcaatccagtgtgtggaagtgacatgagtacatacgcaaacgaatgtaccttgtgcatgaaaatccgggaggggggccacaacataaagatcatacggaatggcccatgttag

SEQ ID NO: 96266 - DNA, 405 bp, Artificial Sequence
  derived and/or modified sequence
atggccctgtctgtgctgcggctggccctgctgctgctggccgtgacctttgctggcagcgcccggagcggccctggagagcggggccccccagagaagagcggcttcggcagccagacaggaggcggcccctgcccagcccctgggggcctgggagatggcacccgggcccctgtgactggaggcagccctgaggacctgcctgccagcctcatcccccagtttggcctcttcagcaagtaccgcacccccaactgcagccagtaccgcctgcccggctgccccaggcacttcaaccctgtgtgtggcagtgacatgagcacctacgccaatgaatgtaccctgtgcatgaagatccgggagggcggccacaacatcaagatcatcagaaatggcccctgctag

SEQ ID NO: 96267 - DNA, 405 bp, Artificial Sequence
  derived and/or modified sequence
atggccctgagcgtgctgcggctggccctgctgctgctggccgtgacttttgctggctcggcacgctctggccctggtgagcgcgggcccccagagaaatccggttttggcagtcagacgggcggtgggccctgccctgcgcctggaggcctgggagacggaacacgagctcctgtgacaggagggagccccgaagatttgccagcttcactgatcccccagtttggtctgttctccaaatacagaacacccaattgttcacaataccgcctgcccgggtgcccaagacatttcaatccagtgtgtggttctgacatgagcacctacgccaatgagtgcaccttatgcatgaaaattagagagggaggtcataacatcaagatcattagaaatggtccctgttag

SEQ ID NO: 96268 - DNA, 405 bp, Artificial Sequence
  derived and/or modified sequence
atggccttaagcgtcctaagactggctctgctgctgctagccgtgaccttcgcaggctccgccaggagcggtccaggcgaaagaggcccaccagagaaatccggatttggctcccagacgggaggcggtccctgccccgctcccggtggtcttggcgacgggacacgcgctcccgtcacaggtggcagccccgaggatcttcctgcaagtcttataccccagtttggactgttttcaaagtataggacgcctaattgtagccaatatagactgcctggttgccctcggcacttcaatcctgtgtgcggatccgacatgagcacctacgctaatgagtgcactttgtgtatgaaaattcgtgagggagggcataatataaagatcatacgaaacgggccatgctag

SEQ ID NO: 96269 - DNA, 763 bp, Artificial Sequence
  derived and/or modified sequence
cgcgccccgtcgcacgagcgctccctgcgagtggcgcaggtaacagaccgcaggggcaagacagccggcgcgggaggaggatggcgctgtcggtgctgcgcttggcgctgctgctcctggcagttaccttcgcaggtagcgctcggagcggtcctggcgagcggggacctccggagaaaagcgggtttgggagtcagaccggcggcggaccctgccctgctccgggcggcctcggcgacggtacccgcgcgcccgttactggcggttccccagaggacctgccagcctctctgatccctcaatttggtctgttttcaaaatatagaacgccaaactgctctcagtatagattaccaggatgtcccagacactttaaccctgtgtgtggcagtgacatgtccacttatgccaatgaatgtactctgtgcatgaaaatcagggaaggtggtcataatattaaaatcattcgaaatggaccctgctgatggagcagtttacagaaaagaagatggagagaccaccttcactggcagactagataaattgcatttcccctttttctcttttcctgtgtttctttacatgagatttgttaacacacattttctgagagcaggtatggaagacagccatgtgtagtgatggataatttaaagaaaaaaagaatccttgtttcttggcttttgctcctggagttaagcttactgcccaggtgacttgtgcattgctttatttagttgaaataaaatcagcattgaattca

SEQ ID NO: 96270 - DNA, 405 bp, Artificial Sequence
  derived and/or modified sequence
atggccctgagcgtgctgagactggccctgctgctgctggccgtgaccttcgccggcagcgccagaagcggccccggcgagagaggcccccccgagaagagcggcttcggcagccagaccggcggcggcccctgccccgcccccggcggcctgggcgacggcaccagagcccccgtgaccggcggcagccccgaggacctgcccgccagcctgatcccccagttcggcctgttcagcaagtacagaacccccaactgcagccagtacagactgcccggctgccccagacacttcaaccccgtgtgcggcagcgacatgagcacctacgccaacgagtgcaccctgtgcatgaagatcagagagggcggccacaacatcaagatcatcagaaacggcccctgctag

SEQ ID NO: 96271 - protein, 119 aa, Artificial Sequence
  derived and/or modified sequence
MALSVLRLALLLLAVTFAGSARSGPGERGPPEKSGFGSQTGGGPCPAPGGLGDASLIPQFGLFSKYRTPNCSQYRLPGCPRHFNPVCGSDMSTYANECTLCMKIREGGHNIKIIRNGPC

SEQ ID NO: 96272 - DNA, 360 bp, Artificial Sequence
  derived and/or modified sequence
atggctttgagtgtgcttagacttgccctgctactcctggcggtcacttttgccggctccgcacggagcggccctggggaacggggccccccagaaaaatctggcttcggctcccaaacaggtggaggcccttgcccagctccaggcggcttgggtgacgcttctttgattccccaatttggtcttttttccaagtatagaacccctaactgttcacagtatcgtttgccaggttgccccagacacttcaatccagtgtgcggttcggacatgtcaacctatgctaacgaatgcacgctgtgcatgaagatccgcgagggcggacataacatcaagattattagaaatggaccctgctag

SEQ ID NO: 96273 - DNA, 360 bp, Artificial Sequence
  derived and/or modified sequence
atggccctgtctgtgctgcggctggccctgctgctgctggccgtgacctttgctggcagcgcccggagcggccctggagagcggggccccccagagaagagcggcttcggcagccagacaggaggcggcccctgcccagcccctgggggcctgggagatgccagcctcatcccccagtttggcctcttcagcaagtaccgcacccccaactgcagccagtaccgcctgcccggctgccccaggcacttcaaccctgtgtgtggcagtgacatgagcacctacgccaatgaatgtaccctgtgcatgaagatccgggagggcggccacaacatcaagatcatcagaaatggcccctgctag

SEQ ID NO: 96274 - DNA, 360 bp, Artificial Sequence
  derived and/or modified sequence
atggccctgagcgtgctgcggctggccctgctgctgctggccgtgaccttcgccggatccgcccggagcggtccaggggaacggggaccacctgagaaatcaggcttcggcagccaaactggtggggggccctgcccggccccaggcggcttgggtgacgccagcttaattccccagttcggcctgttttccaaatacaggactcctaattgcagccagtatcgattgcctggctgtccaaggcacttcaacccggtatgcgggtctgacatgagtacgtacgcaaatgaatgtacactctgcatgaagatccgggagggcggccacaatataaaaattatccgcaatggtccgtgctag

SEQ ID NO: 96275 - DNA, 360 bp, Artificial Sequence
  derived and/or modified sequence
atggccctgtctgtcttacggctggctctgctcctcctcgccgtgaccttcgcaggctcagccaggtctggcccaggggagcggggaccacctgagaaatctggcttcggttcccagaccggtgggggaccatgccccgcaccgggaggtctcggggatgcttcgctgatacctcagttcggactcttttctaaataccgtacccccaactgttctcagtatcggctgcccggttgtccacgccactttaatcctgtgtgcgggtctgatatgtctacctacgctaatgagtgcacgctctgtatgaaaattagagaaggagggcacaacattaagataattcggaacggcccttgctag

SEQ ID NO: 96276 - DNA, 659 bp, Artificial Sequence
  derived and/or modified sequence
cgcaggggcaagacagccggcgcgggaggaggatggcgctgtcggtgctgcgcttggcgctgctgctcctggcagttaccttcgcaggtagcgctcggagcggtcctggcgagcggggacctccggagaaaagcgggtttgggagtcagaccggcggcggaccctgccctgctccgggcggcctcggcgacgcctctctgatccctcaatttggtctgttttcaaaatatagaacgccaaactgctctcagtatagattaccaggatgtcccagacactttaaccctgtgtgtggcagtgacatgtccacttatgccaatgaatgtactctgtgcatgaaaatcagggaaggtggtcataatattaaaatcattcgaaatggaccctgctgatggagcagtttacagaaaagaagatggagagaccaccttcactggcagactagataaattgcatttcccctttttctcttttcctgtgtttctttacatgagatttgttaacacacattttctgagagcaggtatggaagacagccatgtgtagtgatggataatttaaagaaaaaaagaatccttgtttcttggcttttgctcctggagttaagcttactgcccaggtgacttgtgcattgctttatttagttgaaataaaatcag

SEQ ID NO: 96277 - DNA, 360 bp, Artificial Sequence
  derived and/or modified sequence
atggccctgagcgtgctgagactggccctgctgctgctggccgtgaccttcgccggcagcgccagaagcggccccggcgagagaggcccccccgagaagagcggcttcggcagccagaccggcggcggcccctgccccgcccccggcggcctgggcgacgccagcctgatcccccagttcggcctgttcagcaagtacagaacccccaactgcagccagtacagactgcccggctgccccagacacttcaaccccgtgtgcggcagcgacatgagcacctacgccaacgagtgcaccctgtgcatgaagatcagagagggcggccacaacatcaagatcatcagaaacggcccctgctag

SEQ ID NO: 96278 - protein, 943 aa, Artificial Sequence
  derived and/or modified sequence
MGPRKKSVKTCIMNNEIPEEMTADETKDYMNQLSHEVLCHIFRYLPLQDIMCMECLSRKLKEAVTLYLRVVRVVDLCAGRWWEYMPSGFTDASFLTLLKKMPDVEQLYGLHPRYLERRRVRGHEAFSIPGVLEALQACPNLVGVETSHLELVESIWTYMPHVHILGKFRNRNGAFPIPPENKLKIPIGAKIQTLHLVGVNVPEIPCIPMLRHLYMKWVRLTKPQPFKDFLCISLRTFVMRNCAGPTNSLKYVPLVTGLASARNLEHLEMVRVPFLGGLIQHVVEDSWRSGGFRNLHTIVLGACKNALEVDLGYLIITAARRLHEVRIQPSLTKDGVFSALKMAELEFPQFETLHLGYVDEFLLQSRMANADLVKYGLADVVENPGIITDIGMKAVNEVFSCIKYLAIYNCPHLHNPYNWISDHSRWTRLVDINLVRCHALKLDSFGQFIELLPSLEFISLDQMFREPPKGCARVGLSAGTGIGVSSALVSNQNSNNDDNNAQNNNANIHDNNHHHPDDSDEENDFRQDLQPGEQQFAADALNEMEDIVQEDGEVVAESGNNTPAHSQAIIPVDVDEEQAGPSGLQRVVKPTSITVHDSESDDEEDSLELQEVWIPKNGTRRYSEREEKTGESVQSRELSEVAKTKPRHAMKRKRTADKSTSTSDPVIEDDHVQVLVLKSKNLVGVTMTNCGITDLVLKDCPKMMFIHATRCRVLKHLKVENAPIVNRFDYAQCKKLNMDQVLDQILRMPPERNRIIYLRPMQQVDTLTLEQKLFSGPYPYHICIIHEFSNPPNVRNKVRIRSWMDTIANINQELIKYEFFPEATRSEEDLKKYPKYPWGREIYTLEGVVDGAPYSMISDFPWLRSLRAAEPNSFARYDFEDDEESTIYAPRRKGQLSADICMETIGEEISEMRQMKKGVFQRVVAIFIHYCDVNGEPVEDDYI

SEQ ID NO: 96279 - DNA, 3632 bp, Artificial Sequence
  derived and/or modified sequence
aagtgtctgtagcgtccctccctctcaaccacaataacaggcggagggtcggcgtaggtactttgaactcaagtaaacaaaagggaagattttctcgttgatactggagactgcacaacaatggggccacgaaagaaaagtgtgaaaacatgtatcatgaataatgaaattccagaagaaatgacagcagatgaaacaaaggactatatgaatcaactttcacatgaagtactttgccatatttttaggtacctccctctgcaggatatcatgtgtatggaatgtctttcccggaagctaaaggaagcagtgaccctatatctgcgagttgtgagagttgtagatctctgtgcagggcggtggtgggaatacatgccaagtggctttacagatgccagttttctaacactattaaagaagatgccagatgttgaacagctatatggccttcaccctcgataccttgagaggcgaagagtaaggggccatgaggcttttagcattccaggagtcctagaagctttgcaggcatgcccaaacttagtgggtgtggaaacttctcatttggagttggtagaatccatttggacatatatgccccatgttcatattttggggaaatttcgtaatcgtaatggagcttttccaattcctcctgaaaataaactgaaaattcctataggagccaaaattcaaactttacatttagttggggtgaatgttcctgaaattccttgtatcccaatgctaaggcacctttatatgaagtgggtaagactcactaaaccacagccatttaaagacttcctttgtatcagcttaagaactttcgtcatgaggaactgtgcaggacccacaaattccttgaaatatgtccctttagtaacaggcttagcctctgcccgaaacttggaacacttagaaatggttcgagttcctttccttggaggtcttatccaacatgttgttgaagacagttggagatcaggtggttttagaaatttgcacactattgttctgggagcttgcaaaaatgctcttgaagtagatcttggttacctcatcattactgctgcccgtaggttacatgaagttcggatccagccttccctaaccaaagatggtgtcttttctgccctaaagatggcagagttggagtttccccagtttgaaacccttcatctaggatatgtagatgagtttttgctacagagcagaatggctaatgcggatctggtgaagtatggtttggctgatgtggtagaaaatcctggtatcatcactgatatagggatgaaagcagtcaatgaagttttttcctgtatcaaatatctggcaatttacaattgccctcatctacacaacccatacaattggatctcagaccactcaagatggactcgattggttgatatcaacctagtacggtgccatgctttgaagctggactcttttggccagtttattgaattattacccagcctagagtttatttcactggatcagatgtttcgtgaaccacccaagggttgtgctcgagttggtctgagtgcaggcacaggaattggtgtttcatcagctcttgttagcaaccagaactccaacaatgacgataataatgcccagaataacaatgccaacatccacgacaacaatcaccatcatccagatgactcagacgaggagaatgactttcggcaagatctgcagccaggagagcagcagtttgcagctgacgcattaaatgagatggaagacatcgtccaagaagatggagaggtggtggccgagagtggaaataatactccagctcacagccaggcaattattcctgtggatgttgatgaggaacaagcaggacccagtggtcttcagcgtgtagtaaaaccaacctcaattactgttcatgattcagagagtgatgatgaagaagatagtctagaactccaagaagtctggattcctaagaacggtactcggcgttactctgaacgtgaagaaaaaactggagagtcagtgcagtccagagaattgtcagaagtagccaaaacaaagccacgtcacgccatgaaacggaagcggacagcagataaatccactagtacaagtgatcctgtgatcgaggatgaccatgtgcaggttcttgtattaaaatccaagaatcttgttggagtcactatgaccaattgtggaatcacagatctagtgctaaaagactgtccaaagatgatgttcatccatgctaccaggtgcagggtactaaaacatttaaaggtagaaaatgcaccaattgtaaaccgatttgactatgcacagtgcaagaaactgaacatggatcaggtactagaccagatactaagaatgccacccgagagaaaccgcatcatatacctacgcccaatgcagcaggtggacactctaactttggagcagaagctatttagtggtccctacccctatcacatctgtattatccatgaattcagtaaccctcccaatgtccggaataaggtgcgcattcgcagctggatggacactatagcaaacatcaatcaagagctcattaaatatgaattcttccctgaagccactcgaagtgaagaagacttaaagaaataccccaagtacccctgggggagagaaatctatactttagaaggtgttgtggatggagctccatattccatgatttctgacttcccttggctgaggtcattacgagctgcagagcccaacagcttcgctcgatacgactttgaagacgatgaagaaagcactatctatgctcctagaaggaaaggacagctgtctgcagacatctgtatggaaacaataggagaggaaatttcagagatgcgtcagatgaagaagggtgtatttcagcgagtagtggcaatttttatccactattgtgatgtcaatggagagccagttgaagatgactacatttaattggtccctcctcctttccagctattttgtcagaaagcaagtagggccatccagctgccagagtgctccacagggacttgaggcatgcagttgggaggtcctggctcggtttgctatatagggaatatataaggaacatcgaaattgtatacaaagatttgtacataaaaaatatacaaagacgcttcctaaagtaccaactttatatcatatgtttatacaatttaatttaaaaattcattttaaggaagacagataatttgaaagacttttgtttttcttgacttaattcatgaagtatcattttttgactgagtctccatttacttcattcttaatgattattgtcatccctttaaatctgtgcctttttcttcttgagcgaagctgtttgagtaaacctgttgaagagtgtttgtgtcttttgtgcttttttgttgttattaaaacaccaactaaaccttatagtcaagacaaggctctatgtttctgtacaaagctgtagttctttcttagtattatagttgccatgtttcttaaaatcaagtaaaaagacttatgagcttaaaaaaaagtgagtttgagagggaaatggaaaagtttccagagtatttctagtaatttatttccacattgaattgtgtatatgctttatcttgaatataaaataaaagtttatt

SEQ ID NO: 96280 - DNA, 3585 bp, Artificial Sequence
  derived and/or modified sequence
aggtactttgaactcaagtaaacaaaagggaagattttctcgttgatactggagactgcacaacaatggggccacgaaagaaaagtgtgaaaacatgtatcatgaataatgaaattccagaagaaatgacagcagatgaaacaaaggactatatgaatcaactttcacatgaagtactttgccatatttttaggtacctccctctgcaggatatcatgtgtatggaatgtctttcccggaagctaaaggaagcagtgaccctatatctgcgagttgtgagagttgtagatctctgtgcagggcggtggtgggaatacatgccaagtggctttacagatgccagttttctaacactattaaagaagatgccagatgttgaacagctatatggccttcaccctcgataccttgagaggcgaagagtaaggggccatgaggcttttagcattccaggagtcctagaagctttgcaggcatgcccaaacttagtgggtgtggaaacttctcatttggagttggtagaatccatttggacatatatgccccatgttcatattttggggaaatttcgtaatcgtaatggagcttttccaattcctcctgaaaataaactgaaaattcctataggagccaaaattcaaactttacatttagttggggtgaatgttcctgaaattccttgtatcccaatgctaaggcacctttatatgaagtgggtaagactcactaaaccacagccatttaaagacttcctttgtatcagcttaagaactttcgtcatgaggaactgtgcaggacccacaaattccttgaaatatgtccctttagtaacaggcttagcctctgcccgaaacttggaacacttagaaatggttcgagttcctttccttggaggtcttatccaacatgttgttgaagacagttggagatcaggtggttttagaaatttgcacactattgttctgggagcttgcaaaaatgctcttgaagtagatcttggttacctcatcattactgctgcccgtaggttacatgaagttcggatccagccttccctaaccaaagatggtgtcttttctgccctaaagatggcagagttggagtttccccagtttgaaacccttcatctaggatatgtagatgagtttttgctacagagcagaatggctaatgcggatctggtgaagtatggtttggctgatgtggtagaaaatcctggtatcatcactgatatagggatgaaagcagtcaatgaagttttttcctgtatcaaatatctggcaatttacaattgccctcatctacacaacccatacaattggatctcagaccactcaagatggactcgattggttgatatcaacctagtacggtgccatgctttgaagctggactcttttggccagtttattgaattattacccagcctagagtttatttcactggatcagatgtttcgtgaaccacccaagggttgtgctcgagttggtctgagtgcaggcacaggaattggtgtttcatcagctcttgttagcaaccagaactccaacaatgacgataataatgcccagaataacaatgccaacatccacgacaacaatcaccatcatccagatgactcagacgaggagaatgactttcggcaagatctgcagccaggagagcagcagtttgcagctgacgcattaaatgagatggaagacatcgtccaagaagatggagaggtggtggccgagagtggaaataatactccagctcacagccaggcaattattcctgtggatgttgatgaggaacaagcaggacccagtggtcttcagcgtgtagtaaaaccaacctcaattactgttcatgattcagagagtgatgatgaagaagatagtctagaactccaagaagtctggattcctaagaacggtactcggcgttactctgaacgtgaagaaaaaactggagagtcagtgcagtccagagaattgtcagaagtagccaaaacaaagccacgtcacgccatgaaacggaagcggacagcagataaatccactagtacaagtgatcctgtgatcgaggatgaccatgtgcaggttcttgtattaaaatccaagaatcttgttggagtcactatgaccaattgtggaatcacagatctagtgctaaaagactgtccaaagatgatgttcatccatgctaccaggtgcagggtactaaaacatttaaaggtagaaaatgcaccaattgtaaaccgatttgactatgcacagtgcaagaaactgaacatggatcaggtactagaccagatactaagaatgccacccgagagaaaccgcatcatatacctacgcccaatgcagcaggtggacactctaactttggagcagaagctatttagtggtccctacccctatcacatctgtattatccatgaattcagtaaccctcccaatgtccggaataaggtgcgcattcgcagctggatggacactatagcaaacatcaatcaagagctcattaaatatgaattcttccctgaagccactcgaagtgaagaagacttaaagaaataccccaagtacccctgggggagagaaatctatactttagaaggtgttgtggatggagctccatattccatgatttctgacttcccttggctgaggtcattacgagctgcagagcccaacagcttcgctcgatacgactttgaagacgatgaagaaagcactatctatgctcctagaaggaaaggacagctgtctgcagacatctgtatggaaacaataggagaggaaatttcagagatgcgtcagatgaagaagggtgtatttcagcgagtagtggcaatttttatccactattgtgatgtcaatggagagccagttgaagatgactacatttaattggtccctcctcctttccagctattttgtcagaaagcaagtagggccatccagctgccagagtgctccacagggacttgaggcatgcagttgggaggtcctggctcggtttgctatatagggaatatataaggaacatcgaaattgtatacaaagatttgtacataaaaaatatacaaagacgcttcctaaagtaccaactttatatcatatgtttatacaatttaatttaaaaattcattttaaggaagacagataatttgaaagacttttgtttttcttgacttaattcatgaagtatcattttttgactgagtctccatttacttcattcttaatgattattgtcatccctttaaatctgtgcctttttcttcttgagcgaagctgtttgagtaaacctgttgaagagtgtttgtgtcttttgtgcttttttgttgttattaaaacaccaactaaaccttatagtcaagacaaggctctatgtttctgtacaaagctgtagttctttcttagtattatagttgccatgtttcttaaaatcaagtaaaaagacttatgagcttaaaaaaaagtgagtttgagagggaaatggaaaagtttccagagtatttctagtaatttatttccacattgaattgtgtatatgctttatcttgaatataaaataaaagtttattaaaaactt

SEQ ID NO: 96281 - DNA, 2832 bp, Artificial Sequence
  derived and/or modified sequence
atgggaccccgaaagaaatcagtgaagacctgcatcatgaataacgagatcccagaggaaatgactgcggatgaaactaaggactacatgaatcagctaagtcatgaggtgctgtgccacatttttcggtatcttcctttgcaagacatcatgtgcatggagtgtctctcacggaagctgaaggaggccgtgactctgtatctgcgggtcgtcagggtcgtggatctgtgcgctggccggtggtgggaatacatgccgagcggatttactgatgcgtctttcctcactcttttgaaaaagatgccagacgtagagcagttgtatgggctccacccccggtacctggagcgcagacgggtccgcggccatgaggccttctcaatcccgggtgtcctggaggcactccaggcttgccctaacctggtgggagtggagacatcacacctggagctggtggagtctatttggacttacatgccccacgtgcacatcctcggcaagttccgaaataggaatggcgcgtttccgattccaccagagaacaagctcaaaattccaattggagcgaagattcagaccctgcacctagtcggggtgaacgtgccagagatcccctgtatacccatgctccgacatctctacatgaaatgggtaaggctcacaaagcctcagccttttaaagacttcctctgtatctccctgcggactttcgtgatgagaaattgcgcgggcccgacaaatagcctgaaatacgtccctttggtaaccggactggccagcgctcgcaatctggagcacttggagatggtgcgggtcccctttctgggaggtctcatacagcacgttgttgaagatagctggcgatcgggcgggttccggaatctgcacacaatagtcctgggggcctgcaaaaacgcgttggaggtggatctgggatatctgattattaccgctgcgcgacgtttgcacgaggtgcgcatccaaccttctctgaccaaagacggggtcttcagtgccctaaagatggcagaattggaatttccgcagttcgaaactctgcatctggggtacgtcgacgaattcctactgcagtctagaatggccaacgccgacttggtgaagtatgggttggctgatgtggtagaaaatcccgggatcatcactgacatcggcatgaaagccgtcaatgaggtctttagctgtattaagtatctggcaatctataattgtcctcacctacacaacccttataattggatctccgaccattccaggtggacacgcctggtcgatatcaatttggtccgctgccatgccctgaagttggacagcttcggccagttcatcgagctgcttccctcacttgagtttataagcttagaccagatgttcagggaaccgccgaagggatgcgcacgcgtgggtctgtccgcaggcactggaatcggtgtgagcagtgccttagtttcgaaccagaactctaataacgacgataataatgcccagaataacaatgccaatattcatgacaataatcaccatcatccggacgacagcgatgaagaaaacgactttaggcaggatttacaacctggtgagcagcagttcgctgccgacgccctaaacgaaatggaagacattgtccaggaagacggagaagtggttgctgaaagtggaaataataccccagctcacagccaggcgatcatccctgttgacgtggatgaggagcaggcaggtccatcaggactgcagcgggtagttaagccaactagtataacagtgcacgactccgaaagtgacgatgaagaggatagccttgagttgcaggaggtgtggattccgaagaatggtacccggcgatactctgaaagggaggagaaaaccggtgagagcgtccagagccgcgaactatcagaagtagcaaagacaaagccaagacacgctatgaagaggaagagaactgccgataagtctacctctaccagtgatccagtaatcgaggatgaccacgtgcaggttctggtgctgaagagcaaaaatctcgtgggagtgacaatgaccaactgcgggattactgacctcgtcctcaaggactgcccaaaaatgatgttcatccacgcaacccggtgtagagtgctcaaacacctgaaagtggaaaatgcccccatcgttaatcggtttgactatgctcagtgtaagaaactaaacatggatcaggtcttagaccagatcctgcggatgccaccggagagaaatcggatcatctatttaaggccaatgcaacaggtggatacactaacccttgagcagaaacttttttctggaccgtacccctatcacatctgcatcatacacgaattcagtaatccgccgaatgtccgaaataaggtgcgaatcaggtcgtggatggatacaatcgcaaacattaaccaggaactcattaagtacgaatttttcccagaagcaacccgaagcgaagaggacttgaagaaatacccaaagtacccctggggcagagagatttataccttggaaggtgtggttgacggtgccccatactctatgatatccgactttccatggctccgttcactcagagctgccgagccaaattcttttgccagatatgacttcgaggacgatgaggaaagtacaatatacgccccacggcgtaaggggcaactttctgccgacatatgcatggagacaataggcgaggagatctccgaaatgaggcaaatgaagaaaggagtgtttcagcgagtggtggccatcttcattcactattgcgacgtgaacggcgagcccgtggaggatgattacatatag

SEQ ID NO: 96282 - DNA, 2832 bp, Artificial Sequence
  derived and/or modified sequence
atggggccacgaaaaaaaagcgtaaaaacgtgcatcatgaacaatgagatcccggaggagatgaccgcagacgagacaaaagactacatgaatcagctctcacacgaagtgctgtgtcatatctttcggtatctccccctccaagacatcatgtgtatggaatgcctctctcgcaaactgaaagaagcggtgactctttacctgagagtggtgcgggtggtcgacctgtgcgcaggtagatggtgggaatacatgccctctggatttactgatgctagttttttgactctcttgaagaagatgccagatgtggagcagctatatgggctgcatccacggtaccttgaaagaagacgcgtaaggggccatgaggctttcagcattccaggcgtactggaggctctgcaagcttgtcctaatctggttggagttgagacatcgcacctcgaactggtagagtcaatttggacttacatgcctcacgttcatatcctcggcaaatttagaaatagaaatggggcttttcctatcccacctgaaaacaaattaaagatacctattggcgcaaagatccagactcttcacctcgtaggcgtgaatgtgcctgaaattccttgtatcccaatgctccggcacctatatatgaaatgggttaggctgacgaaaccccaaccctttaaggattttctgtgcattagcctacggacattcgtgatgaggaactgcgctgggcctaccaattctctcaagtatgtccctctggtgaccggcctggcaagcgctaggaaccttgagcacctggaaatggtaagggtcccattcctaggcggcctcattcagcatgtggtggaggacagctggagatccggcggatttcggaatttacataccattgttcttggggcatgtaaaaatgcccttgaggttgatcttggctatctgataatcacagcggcccggcgactgcacgaggtaagaattcaaccatcactgaccaaagacggagtattttctgcacttaagatggccgagttggagtttccgcagtttgaaaccctgcacctcggctatgtcgatgagtttttattacagtctagaatggccaatgccgacctggtgaaatatggtctcgccgatgttgtggagaatcctgggattattactgacataggtatgaaggccgttaacgaagtttttagctgtatcaagtatctagctatatataattgtccccacctgcacaatccttacaattggatcagtgaccacagcaggtggactcgactcgtcgacatcaacctcgttagatgccacgcccttaaattggatagcttcgggcaatttattgaacttctgcccagtctggagttcatctcgctggatcagatgtttcgcgaacccccaaagggttgtgcgcgtgttggcctcagcgctggaacaggcattggtgtctcatcagcgctggtgtccaaccaaaactccaacaatgacgacaacaacgcccagaataataacgccaacattcacgacaataaccatcatcatccagacgatagcgatgaggaaaatgatttcagacaggatctgcagcctggcgaacagcaatttgccgccgacgcccttaatgaaatggaggatatcgtgcaggaagacggtgaagtcgtcgccgagagcggcaacaacactcctgcccattcccaagccatcattcctgtggacgtggatgaggagcaggctggcccttctgggctccagcgagtggttaagccaacttcaatcaccgtgcatgactccgaatctgatgatgaagaagattcccttgagctccaagaggtgtggattcccaaaaatggcaccaggcgatacagtgaacgcgaggagaagaccggtgagagtgtgcaaagtcgcgaacttagcgaggtagccaagacgaagcctaggcacgctatgaagcgcaaacgaactgcagacaaatccacctcaacctccgatcctgtgatagaagacgatcacgtgcaagtgcttgtgttgaagagtaagaatctcgtgggtgtgactatgacgaattgtggcattaccgacctggtgctgaaagactgtccaaagatgatgtttattcatgcaacaagatgccgagttctaaagcacctgaaagtagagaatgcccccatagtgaacagattcgattacgcgcaatgtaaaaaattgaacatggaccaggtactggatcagatattgcgcatgccccctgaaaggaataggattatatatctgagacccatgcaacaagtcgacactttgacgctcgagcagaagctgttttcgggaccctatccctaccatatctgtatcatccacgagtttagtaatcccccaaacgtgagaaacaaagttcggatacgatcgtggatggataccattgccaacatcaaccaggaactaatcaagtacgaatttttcccagaggcgaccaggagtgaggaggacctgaagaaatacccaaaatatccatgggggcgagaaatctataccctggaaggcgtggtagacggcgccccatactcaatgatctctgattttccatggctcagatcccttcgggccgcggagcccaatagttttgccagatacgatttcgaggacgacgaggaatctaccatttacgccccaaggcgcaaaggacaactctcagcagatatctgcatggagaccattggcgaggagattagcgaaatgcggcaaatgaagaagggggtcttccagcgggtggttgccatcttcatacactactgcgacgttaatggtgaacctgtcgaggacgattatatatag

SEQ ID NO: 96283 - DNA, 2832 bp, Artificial Sequence
  derived and/or modified sequence
atgggccccaggaagaagtctgtgaagacctgcatcatgaacaatgagatccctgaggagatgacagcagatgagaccaaggactacatgaaccagctgagccatgaggtgctgtgccacatcttccgctacctgcccctgcaggacatcatgtgcatggagtgcctgagcaggaagctgaaggaggccgtgaccctgtacctgcgggtggtgcgggtggtggacctgtgtgccggccgctggtgggagtacatgcccagcggcttcacagatgccagcttcctgaccctgctgaagaagatgccagatgtggagcagctgtatggcctgcacccccgctacctggagcggcggcgggtgcggggccacgaggccttcagcatccctggggtgctggaggccctgcaggcctgccccaacctggtgggcgtggagaccagccacctggagctggtggagagcatctggacctacatgcctcatgtgcacatcctgggcaagttcaggaacagaaatggagccttccccatccccccagagaacaagctgaagatccccatcggggccaagatccagaccctgcacctggtgggcgtgaatgtgcctgagatcccctgcatccccatgctgcggcacctgtacatgaagtgggtgcggctgaccaagccccagcccttcaaggacttcctgtgcatcagcctgcggacctttgtgatgaggaactgtgccggccccaccaacagcctgaagtatgtgcccctggtgacaggcctggccagcgccaggaacctggagcacctggagatggtgcgggtgcccttcctgggcggcctcatccagcacgtggtggaggacagctggaggtctgggggcttcaggaacctgcacaccatcgtgctgggcgcctgcaagaatgccctggaggtggacctgggctacctgatcatcacagctgcccggcggctgcacgaggtgcgcatccagcccagcctgaccaaggatggagtcttcagcgccctgaagatggccgagctggagttcccccagtttgagaccctgcacctgggctacgtggatgagttcctgctgcagagcaggatggccaatgctgacctggtgaagtatggcctggctgatgtggtggagaaccctggcatcatcacagacatcggcatgaaggctgtgaatgaggtgttcagctgcatcaagtacctggccatctacaactgcccccacctgcacaacccctacaactggatcagtgaccacagccgctggacccggctggtggacatcaacctggtgcgctgccacgccctgaagctggacagctttggccagttcatcgagctgctgcccagcctggagttcatcagcctggaccagatgttccgggagccccccaagggctgtgcccgggtgggcctgtctgctggcaccggcatcggcgtgagcagcgccctggtgagcaaccagaacagcaacaatgatgacaacaatgcccagaacaacaatgccaacatccatgacaacaaccaccaccacccagatgacagtgatgaggagaatgacttccggcaggacctgcagcctggagagcagcagtttgctgctgatgccctgaatgagatggaggacatcgtgcaggaggatggagaggtggtggccgagagcggcaacaacaccccagcccacagccaggccatcatccctgtggatgtggatgaggagcaggccggccccagcggcctgcagagggtggtgaagcccaccagcatcaccgtgcatgacagcgagagtgatgatgaggaggacagcctggagctgcaggaggtgtggatccccaagaatggcacccggcgctacagcgagcgggaggagaagacaggagagagcgtgcagagccgggagctgtctgaggtggccaagaccaagcccaggcatgccatgaagaggaagaggacagctgacaagagcaccagcaccagtgaccctgtgattgaagatgaccacgtgcaggtgctggtgctgaagagcaagaacctggtgggcgtgaccatgaccaactgtggcatcacagacctggtgctgaaggactgccccaagatgatgttcatccacgccacccgctgccgggtgctgaagcacctgaaggtggagaatgcccccatcgtgaacagatttgattatgcccagtgcaagaagctgaacatggaccaggtgctggaccagatcctgaggatgcctcctgagaggaaccgcatcatctacctgcggcccatgcagcaggtggacaccctgaccctggagcagaagctgttcagcggcccctacccctaccacatctgcatcatccacgagttcagcaaccccccaaatgtgaggaacaaggtgcgcatccgctcctggatggacaccatcgccaacatcaaccaggagctgatcaagtatgagttcttccctgaggccaccaggtctgaggaggacctgaagaagtaccccaagtacccctggggccgggagatctacaccctggagggcgtggtggatggagccccctacagcatgatcagtgacttcccctggctgcggagcctgcgggctgctgagcccaacagctttgcccgctatgactttgaagatgatgaggagagcaccatctatgcccccaggaggaagggccagctgtctgctgacatctgcatggagaccatcggggaggagatcagcgagatgaggcagatgaagaagggcgtcttccagagggtggtggccatcttcatccactactgtgatgtgaatggagagcctgtggaggatgactacatctag

SEQ ID NO: 96284 - DNA, 2832 bp, Artificial Sequence
  derived and/or modified sequence
atgggcccccggaagaagagcgtgaagacctgcatcatgaacaacgaaattcccgaggaaatgactgcagacgaaacaaaagactacatgaaccaactgtcgcacgaggtgctgtgtcatatcttcagatacctgcccctacaggatatcatgtgtatggaatgtctgtcacgcaaactgaaagaggctgtgactctctatttgcgcgtagtgcgcgtggtggacctgtgtgccggacggtggtgggagtacatgccttcaggctttaccgatgccagctttctgactttgctcaaaaagatgcctgatgttgagcagttatatggtctgcacccgcgctacttggagcgtcggagagtgaggggacacgaggccttttctatccccggagtacttgaagcccttcaagcctgtcccaatctagtgggagtagagacgtcccacctcgagctggtggagtcgatctggacatacatgcctcacgtacatatacttggtaaatttaggaacaggaacggcgctttccccattccccctgagaacaaactcaagatcccgattggcgcaaagattcagacactccaccttgtgggcgtgaacgtccccgagattccatgcatacccatgctccgccatctgtacatgaaatgggttcgcctgactaagcctcagccatttaaagactttctgtgtatttcactgcgaacatttgtgatgcggaactgtgcaggccccacaaactcactcaagtacgtccctctcgtgactggcctggcctcggcacgtaaccttgagcatctggaaatggttcgtgtgccgtttttgggcggtctgatccaacacgttgtcgaggactcatggaggagtggaggcttcagaaacctccacaccatcgtactgggagcttgcaaaaatgccctggaagtggacttgggatatctcataatcaccgctgccagacggctccatgaggtgagaatacagccatctctgactaaggacggggtgttttcggctcttaagatggccgagttggagttcccacagtttgaaaccttacaccttggatatgtggatgaatttcttctgcagtcgcgaatggccaacgcagacctggtcaaatacgggcttgcagatgtcgttgagaacccagggatcatcaccgatattggcatgaaggcagtgaatgaagtgttttcatgcattaaatatcttgccatctacaattgtcctcaccttcataacccttataattggatttccgaccattcaaggtggactcggctggtggacataaatcttgtccgttgtcatgccctcaagcttgactcctttggccagtttatcgagctccttcccagcctggaatttatctctctggaccagatgttccgcgagccacccaagggctgtgctcgagtgggcctttccgccggaacagggataggggtgtcatctgcgctggtttctaaccaaaactcaaataacgacgacaataacgcacagaacaacaacgcaaacatccacgacaacaaccaccatcacccggatgatagcgacgaggagaacgatttccggcaggacctgcagcctggagagcagcagttcgctgcagacgctttaaacgaaatggaagacattgttcaagaggacggagaggtcgtggcagaatctgggaacaatacgcccgcccattcgcaagccattattcctgtggacgtggacgaggagcaggcaggaccatctggactgcagagggtagtaaaaccaaccagtatcactgtgcatgattcagaatctgatgacgaggaagattctcttgaactgcaagaggtatggattcccaagaatggcactcggcggtactcggagcgggaagaaaagactggcgaatctgttcaatctagggaactgagcgaagtggccaagacaaaacctcggcatgcaatgaagaggaagagaaccgcagataaatccacctctacctctgatcctgtgatcgaggatgatcacgtacaggtgcttgttctcaagagcaaaaacctggtaggagttaccatgacaaattgtggcatcaccgacctagtccttaaggactgccccaagatgatgttcatccatgctacaagatgcagggtcctcaaacatctgaaggtggaaaatgcacctatcgttaaccgcttcgactacgcccaatgtaagaaactcaatatggaccaagtgctggaccagatacttcgcatgccgcccgagcggaatcgaatcatctatctgagacccatgcagcaggtagatacactaacactggagcagaagctgttttcagggccctacccctaccacatctgcattatccacgagttcagtaatcctcctaatgttcggaacaaagtccggattcgtagttggatggataccatagccaacataaatcaggaattgataaaatacgaattcttccctgaagcgacgaggagcgaagaagacctgaagaagtaccctaagtacccctggggccgagaaatctatacgttggaaggtgtggtagacggtgccccatacagtatgatctcagatttcccatggttgaggtccctccgtgccgcggaacccaattccttcgccaggtacgactttgaggacgatgaggaatccacgatctacgccccccggaggaagggtcagctgagcgcagacatctgtatggaaaccatcggtgaagaaatcagcgagatgcggcaaatgaaaaagggggtctttcaacgagttgtagccatatttatacattactgcgacgtgaacggcgaacccgttgaggacgactatatatag

SEQ ID NO: 96285 - DNA, 2832 bp, Artificial Sequence
  derived and/or modified sequence
atgggcccccggaagaagagcgtgaagacctgcatcatgaacaacgaaattcccgaagagatgactgcagatgagacaaaggactacatgaaccagttgagccacgaggtcctctgccacatttttagatacttgccgttgcaagatattatgtgcatggagtgtctgtctaggaagctcaaagaggccgtaacactgtaccttagggtggtgcgcgttgtggatttatgcgcaggtcgttggtgggagtacatgcccagcggtttcaccgatgcctcctttctaaccctgctaaaaaagatgcctgatgtggagcagttatacggcctccatccacggtacctcgaaagaagaagagtccggggccacgaggccttttctattccaggcgtgctcgaggccctgcaggcatgtcctaacctggttggggtggagaccagccatctagagctcgtggaatccatttggacctacatgccacacgtgcacatcctcggtaaatttcgcaaccggaatggagctttccctattcccccggagaacaaacttaaaattcccataggggctaaaatacagacacttcatttagtgggagttaacgtcccagaaatcccctgtattcccatgttgcgccacctgtacatgaaatgggttaggcttaccaagccgcagcctttcaaagattttctgtgcattagccttcgcaccttcgttatgcgcaattgcgctgggcctaccaacagcttgaagtacgttcctctggttactggactggcaagtgcacgcaacctcgaacacctcgagatggtgcgcgtacctttcctggggggtctcattcaacacgtggtcgaagattcctggcgatccggtgggttccgtaatctccatactatcgttctgggagcctgcaaaaacgcactcgaagtggacctgggatacctcataatcacggcagctaggcggttgcacgaagtgaggattcagccttctctcacaaaggacggcgtgttttccgcactgaagatggccgagctagagtttccacagttcgagactctacacttaggatacgtggacgagttcttgctccagtcacgtatggctaatgcagatttggtgaagtacggcctcgccgacgttgtggaaaatccaggcatcatcaccgacataggcatgaaagctgtcaatgaggttttctcttgcatcaagtatcttgccatctacaattgcccccacctgcataatccatataattggatctctgaccattccaggtggaccagactggtagacatcaacctggtgcgctgtcacgcgcttaagctcgattcctttggtcaatttattgagctacttccaagcctcgaattcatatctctcgaccaaatgtttcgggaaccccctaagggctgcgcccgtgtcggcctgtctgccggaaccggtattggtgtttcctccgctttggtgtcgaatcagaactccaacaatgacgacaataacgcccagaataacaatgctaatattcacgataacaaccaccaccaccctgacgactctgatgaagagaatgacttccgacaagacctccaacccggcgagcagcaattcgccgcggacgcattgaatgaaatggaggatatcgttcaggaggatggggaagtggtcgccgagtctggaaataacactccagcacattctcaggcaattatccccgttgacgttgacgaagagcaagccggccccagcggactccagagagtagtgaagccaacgtccatcacagtgcatgacagcgaatctgatgatgaagaagacagcctggagctgcaggaagtgtggattccaaagaatggtacaaggcggtatagcgaacgggaggaaaaaactggagaatctgtgcagtctcgcgagctaagcgaggtcgcaaagacgaagccacggcatgcgatgaagcgcaaacgcaccgccgacaagtccacgtcgacgtctgacccggtgatcgaagacgatcacgtgcaggtcctcgtgctaaaatccaaaaatctggtgggagtcacgatgacaaactgtgggatcacagatctggtattgaaggactgcccaaaaatgatgttcattcatgcaacccgctgcagggtgctaaaacatctgaaggtcgagaacgcacctattgtaaaccgcttcgattatgcccagtgtaagaagctgaacatggaccaggtgctggaccagatccttaggatgcccccggaaaggaatcggatcatctatctgaggccaatgcaacaggtggatacactaaccctcgaacagaaattattctcaggtccatatccttaccatatatgtatcatccacgagttctccaatccacccaacgtgcgaaacaaagtgaggatacgcagctggatggacactatagctaacataaatcaagaattaataaagtatgaatttttcccagaggcgacgcgctcggaggaggacttgaagaaatatccaaaatatccctggggacgcgaaatttacactctcgaaggcgtagtcgatggtgccccatactcaatgatttccgattttccttggctgaggtctcttcgagccgccgaaccgaacagcttcgcacggtatgatttcgaggatgatgaggaatccaccatttacgcccccagaaggaagggtcagctgagtgctgacatttgtatggaaaccataggggaggagatatccgaaatgcgccagatgaaaaaaggtgtcttccagcgcgtcgtcgcgatctttatccactactgtgatgtgaacggggagcccgtggaggacgattacatttag

SEQ ID NO: 96286 - DNA, 2832 bp, Artificial Sequence
  derived and/or modified sequence
atgggtccccgaaagaaatcggttaagacctgtattatgaacaatgagatccctgaagagatgaccgcagatgagaccaaggactacatgaatcagttatctcatgaggtattgtgccacatctttaggtatctaccattgcaagacatcatgtgcatggagtgcctgtccaggaagcttaaagaagctgtgaccctgtatcttcgcgtggtgcgtgtagtggacctttgcgctggaaggtggtgggagtatatgccttccggatttaccgacgcttccttccttactctcctcaagaaaatgccagatgtggagcagctgtatggcctgcaccctcgatacttggagcggcgtagggtgaggggccatgaggcattcagtatcccgggtgtgctggaagcgctgcaggcatgcccgaacctagtgggagtcgaaacttcccacttggaattggtggagtcaatatggacctatatgcctcacgtgcacattcttggcaaatttcgtaacagaaatggagcctttcccataccaccggagaacaagctcaagatccctatcggagccaagatacagacactgcacctggtgggagttaacgtgcccgaaatcccatgcattccaatgttgcgacacctttacatgaagtgggtacgactgaccaagccgcagccgttcaaagactttttgtgcatctcgctcagaacgttcgtcatgcgcaattgcgccggaccaacaaactctctcaagtatgtgcccctggtgacaggtttggccagcgccaggaacctggaacacttggaaatggtgcgagttccgtttctgggaggcctcatccagcacgtggtcgaggacagctggagaagtggtggattcaggaacctgcatacgatcgtattgggtgcgtgcaagaatgccctggaggtggacttgggttacctcattataaccgctgctcgcagactgcacgaggtgaggatccagccgtctctgactaaagacggtgtcttctcagccctcaaaatggccgaactggaattcccacagttcgagactttacacctgggctacgtcgatgaattcttactgcaatcacgaatggccaatgctgatctggttaaatacggactggcggacgttgtggaaaatcctggcataattacggatattggtatgaaagcagtaaacgaggtgttttcttgcatcaaatatctcgccatatacaattgccctcacttgcataacccttacaactggatcagtgaccacagtcgttggactcgtctggtcgacatcaatctcgtgagatgccatgcacttaagctggattcttttgggcaattcatagagctacttccctctctcgaattcatcagcctggaccagatgtttagagagccacctaagggctgtgctcgtgttggcctgtccgccggaaccggtatcggggtctcctcagcattagtatcaaatcagaactccaataatgatgacaacaacgctcagaataacaatgcaaacattcacgataacaaccaccaccatcctgacgactctgatgaggagaatgacttccgccaggacttgcagcctggtgagcagcagtttgccgctgacgcgttgaatgagatggaagacatagtccaagaggatggagaggtggttgccgaatccgggaataacaccccagctcattctcaagcgatcattccggtggatgtcgatgaggagcaagcagggccaagcggcttacaaagggtggtgaagccaaccagtatcactgtgcacgatagcgaatctgacgacgaggaggactcccttgaactgcaggaggtctggattcctaagaacgggactcgccgatattccgagagggaggaaaagactggggagtctgtccaatctagggagctgtctgaagtggcaaagacgaagccaagacacgccatgaagcggaaacgtacggcggataagtctacctcgactagcgatcctgtcatcgaagacgaccacgtgcaggtcctggtgttgaagtccaagaacctggttggagtgactatgacaaactgcggcatcacggatctcgtcctgaaggactgtcccaaaatgatgttcattcacgccactcgatgccgcgtgctcaaacatctgaaagtggaaaatgctccgattgtaaaccggttcgactacgcacagtgtaagaagctaaatatggaccaagtgctcgaccaaatcctgagaatgcccccagaacgtaatcgtatcatttatctgcgccctatgcagcaggtggacactttaactctcgaacagaagctgtttagcggcccttatccatatcacatttgcatcatccacgaattctctaacccccctaacgttcgcaataaggtccggatccgtagttggatggataccattgctaatataaatcaagaactgatcaagtatgaatttttccccgaagccactcgaagtgaggaggatcttaaaaagtatccaaaatacccatggggtcgtgagatctacactttagagggggttgtggatggagcaccctacagcatgatcagcgatttcccttggctgcgctccctccgggctgccgaaccaaatagcttcgcgaggtatgattttgaggacgatgaagagtctacgatttacgctccaagacgaaaagggcagctgtccgcagacatttgtatggagaccatcggagaggaaatcagtgagatgagacaaatgaaaaagggtgtcttccagagggtggtggctatcttcatacattattgcgacgtcaacggcgagccagtggaggacgactacatctag

SEQ ID NO: 96287 - DNA, 2832 bp, Artificial Sequence
  derived and/or modified sequence
atgggcccaagaaaaaagagtgtcaagacttgcatcatgaataacgagatccccgaggaaatgaccgcagatgagacaaaagattacatgaatcagttgtctcatgaagtcctgtgccacatttttaggtacctccccctgcaggacataatgtgtatggagtgtctgagcagaaagctcaaggaggcagttactctctatcttagagtggtcagggtagtcgacttgtgcgctggtcgttggtgggaatacatgccgtcaggctttaccgacgcctctttcctcactctgctgaagaagatgccagacgtggaacagctttacggactgcacccacggtacctggaacgcagaagagtccgaggccacgaagccttctccatccccggagtgcttgaggcgctgcaagcgtgtccgaacctggttggagtcgagacaagccacctggagttagtggagagcatatggacttacatgccccacgtccatatcctgggaaaatttcggaatcgcaacggcgctttcccaatccctcctgaaaacaagctgaagattccaataggtgcaaagatccagactctccacttggtaggcgttaatgtccccgagatcccttgcattcctatgctaaggcacctgtacatgaagtgggtgcgtctcaccaaaccacaaccattcaaagatttcctgtgcatcagtcttaggaccttcgtgatgaggaattgtgctggaccaacaaatagccttaaatacgtgcctctcgttacaggcctcgcctccgctcgcaacctggagcacctggaaatggtccgagtgccctttctgggcggactcatccagcatgtagtggaggatagttggcgcagtggaggcttcagaaacctgcacacgatcgtgctgggggcttgcaagaatgctctcgaagtggacctcggatatcttatcattaccgctgccagacgcctacatgaggtgaggatccagcccagcctaaccaaggatggggtgttcagcgcactcaagatggcagaactggagttcccccagtttgaaacgctgcacttaggctacgtggacgaatttctgctgcagagtagaatggccaacgccgaccttgtcaaatatggattagcagacgtggtcgaaaaccctggtatcatcactgacatcggaatgaaagccgtgaatgaggtcttcagctgcataaaatatctggccatctacaactgtccacatttgcacaacccatataactggatctccgaccacagccggtggactaggctggtcgacatcaacttggtgcgatgccatgcattaaaacttgactcattcggccaattcatcgaactgctgcccagcttggaatttatctctttagatcaaatgttcagagaaccccctaaggggtgtgctcgcgtgggtctctctgccggaactggcataggcgtcagtagcgcactggtgagcaaccagaacagcaacaatgacgacaataacgcgcagaacaacaatgcaaatattcacgataacaaccatcaccacccagacgactctgacgaggagaacgatttccgccaggacctgcagccgggagagcagcagtttgccgcagacgctctgaatgagatggaggacattgtccaagaggatggtgaagtcgtggcagagagtggaaacaacaccccagctcattcacaagcgatcatccccgttgacgtggacgaggagcaggcgggtcccagcgggttacagagggtggtgaagcccaccagcatcaccgttcatgattccgagtctgatgatgaagaagatagtctggagctgcaggaagtgtggatcccgaagaatggtacacgtcggtactcagagagggaggagaaaacgggcgagagtgtacagtctagggagttgtccgaagtcgcaaaaaccaagccccgacacgccatgaagaggaagcgaaccgcggacaaatctacctcaacatccgacccagtcatcgaagatgaccatgtgcaagtactggtgttgaagtcaaaaaatcttgtaggcgtcactatgactaactgtggaataaccgatctagtgctgaaagactgccccaagatgatgtttatccatgcgactcgatgtagagtattgaagcatctgaaagtcgagaatgctccaatagtcaatcgctttgactatgcacagtgtaagaagctgaatatggaccaggtactcgatcagatcctgagaatgcccccagagaggaataggatcatatatttgaggcccatgcaacaagtcgatacactcactttggagcaaaaactgttctctggcccatatccctaccacatttgtatcatccatgaattttcaaatcctcctaatgttagaaacaaggtccgtattcgttcctggatggataccatagccaacatcaatcaggagctcatcaagtatgaatttttccctgaggccacccggtcagaagaagatctcaagaaatacccgaagtacccctgggggagagaaatctataccctggaaggagtcgttgatggggcaccgtattccatgatatccgacttcccttggttgcggtccctgagggcagccgaaccgaacagctttgctcgctacgatttcgaggacgacgaggagagcacgatttacgcacctcggcgaaaagggcagctgtcagccgatatctgcatggagacaatcggagaagagattagcgaaatgcgccaaatgaagaagggggtgtttcagcgggtcgtggccatcttcatccactattgtgacgtaaacggtgagcccgtggaagacgactacatctag

SEQ ID NO: 96288 - DNA, 2832 bp, Artificial Sequence
  derived and/or modified sequence
atgggccccagaaagaagagcgtgaagacctgcatcatgaacaacgagatccccgaggagatgaccgccgacgagaccaaggactacatgaaccagctgagccacgaggtgctgtgccacatcttcagatacctgcccctgcaggacatcatgtgcatggagtgcctgagcagaaagctgaaggaggccgtgaccctgtacctgagagtggtgagagtggtggacctgtgcgccggcagatggtgggagtacatgcccagcggcttcaccgacgccagcttcctgaccctgctgaagaagatgcccgacgtggagcagctgtacggcctgcaccccagatacctggagagaagaagagtgagaggccacgaggccttcagcatccccggcgtgctggaggccctgcaggcctgccccaacctggtgggcgtggagaccagccacctggagctggtggagagcatctggacctacatgccccacgtgcacatcctgggcaagttcagaaacagaaacggcgccttccccatcccccccgagaacaagctgaagatccccatcggcgccaagatccagaccctgcacctggtgggcgtgaacgtgcccgagatcccctgcatccccatgctgagacacctgtacatgaagtgggtgagactgaccaagccccagcccttcaaggacttcctgtgcatcagcctgagaaccttcgtgatgagaaactgcgccggccccaccaacagcctgaagtacgtgcccctggtgaccggcctggccagcgccagaaacctggagcacctggagatggtgagagtgcccttcctgggcggcctgatccagcacgtggtggaggacagctggagaagcggcggcttcagaaacctgcacaccatcgtgctgggcgcctgcaagaacgccctggaggtggacctgggctacctgatcatcaccgccgccagaagactgcacgaggtgagaatccagcccagcctgaccaaggacggcgtgttcagcgccctgaagatggccgagctggagttcccccagttcgagaccctgcacctgggctacgtggacgagttcctgctgcagagcagaatggccaacgccgacctggtgaagtacggcctggccgacgtggtggagaaccccggcatcatcaccgacatcggcatgaaggccgtgaacgaggtgttcagctgcatcaagtacctggccatctacaactgcccccacctgcacaacccctacaactggatcagcgaccacagcagatggaccagactggtggacatcaacctggtgagatgccacgccctgaagctggacagcttcggccagttcatcgagctgctgcccagcctggagttcatcagcctggaccagatgttcagagagccccccaagggctgcgccagagtgggcctgagcgccggcaccggcatcggcgtgagcagcgccctggtgagcaaccagaacagcaacaacgacgacaacaacgcccagaacaacaacgccaacatccacgacaacaaccaccaccaccccgacgacagcgacgaggagaacgacttcagacaggacctgcagcccggcgagcagcagttcgccgccgacgccctgaacgagatggaggacatcgtgcaggaggacggcgaggtggtggccgagagcggcaacaacacccccgcccacagccaggccatcatccccgtggacgtggacgaggagcaggccggccccagcggcctgcagagagtggtgaagcccaccagcatcaccgtgcacgacagcgagagcgacgacgaggaggacagcctggagctgcaggaggtgtggatccccaagaacggcaccagaagatacagcgagagagaggagaagaccggcgagagcgtgcagagcagagagctgagcgaggtggccaagaccaagcccagacacgccatgaagagaaagagaaccgccgacaagagcaccagcaccagcgaccccgtgatcgaggacgaccacgtgcaggtgctggtgctgaagagcaagaacctggtgggcgtgaccatgaccaactgcggcatcaccgacctggtgctgaaggactgccccaagatgatgttcatccacgccaccagatgcagagtgctgaagcacctgaaggtggagaacgcccccatcgtgaacagattcgactacgcccagtgcaagaagctgaacatggaccaggtgctggaccagatcctgagaatgccccccgagagaaacagaatcatctacctgagacccatgcagcaggtggacaccctgaccctggagcagaagctgttcagcggcccctacccctaccacatctgcatcatccacgagttcagcaacccccccaacgtgagaaacaaggtgagaatcagaagctggatggacaccatcgccaacatcaaccaggagctgatcaagtacgagttcttccccgaggccaccagaagcgaggaggacctgaagaagtaccccaagtacccctggggcagagagatctacaccctggagggcgtggtggacggcgccccctacagcatgatcagcgacttcccctggctgagaagcctgagagccgccgagcccaacagcttcgccagatacgacttcgaggacgacgaggagagcaccatctacgcccccagaagaaagggccagctgagcgccgacatctgcatggagaccatcggcgaggagatcagcgagatgagacagatgaagaagggcgtgttccagagagtggtggccatcttcatccactactgcgacgtgaacggcgagcccgtggaggacgactacatctag

SEQ ID NO: 96289 - protein, 203 aa, Artificial Sequence
  derived and/or modified sequence
MMQPQQPYTGQIYQPTQAYTPASPQPFYGNNFEDEPPLLEELGINFDHIWQKTLTVLHPLKVADGSIMNETDLAGPMVFCLAFGATLLLAGKIQFGYVYGISAIGCLGMFCLLNLMSMTGVSFGCVASVLGYCLLPMILLSSFAVIFSLQGMVGIILTAGIIGWCSFSASKIFISALAMEGQQLLVAYPCALLYGVFALISVF

SEQ ID NO: 96290 - protein, 101 aa, Artificial Sequence
  derived and/or modified sequence
MMQPQQPYTGQIYQPTQAYTPASPQPFYGNNFEDEPPLLEELGINFDHIWQKTLTVLHPLKVADGSIMNETDLAGPMVFCLAFGATLLLAGKIQFGYVYGI

SEQ ID NO: 96291 - DNA, 612 bp, Artificial Sequence
  derived and/or modified sequence
atgatgcagccccagcagccctacaccggccagatctaccagcccacccaggcctacacccccgccagcccccagcccttctacggcaacaacttcgaggacgagccccccctgctggaggagctgggcatcaacttcgaccacatctggcagaagaccctgaccgtgctgcaccccctgaaggtggccgacggcagcatcatgaacgagaccgacctggccggccccatggtgttctgcctggccttcggcgccaccctgctgctggccggcaagatccagttcggctacgtgtacggcatcagcgccatcggctgcctgggcatgttctgcctgctgaacctgatgagcatgaccggcgtgagcttcggctgcgtggccagcgtgctgggctactgcctgctgcccatgatcctgctgagcagcttcgccgtgatcttcagcctgcagggcatggtgggcatcatcctgaccgccggcatcatcggctggtgcagcttcagcgccagcaagatcttcatcagcgccctggccatggagggccagcagctgctggtggcctacccctgcgccctgctgtacggcgtgttcgccctgatcagcgtgttctag

SEQ ID NO: 96292 - DNA, 534 bp, Artificial Sequence
  derived and/or modified sequence
atgatgcagccccagcagccctacaccggccagatctaccagcccacccaggcctacacccccgccagcccccagcccttctacggcaacaacttcgaggacgagccccccctgctggaggagctgggcatcaacttcgaccacatctggcagaagaccctgaccgtgctgcaccccctgaaggtggccgacggcagcatcatgaacgagaccgacctggccggccccatggtgttctgcctggccttcggcgccaccctgctgctggccggcaagatccagttcggctacgtgtacggcatcagcgccatcggctgcctgggcatgttctgcctgctgaacctgatgagcatgaccggcgtgagcttcggctgcgtggccagcgtgctgggctactgcctgctgcccatgatcctgctgagcagcttcgccgtgatcttcagcctgcagggcatggtgggcatcatcctgaccgccggcatcatcggctggtgcagcttcagcgccagcaagatcttcatcagcgccctgtag

SEQ ID NO: 96293 - DNA, 306 bp, Artificial Sequence
  derived and/or modified sequence
atgatgcagccccagcagccctacaccggccagatctaccagcccacccaggcctacacccccgccagcccccagcccttctacggcaacaacttcgaggacgagccccccctgctggaggagctgggcatcaacttcgaccacatctggcagaagaccctgaccgtgctgcaccccctgaaggtggccgacggcagcatcatgaacgagaccgacctggccggccccatggtgttctgcctggccttcggcgccaccctgctgctggccggcaagatccagttcggctacgtgtacggcatctag

SEQ ID NO: 96294 - DNA, 612 bp, Artificial Sequence
  derived and/or modified sequence
atgatgcaaccccagcagccttatactggacagatataccagccgacccaagcctataccccagccagcccacagcccttctatggcaataattttgaagacgagccccctttgttggaggaactcggtatcaattttgatcacatttggcagaaaactctgactgtgcttcatccactcaaagtggccgatgggtctatcatgaacgagactgatctagccggccctatggtgttctgtttagcctttggagccactctgctgctcgcagggaagatccaatttggttacgtgtacgggatctcggcaattggttgtttaggcatgttttgtttgctgaacctgatgtccatgacaggagtgtcgttcgggtgcgtggcctccgtcctgggatactgcctactgccaatgatactgctctcaagttttgctgtgatatttagcctccagggaatggtgggcataatcttgaccgcagggattatcggctggtgcagcttctccgcttctaagattttcattagcgcactggctatggagggccagcagctgctggtggcctacccatgcgctttgctttatggtgtgtttgctttaatcagcgttttttag

SEQ ID NO: 96295 - DNA, 534 bp, Artificial Sequence
  derived and/or modified sequence
atgatgcagccacagcagccttatacagggcagatctaccaacctacacaggcttacacacccgcctcccctcagcccttttacggcaacaattttgaggatgaaccaccccttctagaagagctgggtatcaacttcgaccacatctggcaaaagaccttgacggttctccaccccctgaaagtggcagatggctccatcatgaacgaaacagatctagcaggccccatggtcttctgcctcgcatttggggcaaccctactgctggctggtaaaatccagtttggatatgtgtatggaatttctgccatcggatgtctgggaatgttttgccttttaaatcttatgtcaatgaccggcgtgagctttggctgcgtagctagcgtcttgggatattgtctcttaccaatgatcctgctgtccagcttcgcagtcatcttttcactgcagggaatggtggggatcatattgacagccggtatcataggttggtgcagcttttcagcttccaaaatctttatttcagccctgtag

SEQ ID NO: 96296 - DNA, 306 bp, Artificial Sequence
  derived and/or modified sequence
atgatgcagccacagcaaccttataccgggcagatctaccaacccactcaggcttacacgcccgctagcccacagcccttctatggcaacaattttgaagatgagccaccactgcttgaagagctgggcattaatttcgatcacatatggcagaagaccctcaccgtcctgcatcctctgaaggttgctgatggctcgattatgaacgaaaccgacctggcagggccaatggtcttttgcctggcgtttggcgctacccttctgctggccggtaaaattcaatttgggtacgtctacggaatctag

SEQ ID NO: 96297 - DNA, 612 bp, Artificial Sequence
  derived and/or modified sequence
atgatgcagccccagcagccctacacaggccagatctaccagcccacccaggcctacaccccagccagcccccagcccttctacggcaacaactttgaagatgagccccccctgctggaggagctgggcatcaactttgaccacatctggcagaagaccctgactgtgctgcaccccctgaaggtggctgatggcagcatcatgaatgaaacagacctggccggccccatggtgttctgcctggcctttggagccaccctgctgctggccggcaagatccagtttggctacgtgtatggcatcagcgccatcggctgcctgggcatgttctgcctgctgaacctgatgtccatgactggagtgtcctttggctgtgtggcctctgtgctgggctactgcctgctgcccatgatcctgctgagcagctttgctgtgatcttcagcctgcagggcatggtgggcatcatcctgacagctggcatcatcggctggtgcagcttcagcgccagcaagatcttcatcagcgccctggccatggagggccagcagctgctggtggcctacccctgtgccctgctgtatggagtgtttgccctgatctctgtgttctag

SEQ ID NO: 96298 - DNA, 534 bp, Artificial Sequence
  derived and/or modified sequence
atgatgcagccccagcagccctacacaggccagatctaccagcccacccaggcctacaccccagccagcccccagcccttctacggcaacaactttgaagatgagccccccctgctggaggagctgggcatcaactttgaccacatctggcagaagaccctgactgtgctgcaccccctgaaggtggctgatggcagcatcatgaatgaaacagacctggccggccccatggtgttctgcctggcctttggagccaccctgctgctggccggcaagatccagtttggctacgtgtatggcatcagcgccatcggctgcctgggcatgttctgcctgctgaacctgatgtccatgactggagtgtcctttggctgtgtggcctctgtgctgggctactgcctgctgcccatgatcctgctgagcagctttgctgtgatcttcagcctgcagggcatggtgggcatcatcctgacagctggcatcatcggctggtgcagcttcagcgccagcaagatcttcatcagcgccctgtag

SEQ ID NO: 96299 - DNA, 306 bp, Artificial Sequence
  derived and/or modified sequence
atgatgcagccccagcagccctacacaggccagatctaccagcccacccaggcctacaccccagccagcccccagcccttctacggcaacaactttgaagatgagccccccctgctggaggagctgggcatcaactttgaccacatctggcagaagaccctgactgtgctgcaccccctgaaggtggctgatggcagcatcatgaatgaaacagacctggccggccccatggtgttctgcctggcctttggagccaccctgctgctggccggcaagatccagtttggctacgtgtatggcatctag

SEQ ID NO: 96300 - DNA, 612 bp, Artificial Sequence
  derived and/or modified sequence
atgatgcagccccagcagccctacaccggccagatctaccagcccacacaggcctatacacctgcctcaccgcagcctttttacgggaacaattttgaggacgagcccccactgctggaggaactgggcatcaatttcgaccatatatggcaaaaaaccctgacagtgctgcaccctctgaaagtggccgatggaagtataatgaacgaaaccgatcttgcaggcccgatggtgttttgtctcgcattcggggctaccctgctgctggcaggtaagattcagttcggatatgtgtatggaatttccgctattggatgtctggggatgttttgtctgctgaacttgatgtctatgacgggagtgtccttcggctgtgtcgcctctgtattaggttattgtcttctacccatgattcttctctcttctttcgctgttatattctctctccaaggcatggttggtatcattcttaccgcaggaatcatcggttggtgctctttctctgctagtaagatcttcatctccgcgttggctatggagggccagcagcttttggtggcctacccatgcgctctgttgtatggggtgtttgctttaatctctgtcttctag

SEQ ID NO: 96301 - DNA, 534 bp, Artificial Sequence
  derived and/or modified sequence
atgatgcagccccagcagccctacaccggccagatctaccagcccacacaagcgtatactccagcctccccccagccattctacggtaacaactttgaagatgagccacccctcttagaggaattaggtattaacttcgaccacatttggcagaagaccctcaccgtgttgcatcccttgaaggtagcagacggaagcattatgaatgagaccgatctcgctgggcccatggtgttttgtcttgccttcggtgccactctgcttctcgcgggcaagatccagtttggctatgtctacggcatctctgcaatcggctgcctgggcatgttctgtctcctgaatttgatgtccatgacaggtgtgtcctttggctgcgttgcatccgttttgggctactgtcttctccctatgattctcttatcatcttttgcagttatattttcgctccaggggatggttgggattattttaactgccggaatcataggatggtgctccttctcggcctcgaagatcttcatttctgctctgtag

SEQ ID NO: 96302 - DNA, 306 bp, Artificial Sequence
  derived and/or modified sequence
atgatgcagccccagcagccctacaccggccagatctaccagcccactcaggcatacacccccgcatcaccgcagcctttctacggtaacaactttgaggatgagcccccactgctggaggagctcggaattaatttcgatcacatctggcagaagactttgacggttctgcatcccctgaaggtcgctgatggctctatcatgaacgagactgatctcgctggacctatggtcttctgtctggcgtttggtgcaactctgctcctggccggcaaaatacaattcggttacgtctacggcatctag

SEQ ID NO: 96303 - DNA, 612 bp, Artificial Sequence
  derived and/or modified sequence
atgatgcaaccccagcagccatacactggccagatctaccagccgacacaagcatacacccccgctagcccgcagcctttctacggaaataactttgaggatgagccacccttgctggaggagttaggaattaatttcgatcacatctggcagaaaacgttaaccgttctgcatccactgaaggtggccgacgggtcaatcatgaacgagaccgatctggcgggaccaatggttttttgcttggcttttggcgctacgctcctgctggccggaaagatccagtttggctacgtgtatggcatcagcgccatcggctgcctgggaatgttctgcctgttgaaccttatgtccatgaccggggtgtctttcggctgtgtggcttcagtactgggctattgtctgctacctatgatccttctgagtagctttgctgtaatatttagcctgcaggggatggtagggattatccttaccgcaggtattataggttggtgctcattctctgcttctaagattttcatcagtgcactggctatggaaggacagcaactccttgtggcttatccttgtgccctgctctacggggtcttcgctctcatctcagtcttctag

SEQ ID NO: 96304 - DNA, 534 bp, Artificial Sequence
  derived and/or modified sequence
atgatgcagccccaacaaccctacaccggccagatttatcagcccacacaagcctacacaccggcatcaccacagccgttttacgggaacaatttcgaagacgagcccccactgctcgaagaacttggtatcaatttcgatcatatttggcagaagacactcaccgttctgcaccccttaaaggtggcagacggctccattatgaatgaaaccgacctagctggccctatggtgttctgcctggcattcggcgcaacactgctactcgcgggaaagatccagttcggctacgtttacgggattagtgccattggctgcctaggcatgttttgtttgctgaacctgatgtcaatgaccggtgtgtcttttggctgcgttgcctccgtgctcggatattgcctactgcctatgatcctgcttagcagcttcgcagttatcttttcgctacagggaatggttggaattatccttacagctgggataattggctggtgctccttcagcgccagtaagatcttcatatcagccctctag

SEQ ID NO: 96305 - DNA, 306 bp, Artificial Sequence
  derived and/or modified sequence
atgatgcagcctcagcagccgtacacaggacagatttaccaacccacgcaggcgtatactcccgcatcgccccagcccttttacggcaacaacttcgaagatgaacctcccctgctggaggagcttgggattaacttcgatcatatttggcagaagactttaactgtgctgcatccgctgaaagtcgcagatggctcgatcatgaatgagacagaccttgcgggtcctatggtgttctgtttggctttcggggcaacgctcctgctagccggaaagattcagttcggctacgtctacggtatttag

SEQ ID NO: 96306 - protein, 325 aa, Artificial Sequence
  derived and/or modified sequence
MASSSGSKAEFIVGGKYKLVRKIGSGSFGDIYLAINITNGEEVAVKLESQKARHPQLLYESKLYKILQGGVGIPHIRWYGQEKDYNVLVMDLLGPSLEDLFNFCSRRFTMKTVLMLADQMISRIEYVHTKNFIHRDIKPDNFLMGIGRHCNKLFLIDFGLAKKYRDNRTRQHIPYREDKNLTGTARYASINAHLGIEQSRRDDMESLGYVLMYFNRTSLPWQGLKAATKKQKYEKISEKKMSTPVEVLCKGFPAEFAMYLNYCRGLRFEEAPDYMYLRQLFRILFRTLNHQYDYTFDWTMLKQKAAQQAASSSGQGQQAQTPTGF

SEQ ID NO: 96307 - DNA, 978 bp, Artificial Sequence
  derived and/or modified sequence
atggcttcttcctcaggctccaaagctgagttcattgtgggcggcaagtataagttggtccggaaaattggctctggctcctttggagacatctatctggcaattaacatcaccaacggggaagaagtggccgtgaaactagaaagtcagaaggcgagacatcctcagcttctgtacgaatccaaactgtataagatcctccagggcggggtgggcattcctcatattagatggtacggccaggaaaaggactataatgtcctggtcatggacttgctggggccatcgctcgaggatttgttcaatttctgcagtcggcgatttacaatgaagacagtgctgatgctcgcagatcagatgatttcacgaatcgagtatgtgcatacaaagaattttatccacagagacattaagccagacaattttttaatgggcataggacgacattgcaacaaacttttcctaatcgattttggtctggccaaaaagtatagagacaacaggaccaggcagcacattccttacagagaggataaaaacctgaccggtactgctaggtatgccagcatcaacgcacatctgggcattgagcagagtagacgggatgacatggaatctctcggctacgtactgatgtactttaatcgcacatctctcccatggcaaggcctgaaagccgcgacaaaaaaacagaaatacgagaaaatttccgagaagaagatgtcaacccccgttgaggtactctgcaagggctttcctgccgagtttgctatgtatttgaactattgccgcgggctgaggtttgaggaggctccagactatatgtacttacgccagctgttcaggatcctttttcggaccctgaatcaccagtatgactatacatttgactggaccatgctgaagcaaaaggccgcccagcaggccgcgtcgtcttccggccagggccaacaggctcagaccccaactggtttctag

SEQ ID NO: 96308 - DNA, 978 bp, Artificial Sequence
  derived and/or modified sequence
atggcctcttcctccggtagcaaagccgaatttatagtaggcggcaagtataagctcgtccggaagattggatctggttcatttggggatatttatctcgccatcaacattacaaacggcgaggaggtggccgtcaaactcgagtcccagaaggctcgccatcctcagctgttatatgaatccaagttatacaaaattttgcagggcggcgtggggattcctcacataaggtggtacggtcaggagaaggattacaatgtgttggtaatggatctgctcggaccaagtttagaagatctattcaatttttgcagcaggagattcacaatgaagaccgtacttatgttggcagatcagatgatatcacggattgagtacgtgcacacaaagaacttcatacatagagacatcaagcctgacaattttctgatggggataggccgtcactgcaataagctcttcctaatcgatttcggcctcgctaaaaaataccgggataatcgaaccaggcagcacatcccctaccgggaagacaagaacttgacagggaccgcacgctacgccagtatcaacgcccatctgggcatcgaacagagtcgacgtgatgacatggagtctttgggctatgtcttgatgtacttcaatcgcacttccctgccatggcagggcctcaaggccgctacaaagaagcagaagtatgagaagatttcagaaaaaaagatgtctactccagttgaagtgctctgcaaaggcttccctgccgagttcgcgatgtacctgaactattgtcgggggctgcgattcgaggaggcccccgactacatgtatcttagacagctcttccgtattctttttcggactctcaatcaccagtacgactacacttttgactggactatgctcaaacagaaggccgctcagcaggcggcatcctcctctggacaaggtcagcaggcccaaaccccaactgggttttag

SEQ ID NO: 96309 - DNA, 978 bp, Artificial Sequence
  derived and/or modified sequence
atggccagcagcagcggcagcaaggccgagttcatcgtgggcggcaagtacaagctggtgaggaagattggcagcggcagctttggagacatctacctggccatcaacatcaccaatggagaggaggtggccgtgaagctggagagccagaaggcccggcacccccagctgctgtatgagagcaagctgtacaagatcctgcagggcggcgtgggcatcccccacatccgctggtacggccaggagaaggactacaacgtgctggtgatggacctgctgggccccagcctggaggacctcttcaacttctgcagccgccgcttcaccatgaagacagtgctgatgctggccgaccagatgatcagccgcatcgagtatgtgcacaccaagaacttcatccaccgggacatcaagccagacaacttcctgatgggcatcggccgccactgcaacaagctgttcctgattgactttggcctggccaagaagtacagagacaacagaacccggcagcacatcccctaccgggaggacaagaacctgaccggcacagcccgctatgccagcatcaatgcccacctgggcatcgagcagagcagaagagatgacatggagagcctgggctacgtgctgatgtacttcaacagaaccagcctgccctggcagggcctgaaggccgccaccaagaagcagaagtatgagaagatcagcgagaagaagatgagcacccctgtggaggtgctgtgcaagggcttccctgctgagtttgccatgtacctgaactactgccggggcctgcgctttgaggaggccccagactacatgtacctgcggcagctgttccgcatcctcttccgcaccctgaaccaccagtatgactacacctttgactggaccatgctgaagcagaaggccgcccagcaggccgccagcagcagcggccagggccagcaggcccagacccccaccggcttctag

SEQ ID NO: 96310 - DNA, 978 bp, Artificial Sequence
  derived and/or modified sequence
atggccagcagcagcggcagcaaggccgagttcatcgtgggcggcaaatataagctggtgaggaaaatcggaagtgggagtttcggggacatatatctggccattaacatcaccaacggcgaggaagtggccgtcaagctcgaaagccagaaggccaggcacccccagctgctgtacgaaagcaagctttacaaaatccttcagggcggggtgggcatcccccacatcaggtggtacggtcaggagaaagactataacgtgctggtgatggacctactcgggcccagcctggaagatctgtttaatttttgctcccgccgatttaccatgaaaacagtactcatgttagcagatcaaatgatcagtaggatagagtacgtgcatactaagaactttatccaccgggacataaagccagacaacttcctgatgggcatcggacgccactgtaacaagcttttccttattgattttgggcttgcaaaaaaataccgcgataacaggacccgccaacacattccttatagggaagacaagaacctgacgggcaccgctcgctatgcatccattaacgcacatctgggcatcgaacagtcgcggcgcgatgatatggaatcactggggtatgtccttatgtattttaaccgcacctccctaccgtggcagggactaaaggcggcaactaagaagcagaagtatgagaagatctccgaaaagaaaatgtccacccccgtagaagtcctttgcaaagggttcccagctgaatttgccatgtacctgaattactgtcgagggctgcggttcgaggaggcaccggactacatgtatcttcggcaactgttccggatcctgttccggacgctgaaccatcagtatgattacacttttgactggacgatgcttaaacagaaggcagctcagcaggccgcgagctccagtggccaagggcaacaagcacaaacgccaactggcttctag

SEQ ID NO: 96311 - DNA, 978 bp, Artificial Sequence
  derived and/or modified sequence
atggccagcagcagcggcagcaaggccgagttcatcgtgggcggcaagtataaactggtgcggaagattggttctggtagttttggtgatatctacctggctatcaatattaccaatggagaagaggttgcagtgaaacttgaaagccagaaagccaggcatccccagctcttgtacgagagcaagctgtataaaatactccagggaggcgtcggtataccgcatattagatggtatggccaggagaaggactacaatgtactggtaatggacttactcggccccagtttagaggatctcttcaacttctgttcacggaggtttactatgaagactgtcctgatgctagctgaccagatgatcagtcggattgaatatgtgcacaccaagaatttcattcaccgcgatataaagccagataacttcctaatgggaattggcagacattgtaataaactgttcctcattgattttggcttagctaaaaagtatcgggacaaccgcacaagacagcacatcccatatcgtgaggataagaatctgaccggcactgcaaggtacgcctctataaatgcccacttgggaatcgaacagtcaagacgggacgatatggagtcacttggctatgtgttgatgtacttcaaccgtacaagtctgccgtggcagggccttaaagcggctaccaaaaagcaaaagtacgagaaaatcagtgagaagaaaatgagcactccggtggaggtcctctgcaaaggattccctgcggagttcgccatgtacctcaattactgtcgggggctgcgtttcgaagaggctcccgattacatgtatcttaggcagctgttcaggattctatttcgcacgttaaaccatcaatacgattacaccttcgactggaccatgttaaagcagaaagcagcccagcaggctgccagttcatctgggcagggacagcaggctcaaactcctacaggcttttag

SEQ ID NO: 96312 - DNA, 978 bp, Artificial Sequence
  derived and/or modified sequence
atggcctcgtccagtgggtctaaagccgaatttatcgtcggaggcaagtataagctggttaggaaaatcggatcgggcagcttcggtgacatttaccttgcaattaacatcaccaatggggaagaggtcgctgtaaagctggagtcgcagaaggcacgccacccccagctcctctatgagtcaaagctgtacaagatccttcaggggggtgttggcatccctcatatcagatggtatggacaagagaaagactataacgttttggtcatggacctgctagggccttcactggaagatctgttcaatttctgcagccggaggtttactatgaaaacagttcttatgctggcagatcagatgattagtagaatagaatatgtccacacgaagaactttattcatcgagacatcaaaccagataatttcctcatggggatcggacggcattgcaacaaactgtttctcatcgacttcgggcttgcaaaaaagtatcgggataataggaccagacaacatattccctacagggaggacaagaacctcaccggtacagcgaggtacgcgtcaattaacgcccatcttggtatcgaacagtcaaggcgtgatgacatggaatccctggggtatgttctgatgtattttaaccggacaagcctgccatggcaaggcctcaaagccgctaccaaaaagcagaaatacgaaaaaataagtgagaagaaaatgagcactccggtggaggtgctgtgcaagggcttccccgctgagttcgccatgtatttaaactactgcagggggctccgcttcgaagaagcccctgactatatgtacctgcgccagctatttcgcattctgttccgcacccttaaccatcagtatgattacaccttcgactggaccatgctgaagcagaaggcagcacaacaagctgcctcttcctcaggacaggggcagcaggctcagaccccgacgggattctag

SEQ ID NO: 96313 - DNA, 978 bp, Artificial Sequence
  derived and/or modified sequence
atggccagcagtagcgggagtaaggctgaattcatcgtgggaggcaagtataagctggtgcggaagatcggctcaggaagttttggggatatttacctggctatcaacattacaaacggagaggaggtggccgtcaagttggagtcacagaaagccaggcacccgcagctgttgtatgagagcaaactgtataagatcctgcagggaggagtgggcataccacatattagatggtatggccaggaaaaagactacaacgtgttggtaatggatctgctgggtcctagtctcgaagatctcttcaacttctgctctaggcgattcacaatgaagacagtcctcatgctggccgaccagatgatctccaggatcgagtatgtccacacaaaaaacttcatccacagggatattaaacccgataatttcttgatgggtatcggcagacactgcaataaattattcctcatagacttcggccttgccaagaagtacagggacaaccgcactcggcagcatatcccatatagagaggataaaaacctgacaggcaccgctcggtatgcctccattaatgcacacttaggtatcgagcagtcccgcagggacgacatggaatctcttgggtatgtcctgatgtatttcaaccgtaccagccttccctggcaggggctaaaggctgccacaaagaagcaaaaatacgagaagatcagcgagaaaaagatgtctaccccggtggaggtgctttgtaagggctttcctgccgagttcgccatgtacctgaattactgcagaggcctgaggttcgaggaggcacctgactacatgtacctccgacagctgttccgtattctgttccggacgctgaatcatcagtacgattatacgtttgactggacaatgctgaaacagaaagcagcacagcaagctgccagcagtagcggtcaggggcagcaggcacaaacacccactgggttttag

SEQ ID NO: 96314 - DNA, 6067 bp, Artificial Sequence
  derived and/or modified sequence
gggggcattttgtgttggctggagctggagtaacaagatggcgtcgtccgcggagtgacaggggtccctctgggccggagccggcggcagtggtggcagcggtatcgccgccctagctcaccgcgccccttttccagcccgcgacgtcgccgcgcaagcgaggcagcggcggccgccgagaaacaagtggcccagcctggtaaccgccgagaagcccttcacaaactgcggcctggcaaaaagaaacctgactgagcggcggtgatcaggttcccctctgctgattctgggccccgaaccccggtaaaggcctccgtgttccgtttcctgccgccctcctccgtagccttgcctagtgtaggagccccgaggcctccgtcctcttcccagaggtgtcggggcttggccccagcctccatcttcgtctctcaggatggcgagtagcagcggctccaaggctgaattcattgtcggagggaaatataaactggtacggaagatcgggtctggctccttcggggacatctatttggcgatcaacatcaccaacggcgaggaagtggcagtgaagctagaatctcagaaggccaggcatccccagttgctgtacgagagcaagctctataagattcttcaaggtggggttggcatcccccacatacggtggtatggtcaggaaaaagactacaatgtactagtcatggatcttctgggacctagcctcgaagacctcttcaatttctgttcaagaaggttcacaatgaaaactgtacttatgttagctgaccagatgatcagtagaattgaatatgtgcatacaaagaattttatacacagagacattaaaccagataacttcctaatgggtattgggcgtcactgtaataagttattccttattgattttggtttggccaaaaagtacagagacaacaggacaaggcaacacataccatacagagaagataaaaacctcactggcactgcccgatatgctagcatcaatgcacatcttggtattgagcagagtcgccgagatgacatggaatcattaggatatgttttgatgtattttaatagaaccagcctgccatggcaagggctaaaggctgcaacaaagaaacaaaaatatgaaaagattagtgaaaagaagatgtccacgcctgttgaagttttatgtaaggggtttcctgcagaatttgcgatgtacttaaactattgtcgtgggctacgctttgaggaagccccagattacatgtatctgaggcagctattccgcattcttttcaggaccctgaaccatcaatatgactacacatttgattggacaatgttaaagcagaaagcagcacagcaggcagcctcttccagtgggcagggtcagcaggcccaaacccccacaggtttctaagcatgaattgaggaacagaagaagcagagcagatgatcggagcagcatttgtttctccccaaatctagaaattttagttcatatgtacactagccagtggttgtggacaaccatttacttggtgtaaagaacttaatttcagtataaactgactctgggcagcattggtgatgctgtatcctgagttgtagcctctgtaattgtgaatattaactgagatagtgaaacatggtgtccggttttctattgcattttttcaagtggaaaagttaactaaatggttgacacacaaaaattggtggagaaattgtgcatatgccaattttttgttaaaaccttttgttttgaactatactgctttgagatctcatttcagaagaacggcatgaacagtcttcagccacagttgtgatggttgttaaatgctcacaattgtgcattcttagggtttttccatccctggggtttgcaagttgttcacttaaaacattcttaaaatggttggcttcttgtctgcaagccagctgatatggtagcaaccaaagattccagtgtttgagcatatgaaagactctgcctgcttaattgtgctagaaataacagcatctaaagtgaagacttaagaaaaacttagtgactactagattatccttaggactctgcattaactctataatgttcttggtattaaaaaaaaagcatatttgtcacagaaatttagttaacatcttacaactgaacatgtatgtatgttgcttagataaatgtaatcactgtaaacatctatatgatctgggattttgtttttattttgaaatgggagcttttttgtttacaagttcattaaaaactaaaaactgtttctgtaaggaaatgagattttttttaaacaacaaaaaatgccttgctgactcactattaaataaaaatctccccaattttttgatagactacttcaagccatttgttacatggtattcctttgcaagtcaatttaggtttcgtgttataacttttcctctttttttaagaaaaatgaaaaaagtaattcttttgtctgaaggggaaaggcattctttcatttttttctttttttttttttttttttatgacttgcaggcacaatatctagtactgcaactgccagaacttggtattgtagctgctgcccgctgactagcagctggactgattttgaataaaaatgaaagcattaaagggtttccctacaaaacatttttctttaaaatacttttgaaatggctataagcagttgactttcacccttggagagcatcacactgtgtgaggttcagtgattgttgaccctccccagcccctcctgcttctttaagttatctgtgtgcgtgcgcttcctctcaatcttctttgcacgctcatttctttttctctgacccatgagaaaggaaaacttactgatgataatttttaaatagtgtaatttattcatttatagcatgtcaggataaattaaaagaacatttgtctggaaatgctgccgggagcctattgtgtaaatgtaggtattttgtaaaataaccttgaaattgtaaattgacacgtgtttggtcagattgtgtcaagtttaatttgttttgttttcttttttcttttttttatttgaaaactactttagcaataattaattccatgattatcacattctgccattaagggatattagtaccgtaatactgaagaaattttattaagtctgaacttctggggtaggcagcttctttgtttcttttctatccacccttgtcggttgaggtatttgtttcttgactaataaaccctttgatacttttagccagaaatcagtctcataaagctatttttgagtatagtttgtgtaaaataaaaatgtttagctttggtaataacttccaagctgaactccctctagcaagatatttttcagtgcttttatttactatgcacttagactatgcactttttctgaaatatttttgtaacacttttttgtatttttgccatttgaaaaggttgtggtgtagttggtctgtaattaagttgcagatttaaaactgctgttagctttgtaaatcaaaatataggtgttttttgtcctggtatatcgtcattccatctgcagctggagctggaatcccattgatcttctagctaccattcattttcttcactgttcacaaaagaagagtgtgaaattcagtgaatgctgttactaatcctgttacgagatgaatctcatttcaccaaaattaaattatgtttttccgctaaaatgatgatacaagttgaagacacatcactctgaaattggaagacctcaccacttaaggctccacagtggcttactcagctgaactctaggttactactctttactttgttcacccattggggggtgcagtttttttaaaatgttgggagatggccattctaactactgttgaatgtctctgttttgggaaggtataacaagaaataaaaaagaatatatatgaagggagagactggttatctcctcccatatggttgtgcttatcctcttatggcttacaaatgaatatttggaggtttgctttcacaatgatttcccatcaacaaatatttttagtaggatttttcctgtttctgttagtccttgcagtactcataaatgttttaagctgagcatactgtaatagtcataagtttaatttcattataataaaaataatcaaacaaaaggactttagaacccaagacaatgagctagttttccctaaagtttgctgaactattaaggaatatgttcttatagcttttgactagaatgagtcatgggaattctaagaagggatggcctagacatttttagctcagttaaattcagcatttaatgcaggtgagttcctgggtcgttttccaactagtctggaacagtctggttctgactcaaactggtataaagcattattttaggttttctctttgccagtttttaagcagttataaccatgtaaatcaagatgtgaggacatctatatgaagtatagtaaagaagtggtgtcagcagatcaatatgtgtgtcctgggtgtgctgctctcttaagtgagactttgtgagactatactttaaatgcattattaccattgcttacattttgggggattttcttcctcctcaaaacttccatttctattgtaatattcttaatgacaatctttttttttttttagcagtgtatgtttgaaacagccaaagatggcgatgaaccaagtgtaaattgatctaagcagcccatgcagtttgtgttgaatcaacaaacagtgtattgttgaagtgaaattattttctgaaatgacttgttagaccagttttgaggacatactcaaaagtagagtaataatggctcctgggatggagaaatatgagatgaacctggaacattctattatggtgccacaaaggaaatctaaaaaaaaaaaaaaaaaaaaaagtggttggctaggagcagtggcacacgcctgtgattccagcactttgggaggccgaagtgggcaggagttcaagaccagcctggccaacatagtgaaaccctgtctctactaaaaatacaaaaattagccgggtgtggtggcgggcgcctgtaatcccagcttttcaagaggctgaggcagaagaatcgcttgaacccgggagatggaggttgcagtgagctgagatcgtgccactgcactccagcctgggcgttgcagtgagactccgtctcaacaacaacaaaaaggtggatacatgtcaaaagggcacaggagccacttgaaggattatacttgctaaatctgtgtcaattatcaaaataaactggtagcaacgttacaactcactgaataagataccatgattccatgttgacttaaaaatggagagaagagaaagctctaacttgaatgtcagctaatttaaggtgaaaggattttatgtgttagaaaaatcaccattttgcaaactagttttcagaatccttaatatatgtcatctcttttattcctcataacagtaataagaaacagttaactgtttcagaaaagagtggggctgcccaaggcaaggcatgttggtaattggtaagctttatagagccaagacctcaacctgattttcttgctttcatgcagttaagccatggtgctcctcttgttatatcacccttttaaacccagagattgatagtattagccatcatttgctgagtgtcatgcactattctaagtgctttacatgtatttgcctaatcagcgccctgtgaagtacatcctgtctccattttgcatataaggataccaaagcacagagttggagggaagatagttatattcccttactttatttatttatttttttgagacagggtctcgcactgtcgcccaggcttgagtgctataagaccttaagtttcccctttcaaagtagtttatagtgtctaaatatcttacataaaagtatatatcaaatagggtggcagtctggaaagatttaaaatccagaatgactggaaggttgggcaactaagatttcttaaattgcagctgttttcaacatagatgtgttgtagagtcttttcggtttcaaaattaaattgactataaatggagtgtgcttaa

SEQ ID NO: 96315 - DNA, 1331 bp, Artificial Sequence
  derived and/or modified sequence
attttgtgttggctggagctggagtaacaagatggcgtcgtccgcggtaaaggcctccgtgttccgtttcctgccgccctcctccgtagccttgcctagtgtaggagccccgaggcctccgtcctcttcccagaggtgtcggggcttggccccagcctccatcttcgtctctcaggatggcgagtagcagcggctccaaggctgaattcattgtcggagggaaatataaactggtacggaagatcgggtctggctccttcggggacatctatttggcgatcaacatcaccaacggcgaggaagtggcagtgaagctagaatctcagaaggccaggcatccccagttgctgtacgagagcaagctctataagattcttcaaggtggggttggcatcccccacatacggtggtatggtcaggaaaaagactacaatgtactagtcatggatcttctgggacctagcctcgaagacctcttcaatttctgttcaagaaggttcacaatgaaaactgtacttatgttagctgaccagatgatcagtagaattgaatatgtgcatacaaagaattttatacacagagacattaaaccagataacttcctaatgggtattgggcgtcactgtaataagttattccttattgattttggtttggccaaaaagtacagagacaacaggacaaggcaacacataccatacagagaagataaaaacctcactggcactgcccgatatgctagcatcaatgcacatcttggtattgagcagagtcgccgagatgacatggaatcattaggatatgttttgatgtattttaatagaaccagcctgccatggcaagggctaaaggctgcaacaaagaaacaaaaatatgaaaagattagtgaaaagaagatgtccacgcctgttgaagttttatgtaaggggtttcctgcagaatttgcgatgtacttaaactattgtcgtgggctacgctttgaggaagccccagattacatgtatctgaggcagctattccgcattcttttcaggaccctgaaccatcaatatgactacacatttgattggacaatgttaaagcagaaagcagcacagcaggcagcctcttccagtgggcagggtcagcaggcccaaacccccacaggtttctaagcatgaattgaggaacagaagaagcagagcagatgatcggagcagcatttgtttctccccaaatctagaaattttagttcatatgtacactagccagtggttgtggacaaccatttacttggtgtaaagaacttaatttcagtataaactgactctgggcagcattggtgatgctgt

SEQ ID NO: 96316 - DNA, 978 bp, Artificial Sequence
  derived and/or modified sequence
atggccagcagcagcggcagcaaggccgagttcatcgtgggcggcaagtacaagctggtgagaaagatcggcagcggcagcttcggcgacatctacctggccatcaacatcaccaacggcgaggaggtggccgtgaagctggagagccagaaggccagacacccccagctgctgtacgagagcaagctgtacaagatcctgcagggcggcgtgggcatcccccacatcagatggtacggccaggagaaggactacaacgtgctggtgatggacctgctgggccccagcctggaggacctgttcaacttctgcagcagaagattcaccatgaagaccgtgctgatgctggccgaccagatgatcagcagaatcgagtacgtgcacaccaagaacttcatccacagagacatcaagcccgacaacttcctgatgggcatcggcagacactgcaacaagctgttcctgatcgacttcggcctggccaagaagtacagagacaacagaaccagacagcacatcccctacagagaggacaagaacctgaccggcaccgccagatacgccagcatcaacgcccacctgggcatcgagcagagcagaagagacgacatggagagcctgggctacgtgctgatgtacttcaacagaaccagcctgccctggcagggcctgaaggccgccaccaagaagcagaagtacgagaagatcagcgagaagaagatgagcacccccgtggaggtgctgtgcaagggcttccccgccgagttcgccatgtacctgaactactgcagaggcctgagattcgaggaggcccccgactacatgtacctgagacagctgttcagaatcctgttcagaaccctgaaccaccagtacgactacaccttcgactggaccatgctgaagcagaaggccgcccagcaggccgccagcagcagcggccagggccagcaggcccagacccccaccggcttctag

SEQ ID NO: 96317 - protein, 337 aa, Artificial Sequence [sequence omitted]

SEQ ID NO: 96318 - DNA, 1014 bp, Artificial Sequence
  derived and/or modified sequence
atgggcaacgacagcgtgagctacgagtacggcgactacagcgacctgagcgacagacccgtggactgcctggacggcgcctgcctggccatcgaccccctgagagtggcccccctgcccctgtacgccgccatcttcctggtgggcgtgcccggcaacgccatggtggcctgggtggccggcaaggtggccagaagaagagtgggcgccacctggctgctgcacctggccgtggccgacctgctgtgctgcctgagcctgcccatcctggccgtgcccatcgccagaggcggccactggccctacggcgccgtgggctgcagagccctgcccagcatcatcctgctgaccatgtacgccagcgtgctgctgctggccgccctgagcgccgacctgtgcttcctggccctgggccccgcctggtggagcaccgtgcagagagcctgcggcgtgcaggtggcctgcggcgccgcctggaccctggccctgctgctgaccgtgcccagcgccatctacagaagactgcaccaggagcacttccccgccagactgcagtgcgtggtggactacggcggcagcagcagcaccgagaacgccgtgaccgccatcagattcctgttcggcttcctgggccccctggtggccgtggccagctgccacagcgccctgctgtgctgggccgccagaagatgcagacccctgggcaccgccatcgtggtgggcttcttcgtgtgctgggccccctaccacctgctgggcctggtgctgaccgtggccgcccccaacagcgccctgctggccagagccctgagagccgagcccctgatcgtgggcctggccctggcccacagctgcctgaaccccatgctgttcctgtacttcggcagagcccagctgagaagaagcctgcccgccgcctgccactgggccctgagagagagccagggccaggacgagagcgtggacagcaagaagagcaccagccacgacctggtgagcgagatggaggtgtag

SEQ ID NO: 96319 - DNA, 1233 bp, Artificial Sequence
  derived and/or modified sequence
agacaccaggagcctgaatggggaacgattctgtcagctacgagtatggggattacagcgacctctcggaccgccctgtggactgcctggatggcgcctgcctggccatcgacccgctgcgcgtggccccgctcccactgtatgccgccatcttcctggtgggggtgccgggcaatgccatggtggcctgggtggctgggaaggtggcccgccggagggtgggtgccacctggttgctccacctggccgtggcggatttgctgtgctgtttgtctctgcccatcctggcagtgcccattgcccgtggaggccactggccgtatggtgcagtgggctgtcgggcgctgccctccatcatcctgctgaccatgtatgccagcgtcctgctcctggcagctctcagtgccgacctctgcttcctggctctcgggcctgcctggtggtctacggttcagcgggcgtgcggggtgcaggtggcctgtggggcagcctggacactggccttgctgctcaccgtgccctccgccatctaccgccggctgcaccaggagcacttcccagcccggctgcagtgtgtggtggactacggcggctcctccagcaccgagaatgcggtgactgccatccggtttctttttggcttcctggggcccctggtggccgtggccagctgccacagtgccctcctgtgctgggcagcccgacgctgccggccgctgggcacagccattgtggtggggttttttgtctgctgggcaccctaccacctgctggggctggtgctcactgtggcggccccgaactccgcactcctggccagggccctgcgggctgaacccctcatcgtgggccttgccctcgctcacagctgcctcaatcccatgctcttcctgtattttgggagggctcaactccgccggtcactgccagctgcctgtcactgggccctgagggagtcccagggccaggacgaaagtgtggacagcaagaaatccaccagccatgacctggtctcggagatggaggtgtaggctggagagacattgtgggtgtgtatcttcttatctcatttcacaagactggcttcaggcatagctggatccaggagctcaatgatgtcttcattttattccttccttcattcaacagatatccatcatgcacttgctatgtgcaaggcctttttaggcactagagatatagcagtgaccaaaacagacacaaatcctgccc

SEQ ID NO: 96320 - DNA, 1287 bp, Artificial Sequence
  derived and/or modified sequence
cctgtgtgccacgtgctggacaaatcttaactcctcaaggactcccaaaaccagagacaccaggagcctgaatggggaacgattctgtcagctacgagtatggggattacagcgacctctcggaccgccctgtggactgcctggatggcgcctgcctggccatcgacccgctgcgcgtggccccgctcccactgtatgccgccatcttcctggtgggggtgccgggcaatgccatggtggcctgggtggctgggaaggtggcccgccggagggtgggtgccacctggttgctccacctggccgtggcggatttgctgtgctgtttgtctctgcccatcctggcagtgcccattgcccgtggaggccactggccgtatggtgcagtgggctgtcgggcgctgccctccatcatcctgctgaccatgtatgccagcgtcctgctcctggcagctctcagtgccgacctctgcttcctggctctcgggcctgcctggtggtctacggttcagcgggcgtgcggggtgcaggtggcctgtggggcagcctggacactggccttgctgctcaccgtgccctccgccatctaccgccggctgcaccaggagcacttcccagcccggctgcagtgtgtggtggactacggcggctcctccagcaccgagaatgcggtgactgccatccggtttctttttggcttcctggggcccctggtggccgtggccagctgccacagtgccctcctgtgctgggcagcccgacgctgccggccgctgggcacagccattgtggtggggttttttgtctgctgggcaccctaccacctgctggggctggtgctcactgtggcggccccgaactccgcactcctggccagggccctgcgggctgaacccctcatcgtgggccttgccctcgctcacagctgcctcaatcccatgctcttcctgtattttgggagggctcaactccgccggtcactgccagctgcctgtcactgggccctgagggagtcccagggccaggacgaaagtgtggacagcaagaaatccaccagccatgacctggtctcggagatggaggtgtaggctggagagacattgtgggtgtgtatcttcttatctcatttcacaagactggcttcaggcatagctggatccaggagctcaatgatgtcttcattttattccttccttcattcaacagatatccatcatgcacttgctatgtgcaaggcctttttaggcactagagatatagcagtgaccaaaacagacacaaatcctgccc

SEQ ID NO: 96321 - DNA, 1014 bp, Artificial Sequence
  derived and/or modified sequence
atgggcaatgattcagtgagctatgaatacggcgactactccgacctatcagacagacccgtggactgcctcgatggagcctgcctggctatcgacccactgagggtggctccgctgcctctctacgcagcaatcttcctcgttggcgttcccggaaacgccatggtggcctgggtcgcaggaaaagttgcccggcgcagggtcggagctacttggctgctccatctggctgtggccgacctcctttgctgtttgagtctgccgatactggcagtgcctatcgcccggggtggccattggccatacggagctgtaggctgcagagcactgccttcaataatccttctcactatgtacgcttccgtgctcctccttgctgctctcagcgctgacctctgcttcctcgcgctcggccctgcctggtggtcaaccgtgcagcgagcatgcggcgtccaagtggcatgcggggcagcttggacccttgccctgctactgaccgtgccatctgcaatctatcgacgattgcaccaggagcacttcccagccaggttacagtgcgtggtcgactatggcgggtcttctagcaccgaaaacgcggtgaccgccattcgctttcttttcggatttctgggtcccttggtggcagtggccagctgtcattccgccctcttgtgctgggccgcaaggaggtgcaggcccctgggcaccgcaattgtggtcggattcttcgtatgctgggccccatatcatctgctcggcttggtactgacagtggcggcacctaactccgctctgctcgcaagggctcttcgagctgaacccctgatagttggcttggccctggcccactcttgcttaaaccccatgctattcctgtatttcgggagggctcagctgcgacgctctttaccagcggcatgccattgggctctgagagagagtcagggccaggacgagtcagtagatagtaagaaatcaacaagccacgacctcgtctcggagatggaagtatag

SEQ ID NO: 96322 - DNA, 1014 bp, Artificial Sequence
  derived and/or modified sequence
atgggcaatgacagtgtgtcctatgaatacggggactactctgacctcagtgatcgtcccgtggattgcctcgatggggcctgcttagccatcgacccactgagggtcgctccgctacctctgtacgctgctatcttcttggtcggtgtgccaggcaacgctatggtagcatgggtagcaggtaaagtggccaggaggagggttggtgctacctggctattgcatttggccgtcgcagacctgctgtgctgcctatctctgccaatactggcggtaccaattgcccggggggggcattggccctatggcgccgtgggctgcagggccttgccaagcattattttactgaccatgtacgccagtgtcctgctgctcgctgcacttagtgctgacctttgtttcctggctctggggcccgcgtggtggtccacagttcaacgggcctgtggcgttcaggtcgcttgcggcgccgcctggactctcgcactgctgttgactgttccctccgccatctatagaaggctgcaccaagagcacttccctgctagactgcagtgtgtcgtcgattatggggggagctcttccacagagaacgcagtgacagctattaggtttctgttcggatttctggggcccctggtagccgtggcctcctgccacagcgcactgctctgttgggccgcaaggaggtgccgtccattaggtactgcaatagtagttgggttctttgtgtgttgggccccctaccacctgctagggctggtactgaccgtcgcagctcccaactccgcactcctagcgcgcgcgctgcgtgcagagccactgatcgttggcctagctcttgcacactcgtgcctgaatccaatgttattcctttatttcggaagagcccaactgaggaggtcgctgcctgctgcttgtcactgggcactgcgtgagtcccaaggccaggacgagtctgtggattcgaagaagtccactagccacgacctcgtgtccgaaatggaagtgtag

SEQ ID NO: 96323 - DNA, 1014 bp, Artificial Sequence
  derived and/or modified sequence
atgggaaatgattctgtgtcctatgaatatggagactacagcgacctgagtgacaggcctgtggactgcctggatggagcctgcctggccatcgaccccctgcgggtggcccccctgcccctgtatgctgccatcttcctggtgggcgtgcctggaaatgccatggtggcctgggtggccggcaaggtggcccggcggcgggtgggcgccacctggctgctgcacctggccgtggccgacctgctgtgctgcctgagcctgcccatcctggccgtgcccatcgcccggggcggccactggccctacggggctgtgggctgccgggccctgcccagcatcatcctgctgaccatgtatgcctctgtgctgctgctggccgccctgtctgctgacctgtgcttcctggccctgggccctgcctggtggagcacagtgcagagggcctgtggggtgcaggtggcctgtggggccgcctggaccctggccctgctgctgactgtgcccagcgccatctacagaaggctgcaccaggagcacttccctgcccggctgcagtgtgtggtggactatggaggcagcagcagcacagaaaatgctgtgacagccatccgcttcctgtttggcttcctgggccccctggtggccgtggccagctgccacagcgccctgctgtgctgggccgcccggcgctgccggcccctgggcacagccatcgtggtgggcttctttgtgtgctgggccccctaccacctgctgggcctggtgctgactgtggccgcccccaacagcgccctgctggcccgggccctgcgggcagagcccctcatcgtgggcctggccctggcccacagctgcctgaaccccatgctgttcctgtacttcggccgggcccagctgcggcgcagcctgcctgctgcctgccactgggccctgcgggagagccagggccaggatgagagcgtggacagcaagaagagcaccagccatgacctggtgtctgagatggaggtgtag

SEQ ID NO: 96324 - DNA, 1014 bp, Artificial Sequence
  derived and/or modified sequence
atgggcaacgacagcgtgagctacgagtacggcgactacagcgacctcagcgaccgacctgtagactgtctagatggggcttgtctggcaatagaccccttaagagtggccccactacccctgtatgccgcaatctttctcgtaggagtgcccggcaacgccatggttgcctgggtggccggaaaggtggcccgacggcgcgtaggtgccacatggctgctgcatctggcagtggccgatctgctgtgttgtctatctctgcccatcctggcggtcccaattgcccgagggggacattggccctatggcgcagtgggttgccgggcactcccttccatcatcttgttgactatgtacgcctctgtgctgttgctcgcggctctcagcgctgacttatgctttttagccctgggcccagcctggtggtctaccgtgcagcgggcttgtggcgtgcaagttgcttgtggggccgcatggactttggccctgctgctcactgtgccatctgccatttatcgaaggctgcatcaggaacatttcccggcccggctccagtgtgtggtcgactacggagggtcatcgagcacggagaatgctgtgacagctatcaggtttcttttcgggttcctgggaccccttgtagccgtggcaagctgccattcggctttactgtgctgggccgcaagacgatgccggccactgggaacagctatcgtcgtcgggttttttgtgtgctgggcgccataccatctgcttggactagtgctgaccgtggccgctccaaatagcgctctcctcgcccgagctctgagggctgagccgctcatcgtgggcctcgcgctggctcactcgtgtttaaatccaatgctgttcctgtacttcgggcgagctcagttgagaagaagtctccccgccgcatgccattgggccctgagggaaagtcagggacaggatgaatccgtggattcaaaaaaaagtacttctcatgacttggtctcggaaatggaggtctag

SEQ ID NO: 96325 - DNA, 1014 bp, Artificial Sequence
  derived and/or modified sequence
atgggcaacgacagcgtgagctacgagtacggcgactacagcgacctgtcggacaggcctgtggattgcctggacggggcctgtctagccatcgaccctctcagagttgcaccgctgccgttgtacgccgcaatatttttggttggtgtgcctggaaacgcgatggttgcctgggtggcgggtaaagttgctagacgaagagtgggtgcaacttggctccttcaccttgcagtggcagacctcctgtgctgcctgagcctccccattctcgcggttcccatagccagaggaggccattggccctatggggcagtaggctgccgggccctgccttctatcatactgttgaccatgtacgcctccgttctgttactggccgctctcagcgccgatctgtgctttctggcactaggcccggcttggtggtccacagtgcaacgggcctgcggagtccaggtggcctgtggagccgcctggacactcgctctgcttctgactgtcccatctgctatttacaggcggttgcaccaagagcattttccagctcgccttcagtgcgtagtcgattatggcggctcctccagcacagagaatgccgtaaccgctatcaggttcctttttggatttctcgggccgctggtggccgtggcctcgtgccactccgcactactgtgttgggctgcccgtcgctgccgcccactgggtaccgctatcgtagtgggctttttcgtgtgttgggcaccctaccatctcctagggctggtgctgacggtcgcagcccccaactccgccttattggcacgtgctttgcgcgctgagcccctcattgtaggactggctctggcacacagctgtttgaatcctatgctattcctgtactttgggagagctcagctccgccggagcctaccggccgcttgtcactgggctctgcgcgaatctcaaggacaggacgagtccgttgactctaaaaagtcaaccagtcatgacctggtatccgaaatggaagtatag

SEQ ID NO: 96326 - DNA, 1014 bp, Artificial Sequence
  derived and/or modified sequence
atggggaatgactcagtcagttacgagtacggggactatagcgacttgtctgatcgccctgtcgattgtcttgacggggcttgtttggctatcgatccattgcgtgttgcacctcttccactctatgcagccatctttcttgttggggtgcccggtaacgcaatggtggcttgggtcgccggaaaagtggcccgaaggagggttggcgctacctggcttctgcacttggctgtggccgatctgctgtgctgcctgtctctgcctatcttagcggtgcccatcgcaagaggcggacattggccttatggtgccgtgggatgtagagctctgcccagcatcatcctgcttactatgtatgcttctgtgctcctgttggccgctctcagtgcagacctgtgtttcctcgctttgggacccgcttggtggtctacagtccaacgcgcatgcggcgtgcaagtagcctgcggagcagcatggactttggcactgctgttaactgtccctagtgcgatatatagacgcctgcaccaggaacattttcctgcccgactccagtgtgtcgttgactacggaggctcttccagtacggaaaacgccgttaccgccatccgctttttgtttgggttccttggcccattagtcgcggtggccagttgtcactccgcactgctgtgctgggccgctagacgatgtaggcctctcggaacagccatcgtggttgggttcttcgtttgctgggccccttaccatctgctcggccttgtgctgaccgtggccgctccgaatagtgccttgctagccagggccctgcgcgctgagcctctgattgtgggcctggctctggcacattcctgcctgaatcctatgctgttcctctatttcggaagggcccagctgagacgctccctgcccgcagcgtgccattgggccctccgagagtcccaaggccaggatgaatcagtcgattcgaagaaatctacatctcacgatctggtgtccgaaatggaagtttag

SEQ ID NO: 96327 - DNA, 1014 bp, Artificial Sequence
  derived and/or modified sequence
atgggaaatgacagtgtcagttacgagtacggcgattattctgacctgagcgaccggcctgtggattgtttggatggagcctgtttggccattgacccgcttagggtcgcaccattgccactttatgctgctattttcttagtgggagtgcctggcaacgcaatggtggcctgggtggcagggaaagttgccaggaggcgggtcggagcaacgtggcttctccacctggctgtggccgacctgctgtgttgcctgtctttgcccatcctggctgtgccgatcgcccgtggagggcactggccatacggagctgtgggttgtcgcgcacttccttctattattctgctgaccatgtatgcgagcgtcctccttttagcagctctatcagccgacttgtgctttctggcactcggcccagcgtggtggtcaactgtgcagcgtgcctgtggcgttcaggttgcttgcggcgctgcctggactctggcgctcctgctgacagtgccttcagcgatctataggcgcttgcaccaggaacattttccagcgagactccagtgcgttgtggactacggtggatcatcctctacagagaacgccgtcaccgccatcagattcctgttcggattcttgggtcccctggtagctgttgctagctgccattccgctcttttgtgttgggctgcccgtagatgtcgccctcttgggacagccattgtggttggcttttttgtatgctgggcaccgtatcatcttctgggactcgtcctcactgtcgcggctccgaactcagcgttgctggccagggctctacgagccgagcctctgatagtaggcctcgcactcgctcactcttgcctgaatcctatgctttttctgtatttcggcagggcacagctgagacggagccttccagccgcatgccactgggccttgagagaaagccaaggacaggacgaaagcgtcgattcaaagaagtcaacaagccacgacctcgtctcagaaatggaagtttag

SEQ ID NO: 96328 - protein, 353 aa, Artificial Sequence
  derived and/or modified sequence
MCKNSQDIICSNAGTCHCGRCKCDNSDGSGLVYGKFCECDDRECIDDETEEICGGHGKCYCGNCYCKAGWHGDKCEFQCDITPWESKRRCTSPDGKICSNRGTCVCGECTCHDVDPTGDWGDIHGDTCECDERDCRAVYDRYSDDFCSGHGQCNCGRCDCKAGWYGKKCEHPQSCTLSAEESIRKCQGSSDLPCSGRGKCECGKCTCYPPGDRRVYGKTCECDDRRCEDLDGVVCGGHGTCSCGRCVCERGWFGKLCQHPRKCNMTEEQSKNLCESADGILCSGKGSCHCGKCICSAEEWYISGEFCDCDDRDCDKHDGLICTGNGICSCGNCECWDGWNGNACEIWLGSEYP

SEQ ID NO: 96329 - DNA, 1062 bp, Artificial Sequence
  derived and/or modified sequence
atgtgtaaaaacagccaggacatcatttgttccaacgccggaacctgtcactgcggccgctgcaaatgcgacaattccgatgggagtggccttgtttacggcaaattttgtgagtgcgatgatcgggaatgcattgacgacgaaacagaggaaatatgtggcggccatggcaagtgttactgtggcaactgctattgtaaggccggatggcacggggacaagtgcgaattccagtgcgatatcaccccgtgggaaagtaaaaggaggtgcacgtcacccgatggcaaaatttgtagcaataggggtacttgcgtatgcggggagtgcacgtgccatgacgtggacccaaccggagattggggggatattcacggtgacacgtgcgagtgcgacgaacgggactgccgcgcagtttacgacagatacagcgatgacttctgttcagggcatggacaatgcaactgcggcaggtgtgattgtaaggccggatggtacggcaaaaagtgcgaacacccccagtcctgcacattatcggcggaggaatccatccgtaaatgccagggttctagcgacctaccatgcagcggaagggggaaatgcgaatgcggcaaatgtacctgttaccctccgggggatagacgcgtgtacggaaaaacatgtgagtgtgatgatcggcgatgcgaggacctggacggtgtggtgtgcggcggacacggcacctgctcttgcggccgctgtgtatgtgagcgtggctggtttggcaagctttgccaacatcctagaaaatgcaatatgactgaggagcaatccaagaatctgtgtgagtctgccgatggaatcctgtgcagtgggaagggatcttgccattgtggtaaatgtatctgctctgcagaagagtggtatatttccggggagttttgcgattgcgatgaccgagattgcgacaaacacgacgggcttatctgtacgggcaatgggatatgctcatgcggcaattgcgagtgctgggatggttggaatgggaacgcatgtgagatctggcttggcagcgaatacccatag

SEQ ID NO: 96330 - DNA, 1062 bp, Artificial Sequence
  derived and/or modified sequence
atgtgcaaaaactcacaagacatcatttgttctaacgcaggcacctgtcactgtggcagatgcaaatgcgacaactctgatgggtctggactggtatatggtaaattttgcgaatgtgacgatcgagaatgcatagacgatgagaccgaggagatctgcggcgggcacgggaaatgttactgcggaaactgttactgcaaggctggctggcacggggacaaatgtgaattccagtgcgacatcacaccctgggagtcaaagaggaggtgtacttcaccggatggcaaaatttgttccaatagaggtacctgtgtatgcggagagtgtacatgccatgacgttgacccaaccggggattggggagacatccatggtgatacctgtgaatgcgacgaaagagactgcagggcagtgtacgatcggtactcagatgacttctgttctggccacggccagtgtaactgtgggcgatgcgactgtaaggccgggtggtacggcaagaagtgcgagcacccacagtcctgcactctcagtgccgaggaatccattcgtaagtgccagggttcttcagacttgccgtgttcaggcagggggaagtgtgagtgcggaaagtgcacgtgttatcccccaggtgatcggagagtctatggtaaaacctgcgagtgcgacgaccggaggtgtgaggatctggacggagtcgtatgtggaggccatggaacatgttcatgtggaagatgcgtgtgtgagagagggtggtttggaaagctgtgtcagcacccccggaaatgcaatatgacggaagaacaaagtaagaatctttgtgaatcagccgacggtatcctgtgtagcggaaagggctcctgtcactgcggtaaatgcatctgtagcgccgaggagtggtacatcagcggcgagttttgtgactgcgatgacagagactgcgataaacacgatggtcttatttgtactggaaatggcatttgttcgtgcggcaattgcgagtgttgggatgggtggaatggaaacgcatgtgaaatatggttgggcagcgaatacccatag

SEQ ID NO: 96331 - DNA, 1062 bp, Artificial Sequence
  derived and/or modified sequence
atgtgcaagaacagccaggacatcatctgcagcaatgccggcacctgccactgcggccgctgcaagtgtgacaacagtgatggcagcggcctggtgtatggcaagttctgtgaatgtgatgacagagaatgtattgatgatgaaacagaggagatctgtggcggccacggcaagtgctactgcggcaactgctactgcaaggccggctggcatggagacaagtgtgagttccagtgtgacatcaccccctgggagagcaagaggcgctgcaccagcccagatggcaagatctgcagcaacagaggcacctgtgtgtgtggggagtgcacctgccatgatgtggaccccactggagactggggagacatccacggggacacctgtgaatgtgatgagcgggactgcagagctgtgtatgaccgctacagtgatgacttctgcagcggccacggccagtgcaactgtggccgctgtgactgcaaggccggctggtacggcaagaagtgtgagcacccccagagctgcaccctgtctgctgaggagagcatcaggaagtgccagggcagcagtgacctgccctgcagcggccggggcaaatgtgaatgtgggaagtgcacctgctacccacctggggacagaagagtgtatggcaagacctgtgaatgtgatgacagaagatgtgaggacctggatggagtggtgtgtggcggccacggcacctgcagctgtggccgctgtgtgtgtgagcggggctggtttgggaagctgtgccagcaccccaggaagtgcaacatgacagaggagcagagcaagaacctgtgtgagagcgcagatggcatcctgtgcagcggcaagggcagctgccactgtgggaagtgcatctgcagcgctgaggagtggtacatctctggagagttctgtgactgtgatgaccgggactgtgacaagcatgatggcctcatctgcacaggaaatggcatctgcagctgtggcaactgtgagtgctgggatggctggaatggaaatgcctgtgagatctggctgggcagcgagtacccctag

SEQ ID NO: 96332 - DNA, 1062 bp, Artificial Sequence
  derived and/or modified sequence
atgtgcaagaacagccaggacatcatctgcagcaacgccggcacctgccattgtggcagatgtaaatgtgataattctgacggatctggacttgtgtacggcaaattttgcgaatgcgatgatagagaatgcatcgatgacgaaaccgaggaaatttgcggtggccacggtaagtgctattgcggcaattgttattgtaaagccgggtggcatggggataaatgcgagtttcaatgcgacatcacaccatgggagtctaaacgcaggtgcacctctcccgacggtaagatctgttccaatcgaggtacatgcgtgtgtggcgagtgtacctgtcatgacgttgacccaaccggcgattggggtgacatccacggagacacatgtgagtgcgacgaaagagactgtcgtgcagtgtacgataggtatagtgacgacttttgcagcggccatgggcagtgtaactgtgggagatgcgactgtaaagcaggttggtatggcaagaagtgcgagcatcctcagtcatgcactctctccgcagaagagtcaatcaggaaatgccagggaagttctgatctgccatgcagcgggcgaggcaaatgcgagtgcgggaaatgcacatgttatcctccgggcgatcgccgggtctacgggaaaacatgcgagtgcgatgaccgtaggtgcgaggaccttgacggggtagtgtgtggggggcacgggacctgcagctgcggacgttgcgtttgtgaacgaggatggtttggcaaactttgtcaacacccaaggaagtgtaacatgacagaggagcagagtaagaatctctgtgaatctgccgatggcattctgtgttctggcaagggtagctgccactgcggaaagtgtatttgcagtgctgaagaatggtatatatctggagaattctgtgactgcgacgatcgcgattgtgacaaacacgatggactgatctgcactggaaacggcatctgcagttgtgggaattgcgaatgctgggacggctggaacggtaacgcgtgtgagatttggctgggttccgagtacccttag

SEQ ID NO: 96333 - DNA, 1062 bp, Artificial Sequence
  derived and/or modified sequence
atgtgcaagaacagccaggacatcatctgcagcaacgccggcacctgccattgtggacgctgtaagtgcgataatagcgatggatccggcctggtgtatggaaagttctgtgaatgcgacgatagggaatgtatcgacgatgaaacagaagagatttgtggaggtcatggtaagtgttattgtggcaactgctactgtaaggctggttggcacggagacaagtgtgagttccagtgcgacataacgccgtgggagagtaagcgacgctgcaccagtcctgacggcaagatctgttcgaatcggggaacttgcgtctgcggggagtgcacatgccacgacgtggaccctaccggtgactggggcgacatacacggcgatacttgtgagtgcgatgagagagactgtagagcagtgtacgaccgttactcagacgatttttgttctggtcacgggcagtgcaactgtggtagatgcgattgcaaagccgggtggtacggtaaaaaatgtgaacatccccagagctgtacacttagcgccgaggaatctataagaaaatgtcagggatcaagcgatcttccctgctccggtagaggcaagtgtgagtgcggaaagtgcacttgttaccctccaggagataggagagtttacggtaagacatgcgagtgtgacgacagacgatgtgaagatctggatggcgttgtctgtggcgggcacggcacatgtagttgtgggcggtgcgtgtgtgagagagggtggttcgggaagctttgccagcacccccggaagtgtaatatgactgaggagcagtcgaagaatctatgcgagtccgccgatggcatactctgctccgggaaagggagctgtcattgtggcaagtgcatttgcagcgcggaagaatggtacatcagcggggaattttgtgattgtgatgacagagattgtgataaacacgatggcctgatatgcaccggtaatgggatttgttcatgtgggaattgtgaatgttgggatggatggaacggcaacgcctgcgaaatttggcttggtagtgagtacccttag

SEQ ID NO: 96334 - DNA, 1062 bp, Artificial Sequence
  derived and/or modified sequence
atgtgcaaaaactctcaggacataatttgctcaaacgccggaacatgtcactgtggcagatgtaaatgtgacaactctgatggaagcggacttgtctacggcaaattctgcgagtgcgacgatcgcgagtgtattgacgatgagactgaagaaatatgcggcggtcacggcaaatgctattgtgggaattgttattgtaaggccggttggcacggggataaatgtgagtttcaatgtgatattaccccgtgggaatcaaagaggcggtgcacgagcccagacgggaagatctgcagtaataggggcacatgtgtatgcggggagtgtacctgtcatgacgtggaccctactggcgactggggtgatatacatggggatacatgcgagtgcgatgaaagggactgcagagctgtttacgaccggtactccgacgacttttgtagcgggcatggtcagtgtaattgcggtcgctgtgattgcaaagcgggatggtacggaaagaagtgtgaacacccacaaagctgcaccctgagtgccgaagagagcattagaaaatgccagggatcaagcgatttaccctgctctggacggggtaagtgcgaatgtggcaaatgtacttgttatcctcccggagataggcgggtctatggaaagacctgcgagtgcgacgatcgcagatgcgaggatctggacggcgtggtgtgtgggggtcatggcacgtgttcctgtgggagatgtgtgtgcgaacgtggctggttcggtaagctgtgccagcatccacgtaaatgtaacatgacagaagaacagagcaagaacctgtgcgagtccgcagatggcatactttgttctggaaagggcagctgccactgtgggaaatgtatctgcagcgccgaggagtggtacatatcaggcgaattttgtgattgtgatgatcgcgattgcgacaagcacgatggcctcatctgtaccgggaatggaatctgcagctgcgggaactgcgagtgttgggacggctggaacgggaacgcctgtgaaatttggctgggctccgaatatccttag

SEQ ID NO: 96335 - DNA, 1062 bp, Artificial Sequence
  derived and/or modified sequence
atgtgcaagaactcccaggatatcatttgcagcaacgccggtacgtgccactgcggtcgctgtaaatgtgacaattccgatggctcggggctggtgtatggaaaattttgtgaatgcgacgaccgagaatgtattgacgacgagactgaggagatttgcggtggtcatgggaagtgctactgtgggaactgctactgtaaggctggttggcatggcgataagtgtgagttccagtgcgacatcacgccatgggaatctaagaggaggtgtaccagcccagacggcaaaatatgtagcaaccggggtacgtgcgtttgcggcgagtgcacctgtcacgacgtggatcccactggtgactggggtgacatccatggggacacatgcgagtgcgatgagagggattgtcgggcagtgtatgaccgttattctgatgatttctgctctggacatgggcagtgtaattgcggcaggtgcgactgtaaggctggatggtatgggaagaaatgcgaacaccctcagtcctgcacattatctgccgaggagtccatccggaagtgtcaagggagttccgatttgccttgctccggccgaggtaaatgtgagtgcggaaagtgcacctgctaccccccaggtgacagacgagtgtacgggaagacttgcgaatgtgatgatcgtcgctgtgaggacctggatggggtggtatgtgggggtcatggcacatgctcatgtggaagatgtgtatgtgagagagggtggttcggtaagttgtgccagcatcccagaaagtgcaatatgacagaagagcaatccaaaaatttgtgcgaatctgcagatggcattctttgctctggcaaggggtcctgccattgtggtaaatgcatctgctctgccgaagagtggtacatcagcggcgagttttgcgattgcgacgaccgggattgcgataagcatgacggactgatctgtaccgggaatggcatctgttcttgcgggaattgcgaatgttgggatggatggaatggtaacgcctgcgaaatctggcttggatccgaatatccatag

SEQ ID NO: 96336 - DNA, 1062 bp, Artificial Sequence
  derived and/or modified sequence
atgtgcaagaacagccaggacatcatctgcagcaacgccggcacctgccactgcggcagatgcaagtgcgacaacagcgacggcagcggcctggtgtacggcaagttctgcgagtgcgacgacagagagtgcatcgacgacgagaccgaggagatctgcggcggccacggcaagtgctactgcggcaactgctactgcaaggccggctggcacggcgacaagtgcgagttccagtgcgacatcaccccctgggagagcaagagaagatgcaccagccccgacggcaagatctgcagcaacagaggcacctgcgtgtgcggcgagtgcacctgccacgacgtggaccccaccggcgactggggcgacatccacggcgacacctgcgagtgcgacgagagagactgcagagccgtgtacgacagatacagcgacgacttctgcagcggccacggccagtgcaactgcggcagatgcgactgcaaggccggctggtacggcaagaagtgcgagcacccccagagctgcaccctgagcgccgaggagagcatcagaaagtgccagggcagcagcgacctgccctgcagcggcagaggcaagtgcgagtgcggcaagtgcacctgctacccccccggcgacagaagagtgtacggcaagacctgcgagtgcgacgacagaagatgcgaggacctggacggcgtggtgtgcggcggccacggcacctgcagctgcggcagatgcgtgtgcgagagaggctggttcggcaagctgtgccagcaccccagaaagtgcaacatgaccgaggagcagagcaagaacctgtgcgagagcgccgacggcatcctgtgcagcggcaagggcagctgccactgcggcaagtgcatctgcagcgccgaggagtggtacatcagcggcgagttctgcgactgcgacgacagagactgcgacaagcacgacggcctgatctgcaccggcaacggcatctgcagctgcggcaactgcgagtgctgggacggctggaacggcaacgcctgcgagatctggctgggcagcgagtacccctag

SEQ ID NO: 96337 - protein, 401 aa, Artificial Sequence
  derived and/or modified sequence
MNLVAVMGAFNKGHGKCDCGKCKCDQGWYGDACQYPTNCDLTKKKSNQMCKNSQDIICSNAGTCHCGRCKCDNSDGSGLVYGKFCECDDRECIDDETEEICGGHGKCYCGNCYCKAGWHGDKCEFQCDITPWESKRRCTSPDGKICSNRGTCVCGECTCHDVDPTGDWGDIHGDTCECDERDCRAVYDRYSDDFCSGHGQCNCGRCDCKAGWYGKKCEHPQSCTLSAEESIRKCQGSSDLPCSGRGKCECGKCTCYPPGDRRVYGKTCECDDRRCEDLDGVVCGGHGTCSCGRCVCERGWFGKLCQHPRKCNMTEEQSKNLCESADGILCSGKGSCHCGKCICSAEEWYISGEFCDCDDRDCDKHDGLICTGNGICSCGNCECWDGWNGNACEIWLGSEYP

SEQ ID NO: 96338 - DNA, 1206 bp, Artificial Sequence
  derived and/or modified sequence
atgaacctcgtcgccgttatgggagcttttaacaaaggtcacggtaagtgtgattgtggcaagtgcaaatgcgaccagggctggtacggagatgcttgccaataccccacaaattgcgatttgacaaagaaaaagtcgaatcagatgtgcaagaactcccaggacataatttgctcaaatgctggtacttgccactgcggacggtgcaaatgcgacaacagcgacggtagtggcctggtgtatgggaaattttgtgagtgcgatgatcgcgagtgcatagacgacgaaactgaggaaatttgtggaggacatggcaaatgttattgcggtaattgctactgcaaagccgggtggcacggggacaaatgtgagtttcagtgtgacatcaccccttgggaatcaaaaaggcgatgcaccagtcctgatggcaagatttgtagtaataggggcacgtgcgtgtgcggcgagtgcacttgccatgacgtggatcccactggcgattggggtgacatccacggcgatacttgtgaatgcgatgagcgggattgcagagctgtttacgaccggtatagcgacgacttctgctcaggacatggtcagtgtaattgcggccgctgtgattgcaaggctggttggtacgggaagaagtgtgaacacccacagtcgtgcaccctatcagctgaggagagtattaggaaatgccaaggtagctccgacctcccctgctctgggcgcggaaagtgcgaatgcggaaagtgtacctgctatcctcctggcgaccggagagtctacggtaaaacgtgtgagtgtgatgatcggcggtgtgaagatcttgatggtgtggtctgcggtggtcacggcacatgcagctgtggcaggtgcgtttgcgaacgcggatggttcggcaaattatgccagcatcctaggaagtgtaatatgacggaagaacagtcgaagaatctgtgcgagagtgccgatggcattctgtgttcgggcaaggggagctgccattgcgggaaatgtatctgctccgcagaggagtggtacatctcaggcgagttctgcgattgtgatgacagggactgtgacaagcacgacggcttgatttgcaccgggaatggtatttgctcctgcgggaattgtgagtgctgggatggctggaacggcaacgcttgcgagatttggctggggagcgagtacccgtag

SEQ ID NO: 96339 - DNA, 1209 bp, Artificial Sequence
  derived and/or modified sequence
atgtcgggctgtgcccgcccaactaccggtgcacccgtccaagctatggtgtccgtcaccggcaaatgtaaatgcgatcagggctggtatggagacgcatgtcagtaccctacaaattgtgatttaactaagaagaaaagcaaccagatgtgtaagaattcacaggacattatctgctccaacgctggaacatgccattgcggtcgctgtaaatgtgacaactccgacggtagcggcctggtctatggtaagttttgcgaatgtgacgatcgggagtgcatagacgatgagaccgaagaaatttgcggcgggcatggcaagtgttactgtggaaactgttattgtaaagccgggtggcatggtgataaatgcgagttccagtgcgatattaccccatgggagtcaaaacgtcgatgcacatcgccagatggcaaaatttgtagcaatcgcggtacttgcgtttgtggagagtgcacctgtcacgatgtcgaccccaccggggactggggcgacattcatggagatacttgcgaatgtgacgagcgcgattgcagagctgtttatgacaggtatagcgatgacttctgttccggtcacgggcagtgtaattgcggccggtgcgactgtaaggctgggtggtacggcaagaaatgcgagcaccctcagtcttgtaccctgagcgcagaggaatcgatccgcaagtgccagggcagctcagaccttccttgctcggggagggggaagtgcgaatgtggcaaatgtacatgttatcctcctggagatcggagggtgtatgggaaaacttgcgaatgcgacgaccggaggtgtgaggacctcgatggagttgtctgcggcggccacggtacatgttcttgcggccgttgcgtgtgtgagaggggctggttcggtaaactctgtcagcatccgcgaaagtgcaatatgaccgaggagcagtctaagaacttgtgtgaaagtgcagatgggatcctgtgcagcggaaaggggagctgccactgtggaaaatgcatatgcagcgccgaggaatggtacatcagcggcgaattttgtgactgtgatgaccgagactgtgacaagcacgatggtctcatttgtaccggcaatggcatctgttcttgtggcaactgcgagtgctgggacggttggaacggcaatgcatgtgagatttggctgggctctgagtatccttag

SEQ ID NO: 96340 - DNA, 1523 bp, Artificial Sequence
  derived and/or modified sequence
aaactttgtctcatgaacttagttgcagtgatgggagcatttaataaaggccatggtaagtgtgactgtggcaagtgcaagtgtgaccagggatggtatggggatgcttgccagtacccaactaactgtgacttgacaaagaagaaaagtaaccaaatgtgcaagaattcacaagacatcatctgctctaatgcaggtacatgtcactgtggcaggtgtaagtgtgataattcagatggaagtggacttgtgtatggtaaattttgtgagtgtgacgatagagaatgcatagacgatgaaacagaagaaatatgtggaggccatgggaagtgttactgtggaaactgctactgcaaggctggttggcatggagataaatgtgaattccagtgcgatatcaccccctgggaaagcaagcgaagatgcacgtctccagatggcaaaatctgcagtaacagagggacttgtgtatgtggtgaatgtacctgtcacgatgttgatccgactggggactggggagatattcatggggacacctgtgaatgtgatgagagggactgtagagctgtctatgaccgatattctgatgacttctgttcaggtcatggacagtgtaattgcggaagatgtgactgcaaagcaggctggtatgggaagaagtgtgagcacccacagtcctgcacgctgtcagctgaggagagcatcaggaagtgccagggaagctcggatctgccttgctctgggaggggtaaatgtgaatgtggcaaatgcacctgctatcctccaggagatcgccgggtgtatggcaagacttgtgagtgtgatgatcgccgctgtgaagacctcgatggtgtggtctgtggaggccacggcacatgttcctgtggtcgctgtgtttgtgagagaggatggtttggaaagctctgccaacatccgcggaagtgtaacatgacggaagaacaaagcaagaatctgtgtgaatcagcagatggcatattgtgctcggggaagggttcttgtcattgtgggaagtgcatttgttctgctgaagagtggtatatttctggggagttctgtgactgtgatgacagagactgcgacaaacatgatggtctcatttgtacagggaatggaatatgtagctgtggaaactgtgaatgctgggatggatggaatggaaatgcatgtgaaatctggcttggctcagaatatccttaacaattacatgagagaggtctggattcttattttttctgggccattagaacagataaatgcgaaggaaaccatgtatattcaccactaggacaggttaaaaagaccattgtatgtttttctatttctgaattacgaatgaaatccgagtacctattagaaatgagttatgcaaatttagatgcaaataacattagaaaaaaaagattcttccataattaacataagtggttcctaacgagagcaatttttccacccaaaagtcatttggcaacatctacagacaattttgattgtcacactgggtc

SEQ ID NO: 96341 - DNA, 1863 bp, Artificial Sequence
  derived and/or modified sequence
atcaacgcaattgcaactccggctggagccccggacctgcaagcctgggtgtccgtgggtccgtctgcccagccatctgctggtggcacctctccctcctgccgcctccctcggtgaaccccaccttgcagaagtgcagctcgcccggagcagcccaggagctcagcatgcgtcccccaggcttcaggaacttcttgctgctggcgtcctcccttctctttgctgggttgtcagctgttcctcaaagcttctcgccatctctgaggccatggtaagtgtgactgtggcaagtgcaagtgtgaccagggatggtatggggatgcttgccagtacccaactaactgtgacttgacaaagaagaaaagtaaccaaatgtgcaagaattcacaagacatcatctgctctaatgcaggtacatgtcactgtggcaggtgtaagtgtgataattcagatggaagtggacttgtgtatggtaaattttgtgagtgtgacgatagagaatgcatagacgatgaaacagaagaaatatgtggaggccatgggaagtgttactgtggaaactgctactgcaaggctggttggcatggagataaatgtgaattccagtgcgatatcaccccctgggaaagcaagcgaagatgcacgtctccagatggcaaaatctgcagtaacagagggacttgtgtatgtggtgaatgtacctgtcacgatgttgatccgactggggactggggagatattcatggggacacctgtgaatgtgatgagagggactgtagagctgtctatgaccgatattctgatgacttctgttcaggtcatggacagtgtaattgcggaagatgtgactgcaaagcaggctggtatgggaagaagtgtgagcacccacagtcctgcacgctgtcagctgaggagagcatcaggaagtgccagggaagctcggatctgccttgctctgggaggggtaaatgtgaatgtggcaaatgcacctgctatcctccaggagatcgccgggtgtatggcaagacttgtgagtgtgatgatcgccgctgtgaagacctcgatggtgtggtctgtggaggccacggcacatgttcctgtggtcgctgtgtttgtgagagaggatggtttggaaagctctgccaacatccgcggaagtgtaacatgacggaagaacaaagcaagaatctgtgtgaatcagcagatggcatattgtgctcggggaagggttcttgtcattgtgggaagtgcatttgttctgctgaagagtggtatatttctggggagttctgtgactgtgatgacagagactgcgacaaacatgatggtctcatttgtacagggaatggaatatgtagctgtggaaactgtgaatgctgggatggatggaatggaaatgcatgtgaaatctggcttggctcagaatatccttaacaattacatgagagagcaattttgatgacgtattcgctgatgcacagacattggaattcattacattatctagccatcgtaatacaaatgacctttggatttctctatcacggcgcttatcctcctattaaggatcagaaagttaaactttacggaccacgtacgtccctgtctcatattcttctttgttggtttctgtttaatactttaaagctgtaaaaaaaatttaaaaaattccttctgagctcccaggccatacaaaagcaacttaagggtggatttggctggcagctgggcagtactttgtcagcctcagctccactggaactgcccttgattctctatagctcatcacaaaacctcaggtatgtcttatttttcttataatcctctgtatgttattatcctttttattaacaacaacaacta

SEQ ID NO: 96342 - DNA, 1206 bp, Artificial Sequence
  derived and/or modified sequence
atgaacctggtggccgtgatgggcgccttcaacaagggccacggcaaatgtgactgtgggaaatgtaaatgtgaccagggctggtatggagatgcctgccagtaccccaccaactgtgacctgaccaagaagaagagcaaccagatgtgcaagaacagccaggacatcatctgcagcaatgccggcacctgccactgcggccgctgcaagtgtgacaacagtgatggcagcggcctggtgtatggcaagttctgtgaatgtgatgacagagaatgtattgatgatgaaacagaggagatctgtggcggccacggcaagtgctactgcggcaactgctactgcaaggccggctggcatggagacaagtgtgagttccagtgtgacatcaccccctgggagagcaagaggcgctgcaccagcccagatggcaagatctgcagcaacagaggcacctgtgtgtgtggggagtgcacctgccatgatgtggaccccactggagactggggagacatccacggggacacctgtgaatgtgatgagcgggactgcagagctgtgtatgaccgctacagtgatgacttctgcagcggccacggccagtgcaactgtggccgctgtgactgcaaggccggctggtacggcaagaagtgtgagcacccccagagctgcaccctgtctgctgaggagagcatcaggaagtgccagggcagcagtgacctgccctgcagcggccggggcaaatgtgaatgtgggaagtgcacctgctacccacctggggacagaagagtgtatggcaagacctgtgaatgtgatgacagaagatgtgaggacctggatggagtggtgtgtggcggccacggcacctgcagctgtggccgctgtgtgtgtgagcggggctggtttgggaagctgtgccagcaccccaggaagtgcaacatgacagaggagcagagcaagaacctgtgtgagagcgcagatggcatcctgtgcagcggcaagggcagctgccactgtgggaagtgcatctgcagcgctgaggagtggtacatctctggagagttctgtgactgtgatgaccgggactgtgacaagcatgatggcctcatctgcacaggaaatggcatctgcagctgtggcaactgtgagtgctgggatggctggaatggaaatgcctgtgagatctggctgggcagcgagtacccctag

SEQ ID NO: 96343 - DNA, 1209 bp, Artificial Sequence
  derived and/or modified sequence
atgagcggctgtgcccggcccaccactggagcccctgtgcaggccatggtgtctgtgacaggcaagtgcaagtgtgaccagggctggtatggagatgcctgccagtaccccaccaactgtgacctgaccaagaagaagagcaaccagatgtgcaagaacagccaggacatcatctgcagcaatgccggcacctgccactgcggccgctgcaagtgtgacaacagtgatggcagcggcctggtgtatggcaagttctgtgaatgtgatgaccgggagtgcattgatgatgaaacagaggagatctgtggcggccacggcaagtgctactgcggcaactgctactgcaaggccggctggcacggggacaagtgtgagttccagtgtgacatcaccccctgggagagcaagaggcgctgcaccagcccagatggcaagatctgcagcaacagaggcacctgtgtgtgtggagaatgtacctgccatgatgtggaccccaccggggactggggagacatccatggagacacctgtgaatgtgatgagcgggactgcagagctgtgtatgaccgctacagtgatgacttctgcagcggccacggccagtgcaactgtggccgctgtgactgcaaggccggctggtacggcaagaagtgtgagcacccccagagctgcaccctgtctgctgaggagagcatcaggaagtgccagggcagcagtgacctgccctgcagcggccggggcaaatgtgaatgtgggaagtgcacctgctacccacctggggaccggcgggtgtatggcaagacctgtgaatgtgatgaccggcgctgtgaggacctggatggagtggtgtgtggcggccacggcacctgcagctgtggccgctgtgtgtgtgagcggggctggtttgggaagctgtgccagcaccccaggaagtgcaacatgacagaggagcagagcaagaacctgtgtgagagcgcagatggcatcctgtgcagcggcaagggcagctgccactgtgggaagtgcatctgcagcgctgaggagtggtacatcagcggggagttctgtgactgtgatgaccgggactgtgacaagcatgatggcctcatctgcacaggaaatggcatctgcagctgtggcaactgtgagtgctgggatggctggaatggaaatgcctgtgagatctggctgggcagcgagtacccctag

SEQ ID NO: 96344 - DNA, 1206 bp, Artificial Sequence
  derived and/or modified sequence
atgaacctggtggccgtgatgggcgccttcaacaagggccacggcaaatgcgactgtggaaaatgtaagtgcgaccaaggatggtacggggatgcctgccagtatcccacgaattgcgatctgacaaaaaagaaatcgaaccagatgtgtaaaaactctcaggacatcatatgttccaacgcagggacgtgtcattgtgggcgctgtaagtgcgacaattctgacggctccggccttgtatacggcaaattctgtgagtgcgatgacagggaatgcatagacgacgagaccgaagaaatctgtggcgggcacggcaaatgctattgtggcaactgctactgcaaggccgggtggcacggtgataagtgcgaattccagtgcgacatcaccccttgggagagtaagaggaggtgtacctccccagatggcaaaatctgttctaaccgcggaacttgcgtatgcggtgagtgcacgtgtcatgacgtggacccaacaggagactggggagatatacacggcgatacttgtgagtgcgacgagagagactgtagagccgtgtatgaccgttactccgacgatttttgctccggccatggacaatgcaactgcgggcgctgcgactgcaaagcgggctggtacgggaagaaatgcgaacacccccagtcctgcactctctcggcggaagaaagcatacgcaagtgtcagggaagttcagatctcccatgctccggacgtggcaaatgtgagtgcggcaaatgtacctgttaccctccaggggacagaagagtctatggtaagacatgtgagtgtgatgaccggaggtgcgaggacctggatggagtcgtgtgtgggggccacggcacctgcagctgtggtaggtgtgtgtgcgaacggggctggttcgggaaactgtgtcagcacccacggaaatgtaatatgacagaggaacagagcaagaacctgtgtgagtctgccgatggcatcctgtgctccggcaaggggtcatgtcactgtgggaaatgtatatgttctgcagaagaatggtatatcagtggcgaattctgcgattgtgacgaccgagactgcgacaagcacgacggccttatctgcacggggaacggtatttgttcatgtggcaactgtgagtgctgggatggttggaacgggaatgcttgtgagatttggctgggttctgaatacccctag

SEQ ID NO: 96345 - DNA, 1209 bp, Artificial Sequence
  derived and/or modified sequence
atgagcggctgcgcccggcccaccaccggcgcccccgtgcaggccatggtctccgtaacgggtaagtgcaagtgtgatcaagggtggtacggagacgcctgtcagtaccccactaactgcgacctgaccaaaaagaaatccaaccaaatgtgtaagaacagtcaggatattatttgtagtaacgccggcacctgccattgcggaaggtgtaagtgcgataacagcgatggatccggactggtctatggtaagttttgcgagtgcgacgacagggagtgtatcgacgatgagaccgaggaaatttgtggaggacatggcaagtgctattgcggtaattgctactgcaaggcgggctggcacggcgacaagtgtgaattccaatgcgatatcaccccctgggaatcaaaacgaagatgcaccagccctgacgggaagatctgttcgaaccggggaacttgcgtttgcggtgagtgcacatgtcatgacgtggacccgactggagactggggcgatatccacggagacacctgtgaatgcgatgagagagattgccgggccgtgtatgaccgctattcggacgacttttgttcaggccacggccagtgcaattgcggacgctgtgactgcaaggctggttggtatggtaagaagtgcgagcatccacaatcctgcaccttgtcggcggaggagtccattagaaagtgtcagggttccagcgacctcccttgctctgggcgtgggaagtgcgaatgtggcaagtgcacttgttatcccccaggggatcgacgggtctatggcaagacgtgtgagtgcgatgaccgccggtgcgaggatctggacggagttgtctgtggcggccacggaacttgctcttgcggcagatgcgtttgcgagcgcgggtggttcggcaaactgtgccagcacccacgcaagtgtaatatgacagaggaacaatctaaaaacctgtgtgagagcgccgatggtatcctgtgcagtggaaagggtagctgccattgcgggaaatgtatctgttcagccgaggagtggtacatatcaggggaattctgcgattgtgatgatagagactgcgacaagcacgacggattgatctgtacaggcaatggcatatgtagttgcgggaactgtgagtgttgggacggttggaatgggaatgcctgtgagatttggctgggctctgagtacccatag

SEQ ID NO: 96346 - DNA, 1206 bp, Artificial Sequence
  derived and/or modified sequence
atgaatctcgtggcggttatgggagctttcaacaagggccacggtaaatgtgattgcgggaaatgtaagtgtgaccagggatggtacggagatgcatgccagtatccaacgaattgcgatcttacaaagaagaagagcaaccagatgtgtaagaactcccaggacatcatctgcagtaatgcgggtacgtgccattgcggccgttgtaaatgtgataactctgatggtagcggcttagtatacggcaaattctgtgaatgcgatgatagagagtgtatcgatgacgagactgaggaaatatgcggtgggcacggaaagtgctactgcggtaattgctactgcaaagcaggttggcacggcgacaagtgcgagttccagtgcgatattacaccatgggagagcaagagaagatgtacctccccggacgggaagatctgtagtaataggggcacatgtgtgtgcggcgaatgcacctgtcatgacgtggaccctactggcgattggggtgacattcacggcgatacgtgtgaatgtgatgagcgcgactgtcgggctgtgtatgacaggtactctgatgacttctgttccggtcacggacagtgtaactgtggacgatgcgattgcaaagctgggtggtatggcaagaaatgcgaacacccccagtcgtgtacattgagcgccgaggagagtatccgtaagtgtcaggggtcaagcgacctcccttgttccggtcggggaaaatgcgagtgcggaaaatgtacctgctacccccctggggacaggcgagtttacggaaaaacatgtgagtgcgatgatcggaggtgtgaggatctggatggggtggtgtgtggtggccacgggacctgtagttgcgggaggtgtgtatgcgaaaggggttggttcgggaaattatgccaacatccgcgtaaatgcaacatgactgaagagcagagtaaaaacttgtgtgaatctgctgacgggatcttgtgtagcgggaaagggtcatgccactgtggtaagtgcatatgtagtgccgaagaatggtatatcagcggggaattttgtgattgtgatgacagagactgcgacaagcacgatggcttgatttgtacagggaatgggatttgttcttgtgggaactgcgaatgttgggacggatggaatggcaatgcatgtgagatatggcttggcagcgaatacccttag

SEQ ID NO: 96347 - DNA, 1209 bp, Artificial Sequence
  derived and/or modified sequence
atgagtggatgtgcgaggccgactactggcgctccggtgcaggctatggtctcagttactggcaaatgcaaatgtgaccagggctggtacggagacgcttgtcaatacccaacgaactgcgatctgacaaagaaaaagtctaaccagatgtgtaagaatagccaagatatcatatgctccaacgccggtacatgccattgcggacgttgtaagtgtgacaatagcgatgggagcgggctagtatatggcaagttctgcgagtgtgatgaccgcgagtgtatcgacgacgagacagaggaaatttgcggaggacacggaaagtgctattgtggaaattgctattgcaaggccggatggcatggtgacaagtgcgaattccagtgcgatattaccccctgggagtccaaacgaaggtgcaccagccccgacgggaagatatgttctaaccgcggtacgtgcgtctgcggcgaatgtacctgtcacgatgttgatccgacaggagattggggcgacatccacggcgatacctgtgaatgtgacgagagagattgtcgagctgtttacgaccgatacagcgatgacttctgttccgggcacggacagtgtaactgcggacgatgtgactgcaaggcgggttggtacgggaaaaaatgtgagcacccgcagagttgcaccctgagtgcagaagagagcatcagaaagtgccagggcagctccgacttaccttgcagcggccgtggtaaatgtgagtgcggtaagtgtacctgttaccccccaggtgacaggcgtgtctacggaaagacttgtgagtgtgacgacagacggtgcgaagacctggacggggtggtgtgcggcggacacggcacctgctcctgtggtcgatgtgtgtgcgagagaggctggttcggcaagctgtgccagcacccaaggaaatgtaacatgacagaagagcaaagtaaaaatctttgcgaatccgcggatggcatcttgtgttctggtaaaggctcttgccactgcggaaagtgcatctgtagcgcagaggagtggtacatctccggcgaattttgcgattgtgatgaccgcgactgtgataaacacgatggcctgatctgtaccggtaacgggatttgtagctgtgggaattgtgagtgctgggatgggtggaacggcaatgcctgcgaaatctggctggggtctgaatacccatag

SEQ ID NO: 96348 - DNA, 1206 bp, Artificial Sequence
  derived and/or modified sequence
atgaacctggtggccgtgatgggcgccttcaacaagggccacggcaagtgcgactgcggcaagtgcaagtgcgaccagggctggtacggcgacgcctgccagtaccccaccaactgcgacctgaccaagaagaagagcaaccagatgtgcaagaacagccaggacatcatctgcagcaacgccggcacctgccactgcggcagatgcaagtgcgacaacagcgacggcagcggcctggtgtacggcaagttctgcgagtgcgacgacagagagtgcatcgacgacgagaccgaggagatctgcggcggccacggcaagtgctactgcggcaactgctactgcaaggccggctggcacggcgacaagtgcgagttccagtgcgacatcaccccctgggagagcaagagaagatgcaccagccccgacggcaagatctgcagcaacagaggcacctgcgtgtgcggcgagtgcacctgccacgacgtggaccccaccggcgactggggcgacatccacggcgacacctgcgagtgcgacgagagagactgcagagccgtgtacgacagatacagcgacgacttctgcagcggccacggccagtgcaactgcggcagatgcgactgcaaggccggctggtacggcaagaagtgcgagcacccccagagctgcaccctgagcgccgaggagagcatcagaaagtgccagggcagcagcgacctgccctgcagcggcagaggcaagtgcgagtgcggcaagtgcacctgctacccccccggcgacagaagagtgtacggcaagacctgcgagtgcgacgacagaagatgcgaggacctggacggcgtggtgtgcggcggccacggcacctgcagctgcggcagatgcgtgtgcgagagaggctggttcggcaagctgtgccagcaccccagaaagtgcaacatgaccgaggagcagagcaagaacctgtgcgagagcgccgacggcatcctgtgcagcggcaagggcagctgccactgcggcaagtgcatctgcagcgccgaggagtggtacatcagcggcgagttctgcgactgcgacgacagagactgcgacaagcacgacggcctgatctgcaccggcaacggcatctgcagctgcggcaactgcgagtgctgggacggctggaacggcaacgcctgcgagatctggctgggcagcgagtacccctag

SEQ ID NO: 96349 - DNA, 1209 bp, Artificial Sequence
  derived and/or modified sequence
atgagcggctgcgccagacccaccaccggcgcccccgtgcaggccatggtgagcgtgaccggcaagtgcaagtgcgaccagggctggtacggcgacgcctgccagtaccccaccaactgcgacctgaccaagaagaagagcaaccagatgtgcaagaacagccaggacatcatctgcagcaacgccggcacctgccactgcggcagatgcaagtgcgacaacagcgacggcagcggcctggtgtacggcaagttctgcgagtgcgacgacagagagtgcatcgacgacgagaccgaggagatctgcggcggccacggcaagtgctactgcggcaactgctactgcaaggccggctggcacggcgacaagtgcgagttccagtgcgacatcaccccctgggagagcaagagaagatgcaccagccccgacggcaagatctgcagcaacagaggcacctgcgtgtgcggcgagtgcacctgccacgacgtggaccccaccggcgactggggcgacatccacggcgacacctgcgagtgcgacgagagagactgcagagccgtgtacgacagatacagcgacgacttctgcagcggccacggccagtgcaactgcggcagatgcgactgcaaggccggctggtacggcaagaagtgcgagcacccccagagctgcaccctgagcgccgaggagagcatcagaaagtgccagggcagcagcgacctgccctgcagcggcagaggcaagtgcgagtgcggcaagtgcacctgctacccccccggcgacagaagagtgtacggcaagacctgcgagtgcgacgacagaagatgcgaggacctggacggcgtggtgtgcggcggccacggcacctgcagctgcggcagatgcgtgtgcgagagaggctggttcggcaagctgtgccagcaccccagaaagtgcaacatgaccgaggagcagagcaagaacctgtgcgagagcgccgacggcatcctgtgcagcggcaagggcagctgccactgcggcaagtgcatctgcagcgccgaggagtggtacatcagcggcgagttctgcgactgcgacgacagagactgcgacaagcacgacggcctgatctgcaccggcaacggcatctgcagctgcggcaactgcgagtgctgggacggctggaacggcaacgcctgcgagatctggctgggcagcgagtacccctag

SEQ ID NO: 96350 - protein, 493 aa, Artificial Sequence
  derived and/or modified sequence
MILNSLSLCYHNKLILAPMVRVGTLPMRLLALDYGADIVYCEELIDLKMIQCKRVVNEVLSTVDFVAPDDRVVFRTCEREQNRVVFQMGTSDAERALAVARLVENDVAGIDVNMGCPKQYSTKGGMGAALLSDPDKIEKILSTLVKGTRRPVTCKIRILPSLEDTLSLVKRIERTGIAAIAVHGRKREERPQHPVSCEVIKAIADTLSIPVIANGGSHDHIQQYSDIEDFRQATAASSVMVARAAMWNPSIFLKEGLRPLEEVMQKYIRYAVQYDNHYTNTKYCLCQMLREQLESPQGRLLHAAQSSREICEAFGLGAFYEETTQELDAQQARLSAKTSEQTGEPAEDTSGVIKMAVKFDRRAYPAQITPKMCLLEWCRREKLAQPVYETVQRPLDRLFSSIVTVAEQKYQSTLWDKSKKLAEQAAAIVCLRSQGLPEGRLGEESPSLHKRKREAPDQDPGGPRAQELAQPGDLCKKPFVALGSGEESPLEGW

SEQ ID NO: 96351 - DNA, 1482 bp, Artificial Sequence
  derived and/or modified sequence
atgatcctgaacagcctgtctctgtgctaccataacaagcttattcttgctccaatggtgcgcgtaggcaccctgccgatgcgcttgttagcattggattacggcgcagacatagtatattgtgaggaacttatcgacttaaagatgatccagtgtaaaagggtcgtcaatgaggtgctgtccaccgttgatttcgttgcacctgacgatagagtagtgttccggacctgcgaaagagagcagaatcgcgtggtgttccaaatgggcacctcggacgcagaacgggcgctcgcggttgcaaggctcgtagagaatgatgtcgcggggattgatgtaaatatggggtgcccaaagcaatattcaactaaaggtggcatgggtgctgcacttctcagcgatcctgataagatcgaaaaaatactcagtacactagtgaagggcacacgccggcctgtgacttgtaagatccgaatattaccgtcactggaagacaccttgagtctcgtgaagaggattgagagaactgggatcgcagccatagcagttcacggaagaaagagagaggaaagacctcagcatcccgtttcatgcgaggtcatcaaggccatcgcagataccttatccattccagtcattgccaatggtggttcccatgatcacatccaacaatactcggacatcgaagacttccgccaagccaccgcagccagtagtgtgatggttgcacgcgcggcaatgtggaacccaagcatcttcctgaaggagggattgaggccactcgaggaagtgatgcagaaatatatacggtacgctgtgcagtatgacaaccattacacgaacaccaaatattgtctctgtcagatgctccgcgagcaattggaatctccccaggggaggctgctccatgcggctcagagctcacgcgaaatatgcgaagcattcggacttggagctttttacgaagaaacaacgcaggaactggacgctcaacaggccagactatcagctaagactagtgagcaaaccggggagcccgcagaggacacctctggggtcattaaaatggccgtaaagttcgatagaagagcctatcccgcccagataacaccaaagatgtgtctccttgaatggtgtcgtcgtgagaagctcgcccagccagtgtacgaaacggtgcagcgacccttggatcgactatttagttccatcgttacagtggccgaacagaaataccagtccaccttgtgggacaagtcaaagaagctggccgagcaagctgccgccatcgtctgtcttagatcccagggtctgccagagggccgcctcggggaagagtccccctcactgcacaagcgcaaaagggaggcccctgaccaggatccgggcggcccgcgggcacaggaacttgcacaacccggagacttgtgtaaaaagcctttcgtggccttagggagtggtgaggagtcccctctggagggctggtag

SEQ ID NO: 96352 - DNA, 1482 bp, Artificial Sequence
  derived and/or modified sequence
atgatcctcaattcactgtcgctgtgctaccacaataagttgatcctggcgcctatggtgcgggttggaaccctccctatgcgcctattggcgctagattatggcgctgatattgtgtactgcgaagagcttattgatttaaaaatgattcagtgtaagcgcgtagttaacgaggtactgagtacagttgatttcgtggctccagacgacagggtggtctttaggacctgcgaaagagagcagaacagggtggtgtttcaaatgggtaccagcgacgccgaacgagccttggcagtggcacgacttgtggagaatgatgtggccggcattgatgtgaacatgggctgccctaaacagtacagtaccaagggaggcatgggggcagctctgctctccgatcctgacaagatagaaaagattctcagcactttggtcaagggaacccggagaccagtgacctgcaagattcggatactgcctagcctggaggacactctgagcctggtcaaacgcattgagcggaccggtatagccgcgatcgctgtgcacggcaggaaacgcgaagagaggcctcagcaccccgtgtcctgtgaggtcatcaaggctattgcagacactctcagcataccagttatcgccaatggcggttcacacgatcacattcagcagtatagcgacatcgaggattttcggcaggctacagctgcttcctcggtgatggttgcccgcgctgctatgtggaatccttcgatttttctgaaggaagggctccgccccctggaagaggttatgcagaaatatattcgctacgccgtgcagtacgacaaccactatactaacaccaaatattgtttgtgtcagatgttgcgcgaacaacttgaatctcctcaaggccggctgctccacgctgcacaaagctcacgggagatctgtgaagcattcggattgggagccttctacgaggaaaccacacaggagctggacgcacagcaggcccggctgtcggccaagaccagcgagcagacaggtgaacccgctgaggacaccagcggtgtgataaagatggcggttaagtttgatcggcgagcatatcctgcccagattacaccgaaaatgtgccttcttgagtggtgtcgtcgggaaaagctggcacaacccgtttacgaaaccgtgcaacggcccctggaccgcctcttttcctccatcgtaacagtcgccgagcagaaataccaatcgaccctctgggacaagtcaaaaaaacttgccgaacaggcagcagccattgtatgccttaggagccagggactcccggagggacggctcggcgaagagtccccttctctgcacaaaaggaagagagaagcacccgaccaggatcccggagggcctagggctcaggagctggctcagccgggggacttatgcaagaaaccttttgtggcactgggcagtggggaggagtcccctctagaagggtggtag

SEQ ID NO: 96353 - DNA, 1482 bp, Artificial Sequence
  derived and/or modified sequence
atgatcctgaacagcctgagcctgtgctaccacaacaagctgatcctggcccccatggtgcgggtgggcaccctgcccatgaggctgctggccctggactatggagctgacatcgtgtactgtgaggagctgattgacctgaagatgatccagtgcaagagggtggtgaatgaggtgctgagcacagtggactttgtggccccagatgacagagtggtgttccgcacctgtgagcgggagcagaacagagtggtgttccagatgggcaccagtgatgctgagcgggccctggccgtggcccggctggtggagaatgatgtggccggcattgatgtgaacatgggctgccccaagcagtacagcaccaagggcggcatgggcgccgccctgctgagtgaccctgacaagattgagaagatcctgagcaccctggtgaagggcaccaggaggcctgtgacctgcaagatccgcatcctgcccagcctggaggacaccctgagcctggtgaagagaattgaaagaactggaattgctgccatcgctgtgcacggcaggaagcgggaggagcggccccagcaccctgtgtcctgtgaggtgatcaaggccatcgctgacaccctgagcatccctgtgattgccaacggcggcagccatgaccacatccagcagtacagcgacatcgaggacttccggcaggccacagctgccagctctgtgatggtggcccgggccgccatgtggaaccccagcatcttcctgaaggagggcctgcggcccctggaggaggtgatgcagaagtacatccgctatgctgtgcagtatgacaaccactacaccaacaccaagtactgcctgtgccagatgctgcgggagcagctggagagcccccagggccgcctgctgcatgctgcccagagcagccgggagatctgtgaggccttcggcctgggcgccttctatgaggagaccacccaggagctggatgcccagcaggcccggctgagcgccaagaccagcgagcagacaggagagcctgctgaggacaccagcggggtcatcaagatggctgtgaagtttgacagaagagcctacccagcccagatcacccccaagatgtgcctgctggagtggtgcagaagagagaagctggcccagcctgtgtatgagaccgtgcagaggcccctggacaggctcttcagcagcatcgtgacagtggccgagcagaagtaccagagcaccctgtgggacaagagcaagaagctggccgagcaggccgccgccatcgtgtgcctgcggagccagggcctgcctgagggccgcctgggggaggagagccccagcctgcacaagaggaagcgggaggccccagaccaggaccccggcggcccccgggcccaggagctggcccagcccggggacctgtgcaagaagccctttgtggccctgggcagcggggaggagagccccctggagggctggtag

SEQ ID NO: 96354 - DNA, 1482 bp, Artificial Sequence
  derived and/or modified sequence
atgatcctgaacagcctgagcctgtgctaccacaacaagctgatcttggcccccatggttcgggtggggacccttccgatgcgactgctggcactggattacggggccgatattgtatattgcgaggagctgattgaccttaagatgatccagtgtaagagagttgttaacgaagttctgagcactgttgattttgtggcgcccgatgacagagtggtgttccgaacgtgcgaacgcgaacagaacagggtagtgttccagatgggaaccagtgacgctgagcgagcactcgccgtcgcccggctcgtcgagaacgacgttgctggtattgatgtgaatatggggtgccccaaacaatatagtactaaaggtggcatgggcgcagcactgctttctgatcccgacaagatcgagaaaattctgtccactttggtgaagggaactcggagacccgtgacatgcaagattagaatacttccttctctggaggacacactgagccttgttaagcggatagagaggaccggaatagctgctatagcagttcatggtagaaagcgggaggagcgaccccagcatccagtatcttgtgaagtaatcaaggccatcgctgacactctgtccatcccagtgatcgccaacggaggcagccatgatcatattcaacagtactccgatattgaagacttcagacaagcaaccgcggcttccagtgtgatggttgcccgagcagcgatgtggaacccaagcattttcttaaaagaagggctaagacccctggaggaggtgatgcagaaatacatccggtatgccgtacaatatgacaatcactataccaatacaaaatactgcctatgtcagatgttacgagagcagttggagtctcctcagggccgtctgctccatgccgcacaatcctcccgagaaatctgtgaagctttcggtcttggggcgttctacgaggagaccacccaagaactagacgcccagcaggcacgcttgagcgcaaagaccagcgagcaaaccggcgagcccgcagaagacacaagcggcgtaattaagatggccgttaaattcgacaggcgagcttaccccgctcagatcactccaaaaatgtgcctgcttgaatggtgtagacgcgagaagcttgcccagcctgtgtatgaaaccgtacagaggcctttagataggctcttctcttccatcgtcacggtggctgagcagaagtatcaaagcacgctgtgggacaagagcaagaagctcgcagagcaggcagcagcaattgtgtgcctgcgttcacagggcttgccagagggccgactgggagaagagagcccgagcctccataagcgcaagagagaagctccggaccaggatccaggcggacctagagcccaagaactcgctcagcctggcgatttatgtaagaaaccttttgtcgcactgggcagcggggaggagagccccctcgaaggatggtag

SEQ ID NO: 96355 - DNA, 1482 bp, Artificial Sequence
  derived and/or modified sequence
atgatcctgaacagcctgagcctgtgctaccacaacaagctgatcctggctcctatggtgagggttggcaccctgcctatgcgactgttggctttagactacggagcggacattgtttactgtgaggagctcatagatctgaagatgatccagtgtaaaagagttgtaaacgaggtgctgagtaccgtggatttcgtggctccagatgaccgagtcgtatttagaacctgcgaaagggagcagaatcgagttgtctttcagatgggaacatcagatgccgagcgtgctctggccgtggcgagactcgttgaaaacgatgtagctgggatcgatgtcaatatgggctgccccaagcaatactccaccaaaggcggtatgggagctgcactgctctctgatcctgacaaaattgaaaaaattctctctacactggttaaggggacccgcagaccagtgacatgtaagattcgtattcttccgagcctcgaagacactctgagcctagtgaaacgcatagagcggacaggcattgctgcaatcgcggtgcacggtcggaagagggaggagaggccccagcacccggtttcttgcgaggtgatcaaggcgattgccgacacgctgtctatccccgtgattgccaacggcggctcacacgaccacattcagcaatacagcgacatcgaggacttccggcaggctacagccgcctcgtcggtcatggttgctagggccgccatgtggaacccttcaatttttctaaaagagggcctgcgccccctggaggaagtaatgcagaagtacatccggtacgcagtacagtacgataaccattataccaacacaaaatattgtctgtgtcaaatgcttcgggagcaattagagtcgcctcagggaagactgctacacgcagcacaaagcagcagggaaatctgcgaagcatttggcctgggagctttctatgaggaaactacacaggagttagatgctcagcaggcccgactgtccgccaaaacttcagaacagaccggcgaacctgccgaagatacctccggcgtgatcaaaatggccgtgaagttcgatagaagggcctaccccgcccagatcacacccaagatgtgcttgttggagtggtgccggcgcgaaaagctggcacagcccgtgtacgagaccgtacagcggccactcgatcgcctgttctctagcatcgtgactgtggctgagcagaaataccaatctacattgtgggataagtccaaaaagttagccgagcaagcggccgccatcgtttgtctcagatcccaaggactccccgagggacgcctcggcgaggagtctccatccctgcacaaacggaagcgcgaagctcccgaccaagatcctgggggaccaagagcacaggaactcgcccagcccggcgacttgtgcaagaaaccattcgtggccctgggttctggagaggagagcccactggaagggtggtag

SEQ ID NO: 96356 - DNA, 1482 bp, Artificial Sequence
  derived and/or modified sequence
atgattctcaattctctgtccttatgttaccacaacaagctgatcctagctccaatggtgcgggttggaaccctgccaatgaggctactcgccctggattacggcgcagacatcgtctactgcgaagagcttatagacctgaagatgattcagtgtaaacgcgttgtgaacgaagtattgagcaccgtggatttcgtggccccagatgaccgcgtcgtgttcagaacttgtgaacgggagcagaaccgagtcgtctttcaaatgggtacttctgatgccgagagagcactcgcagtggccaggctggttgagaatgacgtcgcaggaattgatgttaatatggggtgtcctaaacagtattctactaaaggagggatgggcgcagctctcctgagtgatccagataaaatcgagaagatcctctctaccctcgttaagggcactcgcagacccgtgacctgtaagattaggatcctgcccagcctggaggacacattgtctctcgttaagcggattgaaagaactgggatcgctgccattgccgtccacgggaggaagcgggaggagcgccctcagcaccccgtgtcatgcgaagtaatcaaagcaattgcagacactctctccattccggtaatcgctaacggcggttcccacgatcacattcaacagtactcggatattgaagacttcaggcaggccaccgctgcttcctctgtgatggtcgcacgtgcagccatgtggaatccctctatattcttgaaggaggggctgcgaccactagaggaggttatgcagaagtatatacgatatgcggtgcagtatgacaatcactacaccaataccaagtactgcctgtgccaaatgctgagggaacaactggagagcccacagggaagactgcttcacgcagcgcagagtagcagagagatatgcgaagcatttgggctcggcgctttctatgaagagactacccaggagcttgatgcccagcaagctcgtctgagcgccaagaccagcgagcagaccggggagccagcagaggataccagcggagtgataaagatggcagtcaagtttgaccgtagggcctaccccgctcaaattaccccgaaaatgtgcctgttagaatggtgtagaagagagaaactggcacagcccgtctatgaaacggttcagagacccctcgatcgactcttctcttctatcgtcacagtcgccgaacagaagtaccagtcgaccttgtgggacaaaagcaagaaactcgcggagcaggccgcagcgattgtatgcctgcgaagtcagggactccccgaagggagattgggggaggaatctccctctctgcacaagcggaaaagggaagcccctgatcaggaccccggaggaccccgagctcaggagctcgcccaacccggagacctgtgcaaaaaacctttcgtcgccctgggctcaggagaggagtcccccttggagggctggtag

SEQ ID NO: 96357 - DNA, 1482 bp, Artificial Sequence
  derived and/or modified sequence
atgatcctaaattcactcagtctgtgttaccacaataagctgatcttggcaccaatggtcagggtgggcaccctgcccatgaggctgttggctctggactacggggctgatatcgtctactgtgaggaactcatagatctgaaaatgatccaatgtaagcgagtggtgaacgaggtcctatctacagtagattttgtggccccagacgaccgagtcgtatttcgtacatgcgagagggagcagaaccgggtcgtttttcagatggggacaagcgacgcagagcgtgccctggctgtggcaagattggtcgaaaatgatgtggcaggcatcgatgtgaatatggggtgcccaaaacagtatagcactaaaggcggtatgggggcagcactgctttccgatcccgacaagattgaaaagatcttaagcaccctggtgaaaggaaccaggcggccagttacatgcaagatccgaattctaccaagcctagaagatactctttccctggttaaacggatcgaaagaaccggcatcgccgcaattgcagtacacgggagaaaaagagaggaaagacctcagcatcccgtgtcctgcgaggtgataaaggctatcgctgacaccctcagcatccccgttatcgccaatgggggaagccacgatcatattcagcagtatagcgatatagaggatttcaggcaggctacggcagctagttccgttatggtcgctagagccgcaatgtggaatccatccattttcctgaaggaaggtctgcggccactggaggaagtgatgcagaagtacatccgctacgctgtgcagtatgataaccactacacaaacaccaagtactgtctatgtcaaatgctgagggaacagctggaatctccgcagggacggctcctccatgccgctcagtcttctcgggagatttgcgaggcattcggcctgggagccttctatgaggagacgactcaggaactcgatgcgcagcaggcacgactgtccgcaaaaacctccgagcagacgggcgaacccgctgaggacacgtccggcgtaattaaaatggccgttaagtttgaccggagggcctacccagcacagattacccctaagatgtgtctccttgaatggtgtagaagggaaaaacttgcgcagcccgtatatgagacagttcagaggcctctggatagactgtttagtagtatcgttaccgttgcggaacagaaataccaatcaactctttgggacaagtcaaagaaattagccgagcaagctgccgctatcgtatgcttaaggtctcaaggcttgcctgagggacgattgggagaggagagccccagtctgcataaacggaaacgggaggctcctgatcaagacccaggagggcctcgtgctcaggagttggctcagccaggcgacctgtgcaaaaaaccttttgtggctctcgggtctggggaagaatccccactggagggctggtag

SEQ ID NO: 96358 - DNA, 1482 bp, Artificial Sequence
  derived and/or modified sequence
atgatcctgaacagcctgagcctgtgctaccacaacaagctgatcctggcccccatggtgagagtgggcaccctgcccatgagactgctggccctggactacggcgccgacatcgtgtactgcgaggagctgatcgacctgaagatgatccagtgcaagagagtggtgaacgaggtgctgagcaccgtggacttcgtggcccccgacgacagagtggtgttcagaacctgcgagagagagcagaacagagtggtgttccagatgggcaccagcgacgccgagagagccctggccgtggccagactggtggagaacgacgtggccggcatcgacgtgaacatgggctgccccaagcagtacagcaccaagggcggcatgggcgccgccctgctgagcgaccccgacaagatcgagaagatcctgagcaccctggtgaagggcaccagaagacccgtgacctgcaagatcagaatcctgcccagcctggaggacaccctgagcctggtgaagagaatcgagagaaccggcatcgccgccatcgccgtgcacggcagaaagagagaggagagaccccagcaccccgtgagctgcgaggtgatcaaggccatcgccgacaccctgagcatccccgtgatcgccaacggcggcagccacgaccacatccagcagtacagcgacatcgaggacttcagacaggccaccgccgccagcagcgtgatggtggccagagccgccatgtggaaccccagcatcttcctgaaggagggcctgagacccctggaggaggtgatgcagaagtacatcagatacgccgtgcagtacgacaaccactacaccaacaccaagtactgcctgtgccagatgctgagagagcagctggagagcccccagggcagactgctgcacgccgcccagagcagcagagagatctgcgaggccttcggcctgggcgccttctacgaggagaccacccaggagctggacgcccagcaggccagactgagcgccaagaccagcgagcagaccggcgagcccgccgaggacaccagcggcgtgatcaagatggccgtgaagttcgacagaagagcctaccccgcccagatcacccccaagatgtgcctgctggagtggtgcagaagagagaagctggcccagcccgtgtacgagaccgtgcagagacccctggacagactgttcagcagcatcgtgaccgtggccgagcagaagtaccagagcaccctgtgggacaagagcaagaagctggccgagcaggccgccgccatcgtgtgcctgagaagccagggcctgcccgagggcagactgggcgaggagagccccagcctgcacaagagaaagagagaggcccccgaccaggaccccggcggccccagagcccaggagctggcccagcccggcgacctgtgcaagaagcccttcgtggccctgggcagcggcgaggagagccccctggagggctggtag

SEQ ID NO: 96359 - DNA, 2310 bp, Artificial Sequence
  derived and/or modified sequence
tgaggcgcgccggctggttcaactccggccgccgcgccgaaaccagcagcggtccgggtcgaaccagcaccggcctcgggaggttccgccgcctgctctgccgctgttccaactgccgctgtagagccactgggatgcgcaccaccggcaggggttcgtcgggactgcggaccgtgaggccccgtcgcggcgccaggagcaaccgagtcacgagggaaaagagccgcaccggccgcgttagagccatgtttcccttagtgcgggagaagcgcacatcagtgacgtcacggacgcgccgcgacctcgcgtacggtggctggcgaggctcagtacggtgtgtggagctggagcaccgtgaggaagaagcgaggttctttttaagagttcagctgcgagatatcaaacaaagaattactctgtacaaagccagaacacatatatcaaagtaatcctgaagtatcagaacaaaataataggctgtaacagaggaggaaatgattttgaatagcctctctctgtgttaccataataagctaatcctggccccaatggttcgggtagggactcttccaatgaggctgctggccctggattatggagcggacattgtttactgtgaggagctgatcgacctcaagatgattcagtgcaagagagttgttaatgaggtgctcagcacagtggactttgtcgcccctgatgatcgagttgtcttccgcacctgtgaaagagagcagaacagggtggtcttccagatggggacttcagacgcagagcgagcccttgctgtggccaggcttgtagaaaatgatgtggctggtattgatgtcaacatgggctgtccaaaacaatattccaccaagggaggaatgggagctgccctgctgtcagaccctgacaagattgagaagatcctcagcactcttgttaaagggacacgcagacctgtgacctgcaagattcgcatcctgccatcgctagaagataccctgagccttgtgaagcggatagagaggactggcattgctgccatcgcagttcatgggaggaagcgggaggagcgacctcagcatcctgtcagctgtgaagtcatcaaagccattgctgataccctctccattcctgtcatagccaacggaggatctcatgaccacatccaacagtattcggacatagaggactttcgacaagccacggcagcctcttccgtgatggtggcccgagcagccatgtggaacccatctatcttcctcaaggagggtctgcggcccctggaggaggtcatgcagaaatacatcagatacgcggtgcagtatgacaaccactacaccaacaccaagtactgcttgtgccagatgctacgagaacagctggagtcgccccagggaaggttgctccatgctgcccagtcttcccgggaaatttgtgaggcctttggccttggtgccttctatgaggagaccacacaggagctggatgcccagcaggccaggctctcagccaagacttcagagcagacaggggagccagctgaagatacctctggtgtcattaagatggctgtcaagtttgaccggagagcatacccagcccagatcacccctaagatgtgcctactagagtggtgccggagggagaagttggcacagcctgtgtatgaaacggttcaacgccctctagatcgcctgttctcctctattgtcaccgttgctgaacaaaagtatcagtctaccttgtgggacaagtccaagaaactggcggagcaggctgcagccatcgtctgtctgcggagccagggcctccctgagggtcggctgggtgaggagagcccttccttgcacaagcgaaagagggaggctcctgaccaagaccctgggggccccagagctcaggagctagcacaacctggggatctgtgcaagaagccctttgtggccttgggaagtggtgaagaaagccccctggaaggctggtgactactcttcctgccttagtcacccctccatgggcctggtgctaaggtggctgtggatgccacagcatgaaccagatgccgttgaacagtttgctggtcttgcctggcagaagttagatgtcctggcaggggccatcagcctagagcatggaccaggggccgcccaggggtggatcctggcccctttggtggatctgagtgacagggtcaagttctctttgaaaacaggagcttttcaggtggtaactccccaacctgacattggtactgtgcaataaagacaccccctaccctcacccacggctggctgcttcagccttgggcatcttcataaa

SEQ ID NO: 96360 - DNA, 1986 bp, Artificial Sequence
  derived and/or modified sequence
gctcagtacggtgtgtggagctggagcaccgtgaggaagaagcgaggttctttttaagagttcagctgcgagatatcaaacaaagaattactctgtacaaagccagaacacatatatcaaagtaatcctgaagtatcagaacaaaataataggctgtaacagaggaggaaatgattttgaatagcctctctctgtgttaccataataagctaatcctggccccaatggttcgggtagggactcttccaatgaggctgctggccctggattatggagcggacattgtttactgtgaggagctgatcgacctcaagatgattcagtgcaagagagttgttaatgaggtgctcagcacagtggactttgtcgcccctgatgatcgagttgtcttccgcacctgtgaaagagagcagaacagggtggtcttccagatggggacttcagacgcagagcgagcccttgctgtggccaggcttgtagaaaatgatgtggctggtattgatgtcaacatgggctgtccaaaacaatattccaccaagggaggaatgggagctgccctgctgtcagaccctgacaagattgagaagatcctcagcactcttgttaaagggacacgcagacctgtgacctgcaagattcgcatcctgccatcgctagaagataccctgagccttgtgaagcggatagagaggactggcattgctgccatcgcagttcatgggaggaagcgggaggagcgacctcagcatcctgtcagctgtgaagtcatcaaagccattgctgataccctctccattcctgtcatagccaacggaggatctcatgaccacatccaacagtattcggacatagaggactttcgacaagccacggcagcctcttccgtgatggtggcccgagcagccatgtggaacccatctatcttcctcaaggagggtctgcggcccctggaggaggtcatgcagaaatacatcagatacgcggtgcagtatgacaaccactacaccaacaccaagtactgcttgtgccagatgctacgagaacagctggagtcgccccagggaaggttgctccatgctgcccagtcttcccgggaaatttgtgaggcctttggccttggtgccttctatgaggagaccacacaggagctggatgcccagcaggccaggctctcagccaagacttcagagcagacaggggagccagctgaagatacctctggtgtcattaagatggctgtcaagtttgaccggagagcatacccagcccagatcacccctaagatgtgcctactagagtggtgccggagggagaagttggcacagcctgtgtatgaaacggttcaacgccctctagatcgcctgttctcctctattgtcaccgttgctgaacaaaagtatcagtctaccttgtgggacaagtccaagaaactggcggagcaggctgcagccatcgtctgtctgcggagccagggcctccctgagggtcggctgggtgaggagagcccttccttgcacaagcgaaagagggaggctcctgaccaagaccctgggggccccagagctcaggagctagcacaacctggggatctgtgcaagaagccctttgtggccttgggaagtggtgaagaaagccccctggaaggctggtgactactcttcctgccttagtcacccctccatgggcctggtgctaaggtggctgtggatgccacagcatgaaccagatgccgttgaacagtttgctggtcttgcctggcagaagttagatgtcctggcaggggccatcagcctagagcatggaccaggggccgcccaggggtggatcctggcccctttggtggatctgagtgacagggtcaagttctctttgaaaacaggagcttttcaggtggtaactccccaacctgacattggtactgtgcaataaagacaccccctaccctcacccacggctggctgcttcagccttgggcatcttcataaa

SEQ ID NO: 96361 - protein, 458 aa, Artificial Sequence
  derived and/or modified sequence
MILNSLSLCYHNKLILAPMVRVGTLPMRLLALDYGADIVYCEELIDLKMIQCKRVVNEVLSTVDFVAPDDRVVFRTCEREQNRVVFQMGGMGAALLSDPDKIEKILSTLVKGTRRPVTCKIRILPSLEDTLSLVKRIERTGIAAIAVHGRKREERPQHPVSCEVIKAIADTLSIPVIANGGSHDHIQQYSDIEDFRQATAASSVMVARAAMWNPSIFLKEGLRPLEEVMQKYIRYAVQYDNHYTNTKYCLCQMLREQLESPQGRLLHAAQSSREICEAFGLGAFYEETTQELDAQQARLSAKTSEQTGEPAEDTSGVIKMAVKFDRRAYPAQITPKMCLLEWCRREKLAQPVYETVQRPLDRLFSSIVTVAEQKYQSTLWDKSKKLAEQAAAIVCLRSQGLPEGRLGEESPSLHKRKREAPDQDPGGPRAQELAQPGDLCKKPFVALGSGEESPLEGW

SEQ ID NO: 96362 - DNA, 1377 bp, Artificial Sequence
  derived and/or modified sequence
atgatattgaattctctgtcgctctgctatcacaataaactcattctcgccccgatggtcagagtggggaccctacccatgcggctgctagccctggattatggggccgacattgtttattgtgaagagttgatcgatcttaaaatgatccaatgtaagcgtgtcgttaatgaggtgctgtctacagttgactttgtagcacctgatgatcgggtcgtgttcagaacatgtgagcgcgagcaaaaccgggtcgtgtttcagatgggcggcatgggggcagccctgctgtcggaccctgacaagattgaaaaaatcttgagtaccctggtgaaggggacgagacggcccgtcacatgcaaaatcaggattcttccgtctctggaagatacgctctccttggtcaaaagaatagagcgaactggtattgctgctatcgccgtccacggacgcaagcgcgaggaacgaccccagcaccctgtttcatgtgaggttattaaagccatcgccgacaccctatctatcccggtgatagctaacgggggctcccacgaccatatccagcaatactccgacatagaggactttcgacaagctactgccgcttctagcgttatggtcgcccgggccgcaatgtggaatccctctatatttctgaaagagggcctgcgccccctcgaagaggtcatgcagaagtatatccggtacgccgtgcagtacgacaatcattataccaacacaaaatactgtctctgtcagatgttgagggaacaattggagtctcctcaggggcgtctgctccacgccgctcagagcagtcgcgaaatctgcgaagcattcggtttgggcgccttctatgaggagacgactcaggaattagacgcccagcaggcccgcctctccgccaaaacatcggagcagacaggcgaacctgccgaagacacaagcggggtgattaagatggctgtaaagttcgacagacgcgcttacccggcccagatcactccaaaaatgtgcctcctggagtggtgccgcagggaaaagttagcacagccagtctacgagacagtgcagcgtccattagaccgactgttttcgtctattgtgaccgtcgccgaacagaaatatcaatcaaccctgtgggacaaaagtaaaaagctcgccgaacaggccgctgcgattgtttgtcttcgctctcagggccttccagagggccgtctgggagaggaaagcccaagtctgcacaagagaaaacgcgaggctcccgaccaggaccccggaggcccgagagcccaggaactagcccagcccggcgacctgtgcaagaaacccttcgtggcactgggctcaggggaagagtctcctctcgagggatggtag

SEQ ID NO: 96363 - DNA, 1377 bp, Artificial Sequence
  derived and/or modified sequence
atgatcctgaacagcctgagcctgtgctaccacaacaagctgatcctggcccccatggtgcgggtgggcaccctgcccatgaggctgctggccctggactatggagctgacatcgtgtactgtgaggagctgattgacctgaagatgatccagtgcaagagggtggtgaatgaggtgctgagcacagtggactttgtggccccagatgacagagtggtgttccgcacctgtgagcgggagcagaacagagtggtgttccagatgggcggcatgggcgccgccctgctgagtgaccctgacaagattgagaagatcctgagcaccctggtgaagggcacccggcggcctgtgacctgcaagatccgcatcctgcccagcctggaggacaccctgagcctggtgaagagaattgaaagaactggaattgctgccatcgctgtgcacggcaggaagcgggaggagcggccccagcaccctgtgtcctgtgaggtgatcaaggccatcgctgacaccctgagcatccctgtgattgccaatggaggcagccatgaccacatccagcagtacagcgacatcgaggacttccggcaggccacagctgccagctctgtgatggtggcccgggccgccatgtggaaccccagcatcttcctgaaggagggcctgcggcccctggaggaggtgatgcagaagtacatccgctatgctgtgcagtatgacaaccactacaccaacaccaagtactgcctgtgccagatgctgcgggagcagctggagagcccccagggccgcctgctgcacgccgcccagagcagccgggagatctgtgaggccttcggcctgggcgccttctatgaggagaccacccaggagctggatgcccagcaggcccggctgagcgccaagaccagcgagcagacaggagagcctgctgaggacaccagcggggtcatcaagatggctgtgaagtttgaccggcgggcctacccagcccagatcacccccaagatgtgcctgctggagtggtgccggcgggagaagctggcccagcctgtgtatgaaacagtgcagaggcccctggacaggctcttcagcagcatcgtgacagtggccgagcagaagtaccagagcaccctgtgggacaagagcaagaagctggccgagcaggccgccgccatcgtgtgcctgcggagccagggcctgcctgagggccgcctgggggaggagagccccagcctgcacaagaggaagcgggaggccccagaccaggaccccggcggcccccgggcccaggagctggcccagcccggggacctgtgcaagaagccctttgtggccctgggcagcggggaggagagccccctggagggctggtag

SEQ ID NO: 96364 - DNA, 1377 bp, Artificial Sequence
  derived and/or modified sequence
atgatcctgaacagcctgagcctgtgctaccacaacaagctgatcctcgcccccatggtgcgcgtgggcacactgccaatgcgcctgctggcactggattatggggccgacattgtgtattgcgaggagctgatcgacctgaagatgatacagtgcaaaagagttgtaaatgaagtgttaagcaccgtagacttcgtggcgccggacgatcgagttgtcttccgcacgtgcgaaagggagcagaacagggtggtatttcaaatgggtgggatgggcgccgccctactcagcgatccagataagatcgagaaaattctgagtaccctggtcaagggcacaaggagaccagtaacatgcaaaattcgcattttacccagccttgaagataccctctctctcgtgaagcgcatcgagcggaccggcatcgcagccatcgctgtgcacggtcgcaagagagaggagcggccccaacacccagtttcctgtgaggtgatcaaagcaatcgcagacaccctctcaatcccagtgattgccaatggtggtagtcatgatcatatccaacagtacagtgatattgaagacttccggcaggctactgccgcttcctctgttatggttgcgcgggctgcaatgtggaacccctccatctttctcaaagagggactcagacccctcgaggaagttatgcagaagtacattcgatatgctgtccaatatgacaatcattacaccaacactaaatactgtctgtgtcaaatgctcagagaacagctggaatcgccccagggcaggctgctacatgccgcgcagagtagccgggagatctgcgaagctttcggccttggcgccttttatgaggagacgacgcaagagctggacgcacagcaggccaggctctctgctaagacttctgaacagaccggtgagccagctgaagatacctcgggtgtgatcaagatggcagtaaagttcgaccgcagggcgtatccagctcaaatcacacctaagatgtgcctactggagtggtgtagacgcgaaaagttggctcagcccgtgtacgagacagtccagcgcccccttgatcgactgttcagtagtatcgtgactgttgccgaacagaaatatcaaagcactctgtgggacaagtccaaaaagctggccgagcaggccgcagccattgtctgtctgagaagccaaggactgcccgaaggccgtctgggtgaagaatccccttctctgcataagcgaaagagggaagctccggatcaggatcccggtgggccacgcgcccaggagcttgcgcaacccggtgatttgtgcaaaaaacctttcgtggccctcgggagcggcgaggagagcccgcttgagggatggtag

SEQ ID NO: 96365 - DNA, 1377 bp, Artificial Sequence
  derived and/or modified sequence
atgattctcaattctttatctctatgctatcataacaagctgatccttgctcccatggtgagagtgggcactctgcctatgcgccttcttgcccttgactacggagccgatatcgtgtactgcgaggagctgattgacctgaagatgattcagtgcaaacgcgtcgtcaatgaggtcctgagcaccgttgacttcgtggctcccgatgacagggtggtgttcagaacctgtgaacgtgagcagaatcgggtagtgttccagatgggaggcatgggagccgcactgctgtccgacccagacaaaatcgaaaagatcctatccacgctggtgaagggtactaggaggccagtgacctgtaagatcagaatactccctagtttggaagataccttgtcactcgtgaagagaatcgagcgcacgggcattgccgcaattgccgttcacgggagaaagagagaagaaagaccccagcaccctgtgagttgcgaggttataaaggctatcgccgatactttgagcatccccgtaattgccaatggtggaagtcacgatcatatccagcagtacagcgacatcgaagacttccggcaggctacagcagcttcctccgtcatggtcgctcgggcagccatgtggaacccaagtatctttctgaaggagggcttgcgacctttggaggaggtgatgcagaagtatatcagatacgccgttcagtacgacaatcactatacaaataccaagtactgcctgtgtcagatgcttagggaacaactggagtcccctcaggggaggcttcttcacgcggctcagtcttcccgcgagatctgcgaagcttttggcctgggagcattctatgaggaaacaacccaagaactcgacgcccagcaggcccgactaagcgcaaaaacgtccgagcagacaggggaacccgctgaagacacttccggggtgatcaaaatggctgtgaaattcgataggcgggcttatccagcacagatcacgcctaagatgtgcttgctcgagtggtgtcgtcgggaaaagctagcacaacccgtgtacgagacagttcagaggccactggacagactcttctcatccattgtaacagtggctgaacagaagtaccagagtactctctgggataagtctaaaaagctggccgagcaggctgcagccattgtatgtttacgctcacaaggacttcccgagggacgcttgggcgaggagtcgccctcactgcataagcggaagagggaagcaccagatcaagatcctgggggtcctagggcccaggagctggcgcagccgggagacttgtgcaagaagcccttcgtcgctctgggctccggagaagagagcccactggagggctggtag

SEQ ID NO: 96366 - DNA, 1377 bp, Artificial Sequence
  derived and/or modified sequence
atgatcctgaacagcctgagcctgtgctaccacaacaagctgatcctggcccccatggtgagagtgggcaccctgcccatgagactgctggccctggactacggcgccgacatcgtgtactgcgaggagctgatcgacctgaagatgatccagtgcaagagagtggtgaacgaggtgctgagcaccgtggacttcgtggcccccgacgacagagtggtgttcagaacctgcgagagagagcagaacagagtggtgttccagatgggcggcatgggcgccgccctgctgagcgaccccgacaagatcgagaagatcctgagcaccctggtgaagggcaccagaagacccgtgacctgcaagatcagaatcctgcccagcctggaggacaccctgagcctggtgaagagaatcgagagaaccggcatcgccgccatcgccgtgcacggcagaaagagagaggagagaccccagcaccccgtgagctgcgaggtgatcaaggccatcgccgacaccctgagcatccccgtgatcgccaacggcggcagccacgaccacatccagcagtacagcgacatcgaggacttcagacaggccaccgccgccagcagcgtgatggtggccagagccgccatgtggaaccccagcatcttcctgaaggagggcctgagacccctggaggaggtgatgcagaagtacatcagatacgccgtgcagtacgacaaccactacaccaacaccaagtactgcctgtgccagatgctgagagagcagctggagagcccccagggcagactgctgcacgccgcccagagcagcagagagatctgcgaggccttcggcctgggcgccttctacgaggagaccacccaggagctggacgcccagcaggccagactgagcgccaagaccagcgagcagaccggcgagcccgccgaggacaccagcggcgtgatcaagatggccgtgaagttcgacagaagagcctaccccgcccagatcacccccaagatgtgcctgctggagtggtgcagaagagagaagctggcccagcccgtgtacgagaccgtgcagagacccctggacagactgttcagcagcatcgtgaccgtggccgagcagaagtaccagagcaccctgtgggacaagagcaagaagctggccgagcaggccgccgccatcgtgtgcctgagaagccagggcctgcccgagggcagactgggcgaggagagccccagcctgcacaagagaaagagagaggcccccgaccaggaccccggcggccccagagcccaggagctggcccagcccggcgacctgtgcaagaagcccttcgtggccctgggcagcggcgaggagagccccctggagggctggtag

SEQ ID NO: 96367 - DNA, 1864 bp, Artificial Sequence
  derived and/or modified sequence
gtgtggagctggagcaccgtgaggaagaagcgaggttctttttaagagttcagctgcgagatatcaaacaaagaattactctgtacaaagccagaacacatatatcaaagtaatcctgaagtatcagaacaaaataataggctgtaacagaggaggaaatgattttgaatagcctctctctgtgttaccataataagctaatcctggccccaatggttcgggtagggactcttccaatgaggctgctggccctggattatggagcggacattgtttactgtgaggagctgatcgacctcaagatgattcagtgcaagagagttgttaatgaggtgctcagcacagtggactttgtcgcccctgatgatcgagttgtcttccgcacctgtgaaagagagcagaacagggtggtcttccagatgggaggaatgggagctgccctgctgtcagaccctgacaagattgagaagatcctcagcactcttgttaaagggacacgcagacctgtgacctgcaagattcgcatcctgccatcgctagaagataccctgagccttgtgaagcggatagagaggactggcattgctgccatcgcagttcatgggaggaagcgggaggagcgacctcagcatcctgtcagctgtgaagtcatcaaagccattgctgataccctctccattcctgtcatagccaacggaggatctcatgaccacatccaacagtattcggacatagaggactttcgacaagccacggcagcctcttccgtgatggtggcccgagcagccatgtggaacccatctatcttcctcaaggagggtctgcggcccctggaggaggtcatgcagaaatacatcagatacgcggtgcagtatgacaaccactacaccaacaccaagtactgcttgtgccagatgctacgagaacagctggagtcgccccagggaaggttgctccatgctgcccagtcttcccgggaaatttgtgaggcctttggccttggtgccttctatgaggagaccacacaggagctggatgcccagcaggccaggctctcagccaagacttcagagcagacaggggagccagctgaagatacctctggtgtcattaagatggctgtcaagtttgaccggagagcatacccagcccagatcacccctaagatgtgcctactagagtggtgccggagggagaagttggcacagcctgtgtatgaaacggttcaacgccctctagatcgcctgttctcctctattgtcaccgttgctgaacaaaagtatcagtctaccttgtgggacaagtccaagaaactggcggagcaggctgcagccatcgtctgtctgcggagccagggcctccctgagggtcggctgggtgaggagagcccttccttgcacaagcgaaagagggaggctcctgaccaagaccctgggggccccagagctcaggagctagcacaacctggggatctgtgcaagaagccctttgtggccttgggaagtggtgaagaaagccccctggaaggctggtgactactcttcctgccttagtcacccctccatgggcctggtgctaaggtggctgtggatgccacagcatgaaccagatgccgttgaacagtttgctggtcttgcctggcagaagttagatgtcctggcaggggccatcagcctagagcatggaccaggggccgcccaggggtggatcctggcccctttggtggatctgagtgacagggtcaagttctctttgaaaacaggagcttttcaggtggtaactccccaacctgacattggtactgtgcaataaagacaccccctaccctcacccacggctggctgcttcagccttgggcatcttc

SEQ ID NO: 96368 - protein, 565 aa, Artificial Sequence
  derived and/or modified sequence
MSSNSFPYNEQSGGGEATELGQEATSTISPSGAFGLFSSDLKKNEDLKQMLESNKDSAIKEASADLSPYVRKNAAHAIQKLYSLDPEQKEMLIEVIEKLLKDKSTLVAGSVVMAFEEVCPDRIDLIHKNYRKLCNLLVDVEEWGQVVIIHMLTRYARTQFVSPWKEGDELEDNGKNFYESDDDQKEKTDKKKKPYTMDPDHRLLIRNTKPLLQSRNAAVVMAVAQLYWHISPKSEAGIISKSLVRLLRSNREVQYIVLQNIATMSIQRKGMFEPYLKSFYVRSTDPTMIKTLKLEILTNLANEANISTLLREFQTYVKSQDKQFAAATIQTIGRCATNILEVTDTCLNGLVCLLSNRDEIVVAESVVVIKKLLQMQPAQHGEIIKHMAKLLDSITVPVARASILWLIGENCERVPKIAPDVLRKMAKSFTSEDDLVKLQILNLGAKLYLTNSKQTKLLTQYILNLGKYDQNYDIRDRTRFIRQLIVPNVKSGALSKYAKKIFLAQKPAPLLESPFKDRDHFQLGTLSHTLNIKATGYLELSNWPEVAPDPSVRNVEVIELVVLSE

SEQ ID NO: 96369 - DNA, 1698 bp, Artificial Sequence
  derived and/or modified sequence
atgagctccaactcatttccgtacaacgagcagtcgggcgggggggaggctacagaactgggacaggaagcgacaagcactatctcacctagcggagccttcggtttattttcctctgatttgaagaaaaacgaggacctgaagcaaatgctggagtcaaataaggattctgctattaaagaggcaagcgccgacctgtctccctacgtccggaaaaatgcggctcacgctatccagaaactgtattcccttgatccggagcagaaagagatgctcattgaagtcattgagaaactgctaaaggacaagtccactctggtcgctggttcagtcgtaatggctttcgaggaagtatgccctgataggatcgatctgattcacaagaactaccgtaaactgtgcaatcttctggttgacgttgaggagtgggggcaggttgttatcatccatatgcttacgcggtacgcacgtacgcagttcgtctctccatggaaggagggcgatgaactcgaggacaacggaaagaacttttatgagtcagatgatgaccagaaagagaaaacagataagaaaaagaaaccctatacaatggaccctgatcataggctgttgatacgcaatactaaaccactgttacagagcagaaacgccgctgtcgtgatggccgttgcccaactgtattggcacatttccccaaagagcgaagcagggatcatatctaagtcattggttagactcctcaggagcaaccgcgaagtgcagtacatcgtcctgcagaatatcgcaaccatgagtattcaacgcaaaggaatgttcgaaccttacctcaagtctttttatgttagaagcacagatccaaccatgataaagactctgaagcttgagatcctgactaacctagcaaatgaagcaaatattagcaccttacttcgagagtttcagacctacgtgaagtcccaggataagcagtttgccgcagccaccattcaaaccatcggtcgatgcgcaacaaacattctggaggttactgatacatgtctaaatggcctcgtttgcttattgtctaatcgtgatgagattgttgtagcagagtcagtcgtcgtgataaaaaagttgctgcagatgcagcccgctcaacacggggagattatcaaacacatggccaagcttctcgactcaatcactgtaccagtggcgagagcctccatcctatggctcatcggcgaaaactgcgaacgagtgcccaaaatcgctccagacgtacttagaaaaatggccaaatcttttacttcagaggacgacctagtgaaactgcagatcctcaatttaggggcaaaactatatctgaccaactcaaaacagaccaaacttctgacacaatatatcctgaacctgggcaaatatgatcaaaactatgacatcagggaccggacccggttcatcagacagttaatcgtcccaaatgtgaagtctggggccttgtccaaatacgcaaaaaaaatcttcctggcacaaaaaccggcaccgctgctggaatctccgtttaaagacagggatcattttcaactggggacactctcccacactcttaacatcaaggccaccggctatctggagctgtcaaattggcccgaggtggcacccgaccccagcgtgaggaacgtggaggtgatcgaattagtggtcctatcagagtag

SEQ ID NO: 96370 - DNA, 1822 bp, Artificial Sequence
  derived and/or modified sequence
acgagtccggaagcgcctgcgcgcgctcctccgtacgagaactagttttgttccgtgccctctggactggaaccttttggagagaacccccggcaggaccaaccccgcacccgccagcaccgcggcaatgtccagcaatagttttccttacaatgagcagtccggaggaggggaggcgacggagctgggtcaggaggcgacctcaaccatttccccctcgggggccttcggcctctttagcagcgatttgaagaagaatgaagatctaaagcaaatgttagagagcaacaaagattctgctattaaggaagcttctgctgacttatcaccatatgttaggaagaatgcagcccatgcaatacaaaaattatacagccttgatccagagcagaaggaaatgttaattgaagtaattgaaaaacttctgaaagataaaagcacattggtagctggcagtgttgtgatggcttttgaagaagtatgcccggacagaatagatctgattcataaaaattaccgcaagctatgtaacttactagtggatgttgaagagtgggggcaggttgtcataatccacatgctaactcgatatgctcggacacagtttgtcagcccttggaaagagggtgatgaattagaagacaatggaaagaatttctacgaatctgatgatgatcagaaggaaaagactgacaaaaagaagaagccgtatactatggatccagatcatagactcttaattagaaatacaaagcctttgcttcagagcaggaatgctgcggtggttatggcagttgctcagctgtattggcacatatcaccaaaatctgaagctggcataatttctaaatcactagtgcgtttacttcgtagcaatagggaggtgcagtatattgtcctacaaaatatagcaactatgtcaattcaaagaaaggggatgtttgaaccttatctgaagagtttctatgttaggtcaactgatccaactatgatcaagacactgaagcttgaaattttgacaaacttggcaaatgaagccaacatatcaactcttcttcgagaatttcagacctatgtgaaaagccaggataaacaatttgcagcagccactattcagactataggcagatgtgcaaccaacatcttggaagtcactgacacgtgcctcaatggcttggtctgtctgctgtccaacagggatgaaatagttgttgctgaaagtgtggttgttataaagaaattactgcaaatgcaacctgcacaacatggtgaaattattaaacatatggccaaactcctggacagtatcactgttcctgttgctagagcaagtattctttggctaattggagaaaactgtgaacgagttcctaaaattgcccctgatgttttgaggaagatggctaaaagcttcactagtgaagatgatctggtaaaactgcagatattaaatctgggagcaaaattgtatttaaccaactccaaacagacaaaattgcttacccagtacatattaaatctcggcaagtatgatcaaaactacgacatcagagaccgtacaagatttattaggcagcttattgttccgaatgtaaagagtggagctttaagtaaatatgccaaaaaaatattcctagcacaaaagcctgcaccactgcttgagtctccttttaaagatagagatcatttccagcttggcaccttatctcatactctcaacattaaagctactgggtacctggaattatctaattggccagaggtggcgcccgacccatcagttcgaaatgtagaagtaatagagttggtagttttaagtgaa

SEQ ID NO: 96371 - DNA, 1698 bp, Artificial Sequence
  derived and/or modified sequence
atgagcagcaacagcttcccctacaatgagcagagcggcggcggggaggccacagagctgggccaggaggccaccagcaccatcagccccagcggggccttcggcctcttcagcagtgacctgaagaagaatgaagacctgaagcagatgctggagagcaacaaggacagcgccatcaaggaggccagcgctgacctgagcccctacgtgaggaagaatgctgcccacgccatccagaagctgtacagcctggaccctgagcagaaggagatgctgattgaagtcatcgagaagctgctgaaggacaagagcaccctggtggccggctctgtggtgatggcctttgaggaggtgtgcccagacagaattgacctgatccacaagaactacaggaagctgtgcaacctgctggtggatgtggaggagtggggccaggtggtgatcatccacatgctgaccaggtatgcccggacccagtttgtgagcccctggaaggagggagatgagctggaggacaatggcaagaacttctatgaaagtgatgatgaccagaaggagaagacagacaagaagaagaagccctacaccatggaccctgaccaccggctgctgatccggaacaccaagcccctgctgcagagcagaaatgctgctgtggtgatggctgtggcccagctgtactggcacatcagccccaagtctgaggccggcatcatcagcaagagcctggtgcggctgctgcggagcaaccgggaggtgcagtacatcgtgctgcagaacatcgccaccatgagcatccagaggaagggcatgtttgagccctacctgaagagcttctacgtgcgcagcacagaccccaccatgatcaagaccctgaagctggagatcctgaccaacctggccaatgaggccaacatcagcaccctgctgcgggagttccagacctacgtgaagagccaggacaagcagtttgctgctgccaccatccagaccatcggccgctgtgccaccaacatcctggaggtgacagacacctgcctgaatggcctggtgtgcctgctgagcaacagagatgagatcgtggtggccgagagcgtggtggtgatcaagaagctgctgcagatgcagcctgcccagcacggggagatcatcaagcacatggccaagctgctggacagcatcaccgtgcctgtggcccgggccagcatcctgtggctgattggagagaactgtgagcgggtgcccaagatcgccccagatgtgctgaggaagatggccaagagcttcaccagtgaagatgacctggtgaagctgcagatcctgaacctgggcgccaagctgtacctgaccaacagcaagcagaccaagctgctgacccagtacatcctgaacctgggcaagtatgaccagaactatgacatccgggacaggacccgcttcatccggcagctgattgtgcccaacgtgaagagcggggccctgagcaaatatgccaagaagatcttcctggcccagaagccagcccccctgctggagagccccttcaaggaccgggaccacttccagctgggcaccctgagccacaccctgaacatcaaggccaccggctacctggagctgagcaactggccagaggtggccccagaccccagcgtgagaaatgtggaggtgattgagctggtggtgctgtctgagtag

SEQ ID NO: 96372 - DNA, 1698 bp, Artificial Sequence
  derived and/or modified sequence
atgagcagcaacagcttcccctacaacgagcagagcggcggcggcgaggccactgaactggggcaggaagcaacctcaacgatttccccaagtggcgcatttgggctgttcagttccgacctgaagaagaatgaggacctcaagcaaatgctggagtctaataaggacagcgccattaaggaggctagcgccgatctgagcccttatgtacgaaagaatgctgcccacgccatccagaagctatattccttagaccccgagcagaaggagatgttgatagaggtcatagagaaattactgaaggataagtctacactggtggccggctccgtggtcatggctttcgaagaagtctgtcccgacagaatcgacttaatccacaagaattacaggaagttgtgcaacctactggtggacgtggaggaatggggacaggtggtgattatacatatgctcactcgatacgccagaacccagttcgtaagtccatggaaagagggggacgagctggaagacaatggaaaaaatttttacgaatcagacgacgatcaaaaggaaaaaacagataagaagaaaaagccctacacaatggatcctgatcatcgcctactcatccgcaataccaagcccctgcttcaaagcaggaacgccgccgttgtcatggcggtggctcaactgtactggcacatttcgcccaagagtgaggcgggcatcatcagtaaaagtctcgttaggctcttaaggagcaatagagaggtacaatatattgtcctgcagaatatagcaaccatgagcatacagcggaagggaatgttcgaaccctaccttaagagtttttacgtaaggagtactgatcccacaatgataaagacactcaaactagagattcttacaaatttagctaacgaggccaacatctcaacactgttacgggaatttcagacctacgtgaaatctcaggataagcagtttgccgctgctactatccagacaatcggtagatgcgccacaaatatactggaggttacagatacctgcctgaatggactggtctgcctgttgagtaatagggacgagatagtcgtcgctgagtcggtggtggtgatcaaaaagttgttacaaatgcagcctgcccagcacggagaaatcatcaaacatatggccaagcttctagactcaattaccgtccctgttgctcgggccagtattctatggctgattggggagaattgcgagcgtgtgcctaaaatcgcccccgacgtgctgagaaagatggcaaagtcgtttacctccgaggatgacctggttaagttgcagatcctaaatttgggggcgaaattatatctgacgaatagcaagcagactaagttactgacacagtatatcctgaatctagggaagtacgatcaaaactatgacattcgcgacagaacgcgcttcattcggcagttgatcgttcccaacgtgaagtctggggcactttccaaatatgccaagaagatcttcctagcccaaaagcctgcgcccttactggaatcaccattcaaggacagagatcactttcagcttggcacactcagccacactctcaatatcaaagccacaggttacctagagctgagtaattggccggaagttgcaccggatccctccgtcagaaatgtagaggtaattgagctcgtagtgctgagtgagtag

SEQ ID NO: 96373 - DNA, 1698 bp, Artificial Sequence
  derived and/or modified sequence
atgtcctccaatagtttcccctataatgaacagtcaggtgggggagaggctactgagctggggcaagaggcaaccagcactatatcaccatcaggagcatttgggctcttcagcagtgatctcaagaaaaatgaagacttaaagcagatgctagagtctaacaaggactctgccattaaagaagcaagcgctgacctgtcaccatatgtgaggaagaacgcggcacacgctattcagaagctgtacagtctggacccagaacagaaggaaatgctcatcgaggtaatcgagaaactcctgaaggataagagcaccctggtcgccggtagcgtcgttatggcatttgaggaagtatgtccggaccgaattgacttgatccataagaattaccggaagctctgtaacctcctggtcgatgtggaggagtgggggcaagtggttatcatccacatgctaactaggtacgccagaactcagttcgtatccccatggaaggagggtgatgagttggaagataatggcaagaacttttatgagtctgacgatgatcagaaggagaagaccgataagaagaaaaagccatacacgatggatccagaccatcgtcttcttattaggaacactaaacccctgctgcagtcacgaaatgccgcagtagtcatggccgtggctcaactgtattggcatataagccctaagtccgaagccggtattatatcaaaatctttggtacgccttctgcgctcaaacagagaggttcaatatattgtgctccagaatattgccaccatgtcaattcaacggaaagggatgttcgagccctacctcaagtctttttatgtccgcagcactgacccaactatgatcaaaacactcaaattagaaatcctgaccaacttggcaaacgaagctaacattagcaccctccttagggagtttcagacctacgtaaaatcccaggataaacagttcgcagcagcgacaatccagaccatcggtcgctgcgcaaccaatatattggaggtgacagacacttgcctgaacgggctagtctgcctgttatcaaacagagacgaaattgtcgtggccgagtccgtggttgtgatcaagaaactcctgcagatgcaacccgctcagcacggagagatcataaagcacatggctaagcttttggactccataacagttccagtagccagggcctcaatcctctggctgatcggggagaattgcgagagggtacctaaaattgctccagacgtgctcaggaaaatggccaagagcttcacctcagaggacgacctggtgaagctccagatcctaaacttgggcgcaaagctgtatcttaccaactcaaagcagaccaagctgctgactcagtatattcttaacctggggaagtatgatcagaactacgatatccgtgatcgaaccagatttataaggcagcttatcgtgccaaacgtgaaaagcggagcactaagcaagtatgctaagaagatctttctagcacaaaagccagcccctctgctcgagtcacctttcaaagacagggaccattttcaactgggaacactgtcacatacccttaacatcaaggcgaccgggtatctggaattgtctaactggccagaagtggcacctgatccttcagtacgcaacgtggaggtaatcgagctcgtcgtattgtctgagtag

SEQ ID NO: 96374 - DNA, 1698 bp, Artificial Sequence
  derived and/or modified sequence
atgagcagcaacagcttcccctacaacgagcagagcggcggcggcgaggccaccgagctgggccaggaggccaccagcaccatcagccccagcggcgccttcggcctgttcagcagcgacctgaagaagaacgaggacctgaagcagatgctggagagcaacaaggacagcgccatcaaggaggccagcgccgacctgagcccctacgtgagaaagaacgccgcccacgccatccagaagctgtacagcctggaccccgagcagaaggagatgctgatcgaggtgatcgagaagctgctgaaggacaagagcaccctggtggccggcagcgtggtgatggccttcgaggaggtgtgccccgacagaatcgacctgatccacaagaactacagaaagctgtgcaacctgctggtggacgtggaggagtggggccaggtggtgatcatccacatgctgaccagatacgccagaacccagttcgtgagcccctggaaggagggcgacgagctggaggacaacggcaagaacttctacgagagcgacgacgaccagaaggagaagaccgacaagaagaagaagccctacaccatggaccccgaccacagactgctgatcagaaacaccaagcccctgctgcagagcagaaacgccgccgtggtgatggccgtggcccagctgtactggcacatcagccccaagagcgaggccggcatcatcagcaagagcctggtgagactgctgagaagcaacagagaggtgcagtacatcgtgctgcagaacatcgccaccatgagcatccagagaaagggcatgttcgagccctacctgaagagcttctacgtgagaagcaccgaccccaccatgatcaagaccctgaagctggagatcctgaccaacctggccaacgaggccaacatcagcaccctgctgagagagttccagacctacgtgaagagccaggacaagcagttcgccgccgccaccatccagaccatcggcagatgcgccaccaacatcctggaggtgaccgacacctgcctgaacggcctggtgtgcctgctgagcaacagagacgagatcgtggtggccgagagcgtggtggtgatcaagaagctgctgcagatgcagcccgcccagcacggcgagatcatcaagcacatggccaagctgctggacagcatcaccgtgcccgtggccagagccagcatcctgtggctgatcggcgagaactgcgagagagtgcccaagatcgcccccgacgtgctgagaaagatggccaagagcttcaccagcgaggacgacctggtgaagctgcagatcctgaacctgggcgccaagctgtacctgaccaacagcaagcagaccaagctgctgacccagtacatcctgaacctgggcaagtacgaccagaactacgacatcagagacagaaccagattcatcagacagctgatcgtgcccaacgtgaagagcggcgccctgagcaagtacgccaagaagatcttcctggcccagaagcccgcccccctgctggagagccccttcaaggacagagaccacttccagctgggcaccctgagccacaccctgaacatcaaggccaccggctacctggagctgagcaactggcccgaggtggcccccgaccccagcgtgagaaacgtggaggtgatcgagctggtggtgctgagcgagtag

SEQ ID NO: 96375 - protein, 885 aa, Artificial Sequence
  derived and/or modified sequence
MCLWGHSTAPAHTLSSPPLLFCSLPCALHLQPGTGHPPGQVPRKSSTQEIGEELINGVIYSISLRKVQLHHGGNKGQRWLGYENESALNLYETCKVRTVKAGTLEKLVEHLVPAFQGSDLSYVTIFLCTYRAFTTTQQVLDLLFKRYGCILPYSDEDGGPQDQLKNAISSILGTWLDQYSEDFCQPPDFPCLKQLVAYVQLNMPGSDLERRAHLLLAQLEHSEPIEAEPEALSPVPALKPTPELELALTPARAPSPVPAPAPEPEPAPTPAPGSELEVAPAPAPELQQAPEPAVGLESAPAPALELEPAPEQDPAPSQTLELEPAPAPVPSLQPSWPSPVVAENGLSEEKPHLLVFPPDLVAEQFTLMDAELFKKVVPYHCLGSIWSQRDKKGKEHLAPTIRATVTQFNSVANCVITTCLGNRSTKAPDRARVVEHWIEVARECRILKNFSSLYAILSALQSNSIHRLKKTWEDVSRDSFRIFQKLSEIFSDENNYSLSRELLIKEGTSKFATLEMNPKRAQKRPKETGIIQGTVPYLGTFLTDLVMLDTAMKDYLYGRLINFEKRRKEFEVIAQIKLLQSACNNYSIAPDEQFGAWFRAVERLSETESYNLSCELEPPSESASNTLRTKKNTAIVKRWSDRQAPSTELSTSGSSHSKSCDQLRCGPYLSSGDIADALSVHSAGSSSSDVEEINISFVPESPDGQEKKFWESASQSSPETSGISSASSSTSSSSASTTPVAATRTHKRSVSGLCNSSSALPLYNQQVGDCCIIRVSLDVDNGNMYKSILVTSQDKAPAVIRKAMDKHNLEEEEPEDYELLQILSDDRKLKIPENANVFYAMNSTANYDFVLKKRTFTKGVKVKHGASSTLPRMKQKGLKIAKGIF

SEQ ID NO: 96376 - DNA, 2658 bp, Artificial Sequence
  derived and/or modified sequence
atgtgcctgtggggtcacagtaccgcaccagctcataccctgtccagtccaccacttttgttttgttccctgccatgtgccctgcacctgcaacctggcacaggccacccacccgggcaagttccaaggaaaagttctacccaggagattggagaggaactcatcaatggcgtcatctattctattagcctcaggaaggttcagctccaccatggcggcaacaagggccaaagatggcttgggtacgaaaacgagagtgctttaaatctgtacgaaacctgtaaggtgcgaactgtgaaggccggaaccctcgaaaagctggtcgaacatctggtgccagcgtttcagggaagcgatttgagttatgtcacaatcttcctctgcacctatcgcgccttcaccacaacccagcaagtgcttgatctgcttttcaaaaggtacggatgtatcctgccctacagtgatgaagacggcggcccacaggatcaacttaagaatgccatctcttcaatcctgggaacctggctggaccagtattcagaagacttctgccagccaccagattttccttgccttaagcagcttgtcgcttatgtgcagttgaacatgccgggctcagacctggagcgacgggcacatctacttttggctcaattggaacactctgaaccaatagaagccgaacctgaagccctgtcccctgtgcctgccctgaagccaacccctgagcttgaactggccctgactcctgcacgtgccccttctcccgtgccagctcccgcccctgagcctgaacctgcccctactccagcccctggatccgaactggaagtggctcccgctcccgctccagagttacagcaggcgcctgagcctgctgtaggtctcgagtccgcaccagctccagcgctggagctggaaccggcccccgagcaagaccctgcccctagccagaccctggagctcgagccagcacccgcgcccgttcccagcctccagcctagttggccctctcccgttgtcgctgaaaatggattgagtgaggagaagccacacctcctggtgttccccccagacctggtcgccgagcagtttacacttatggacgccgaactgttcaagaaggtggttccatatcactgccttggctcgatttggagccaacgtgacaagaaagggaaagagcatctggctccaacaatcagggcgacagttacacagtttaacagtgtcgctaactgcgtcataactacatgcttggggaaccgtagtaccaaggcacccgatcgcgctcgggtcgtagagcactggattgaagttgccagagagtgccgcattctgaagaatttctcttcactgtatgccatcctgagcgccctccagtctaactccatccataggttaaagaagacctgggaagatgtatccagggactctttccggatcttccaaaaactttctgaaatcttctccgatgagaataattactccttatcccgggagctcctgatcaaggagggtacaagtaaatttgcaactctcgagatgaatccaaaaagggctcagaaaaggccaaaggaaacaggcattattcaaggcactgtgccttacttgggtacatttctgactgatctggtcatgcttgacaccgcaatgaaggactacctctatggacgtctcatcaacttcgagaagcgtcgcaaagagttcgaagtcatcgcccagattaagctcctgcagtctgcgtgcaataactactccattgcgcccgacgagcagttcggcgcttggtttcgtgcagtggaacgactctcagagaccgagtcatataacttgtcatgtgaattagagccgccgtcagagtccgcctctaatactttaaggactaaaaagaataccgcaatagtgaagaggtggtccgacagacaggctccttctaccgaactcagcacctccggaagcagccactcaaagtcctgtgatcaactgagatgtggaccgtatcttagcagtggcgacattgcagacgctttgtctgtccacagtgcgggttcctctagtagcgatgtggaagagataaacatctccttcgtccccgagtcacctgatgggcaggaaaagaagttctgggaaagcgcgtcccagtcaagtcccgagacaagcggcatctcttcagccagttcgagcacaagctcctcctcggcgagtactaccccggttgcggctacaaggacccataaaaggtccgtgtcagggctttgcaattcttcttcagcactgccactgtacaaccagcaagttggtgattgctgtattatccgcgtctccttagatgtcgataacggtaatatgtacaaatcaattttggtcacatctcaagacaaggcaccagcggtcattcgaaaggcaatggacaaacacaatctcgaggaagaggagcctgaagactacgagctcttgcagattcttagcgatgaccggaagctcaaaatcccagaaaatgcgaatgtgttttatgctatgaattccactgccaactacgacttcgttctgaagaagcggacctttacaaaaggcgttaaagtaaaacatggagcctcttctacgctcccccgcatgaaacagaagggactgaaaatcgcgaaagggatcttctag

SEQ ID NO: 96377 - DNA, 2658 bp, Artificial Sequence
  derived and/or modified sequence
atgtgcctgtggggccacagcacagccccagcccacaccctgagcagcccccccctgctcttctgcagcctgccctgtgccctgcacctgcagcccggcaccggccaccccccaggccaggtgcccaggaagagcagcacccaggagatcggggaggagctgatcaacggggtcatctacagcatcagcctgaggaaggtgcagctgcaccacggcggcaacaagggccagcgctggctgggctatgaaaatgaaagtgccctgaacctgtatgagacctgcaaggtgaggacagtgaaggccggcaccctggagaagctggtggagcacctggtgcctgccttccagggcagtgacctgtcctatgtgaccatcttcctgtgcacctaccgggccttcaccaccacccagcaggtgctggacctgctcttcaagagatatggctgcatcctgccctacagtgatgaagatggcggcccccaggaccagctgaagaatgccatcagcagcatcctgggcacctggctggaccagtacagcgaggacttctgccagcccccagacttcccctgcctgaagcagctggtggcctacgtgcagctgaacatgcctggcagtgacctggagcggcgggcccacctgctgctggcccagctggagcacagcgagcccattgaagctgagcctgaggccctgagccctgtgcctgccctgaagcccaccccagagctggagctggccctgaccccagcccgggcccccagccctgtgcctgccccagcccctgagcctgagcccgcccccaccccagcccctggcagcgagctggaggtggccccagccccagcccctgagctgcagcaggcccctgagcctgctgtgggcctggagagcgccccagccccagccctggagctggagcccgcccctgagcaggaccctgcccccagccagaccctggagctggagcccgccccagcccctgtgcccagcctgcagcccagctggcccagccctgtggtggctgaaaatggcctgtctgaggagaagccccacctgctggtgtttcctccagacctggtggccgagcagttcaccctgatggatgctgagctgttcaagaaggtggtgccctaccactgcctgggcagcatctggagccagagggacaagaagggcaaggagcacctggcccccaccatccgggccaccgtgacccagttcaacagcgtggccaactgtgtgatcaccacctgcctgggcaacagaagcaccaaggccccagaccgggcccgggtggtggagcactggattgaggtggccagagaatgtcgcatcctgaagaacttcagcagcctgtatgccatcctgagcgccctgcagagcaacagcatccaccggctgaagaagacctgggaggatgtgtcccgggacagcttccgcatcttccagaagctgtctgagatcttcagtgatgagaacaactacagcctgagccgggagctgctgatcaaggagggcaccagcaagtttgccaccctggagatgaaccccaagagggcccagaagaggcccaaggagaccggcatcatccagggcaccgtgccctacctgggcaccttcctgacagacctggtgatgctggacacagccatgaaggactacctgtatggccgcctcatcaactttgagaagaggaggaaggagtttgaggtgattgcccagatcaagctgctgcagagcgcctgcaacaactacagcatcgccccagatgagcagtttggagcctggttccgggctgtggagcggctgtctgaaacagagagctacaacctgagctgtgagctggagccccccagcgagagcgccagcaacaccctgcggaccaagaagaacacagccatcgtgaagcgctggagcgaccggcaggcccccagcacagagctgagcaccagcggcagcagccacagcaagagctgtgaccagctgcgctgtggcccctacctgagcagcggggacattgctgatgccctgtctgtgcacagcgctggcagcagcagcagtgatgtggaggagatcaacatcagctttgtgcctgagagcccagatggccaggagaagaagttctgggagagcgccagccagagcagccctgagaccagcggcatcagcagcgccagcagcagcaccagcagcagcagcgccagcaccacccctgtggccgccaccaggacccacaagaggtctgtgtctggcctgtgcaacagcagcagcgccctgcccctgtacaaccagcaggtgggggactgctgcatcatccgggtgtccctggatgtggacaatggaaacatgtacaagagcatcctggtgaccagccaggacaaggccccagctgtgatcaggaaggccatggacaagcacaacctggaggaggaggagccagaagattatgagctgctgcagatcctgagtgatgacaggaagctgaagatcccagaaaatgccaacgtgttctacgccatgaacagcacagccaactatgactttgtgctgaagaagaggaccttcaccaagggcgtgaaggtgaagcacggggccagcagcaccctgcccaggatgaagcagaagggcctgaagatcgccaagggcatcttctag

SEQ ID NO: 96378 - DNA, 2658 bp, Artificial Sequence
  derived and/or modified sequence
atgtgcctgtggggccacagcaccgcccccgcccacaccctgagcagcccccctctcctcttctgtagtttaccctgtgccctgcatctgcagcccggtactggccacccacctggacaggttcctcggaagtcatccacgcaggaaatcggcgaagagctaattaacggcgtcatttactccatttccctacgtaaggtgcagctccatcatggcggcaacaagggccagcggtggctgggctacgagaacgaatctgcactgaacctctacgaaacatgcaaagtgaggaccgttaaggcaggcacgctggagaagctggtggagcatttggttcccgcttttcagggaagcgatttgagctacgttacaatttttctgtgtacctacagggctttcaccaccactcagcaggtgctagatctgctgttcaagagatatggctgcatactgccatatagcgacgaagatggaggccctcaagatcagttaaagaacgccattagcagtattctgggcacctggctcgaccagtactccgaggacttttgtcagccccctgattttccttgcctgaagcagctggtagcctacgttcagttaaatatgcctggctccgatcttgagagaagagcccatctcctgctggctcagctggaacacagcgagcctatagaggcagagcctgaggctctatccccagtcccggccttgaagccaacccccgaactcgagctagctttgacccccgccagggcaccgagtcccgtgccggcccctgcacctgagccggaaccggcgcccacaccagcacccggtagtgagttggaagttgcccctgcacccgcacctgagctccagcaagcaccagaacctgcagtaggcctggaaagcgcccctgctcccgcactggagctggaacccgcaccggaacaagatccggccccctctcagacactagagctggaacccgccccagctcctgtaccatctctccagccctcatggcccagtccagtcgtcgccgaaaacggcctctccgaggagaagccccacctgctcgtgttcccgccagatctggttgccgagcagttcaccctcatggacgctgagcttttcaaaaaggtggtaccataccactgcctggggagtatttggagccagcgcgataagaaagggaaggagcacttggccccaacaataagggctactgttacccagtttaacagcgtggctaactgtgtcattacaacctgtcttggcaaccgatcaaccaaggcgcccgacagagcacgtgttgtagagcactggattgaggttgctcgtgaatgcagaattcttaaaaatttctctagtctgtacgcaatcctctccgccctgcagtccaatagtatacacagacttaagaagacatgggaggacgtgagccgggatagctttagaatattccaaaaactcagcgagatattctcagacgagaacaactacagtctgtcccgcgagttgctgatcaaggaggggacttcaaaatttgctaccctggaaatgaatcctaaaagggctcagaagcgacccaaggaaacggggatcatacaggggacagtgccttaccttgggacgttcctcaccgatttggtgatgttggatactgcaatgaaagactatctgtatggccgattaatcaatttcgaaaagcgccgcaaagagtttgaagtgatcgcgcagattaagctgttacagtctgcctgcaacaactattccatagctcccgatgaacagttcggggcgtggttccgtgccgtggaaaggctgtccgagacggagagctataatctctcatgcgaactggaacctccttccgagagtgcttcaaacactctgaggaccaagaagaatactgctattgttaagagatggtccgatcgccaggcacccagtacagagctgtccacctctggaagcagccactccaagagttgtgatcagctgaggtgcggtccttacttgtcttcgggtgacatcgctgacgccctgagcgtacattctgcgggcagtagcagctcagacgtagaggaaataaacatcagctttgtccctgagagtccagatggtcaggagaaaaagttctgggaatcagcttcccaatcttcccctgagactagcggcatttcgtccgctagtagctccactagctcaagttccgcgtctacaaccccagtggctgcaactcgaacccataagcgatcagtgtcggggctctgtaattcttctagcgcactgccattatacaaccaacaggtcggggactgctgtatcattcgcgtgagtctcgacgtggataacggtaatatgtataaaagcattttggtcacatcacaggataaggccccggccgtgattcggaaagccatggacaagcacaacctggaggaggaggaacccgaggactacgaattgttacagattctgtccgacgaccggaagctgaagatcccagagaatgctaatgtattttacgctatgaactcaaccgcaaactatgatttcgtgttaaaaaagaggaccttcaccaagggtgtcaaggtgaagcacggtgccagcagcacgttaccccgcatgaaacagaagggcctgaagatcgctaaaggtattttctag

SEQ ID NO: 96379 - DNA, 2658 bp, Artificial Sequence
  derived and/or modified sequence
atgtgcttgtggggtcactcaaccgcacccgctcacacactgtcttctcctcctctcctgttctgttccttaccatgcgctctgcatcttcaacccggaactggacaccctcccggtcaggtgccaagaaaaagcagcacccaggagattggggaagagctaataaacggggttatatactcaatcagcctacggaaagtgcagctgcaccatggcggtaacaaggggcagcgttggctgggctatgagaatgagtcagcactcaatttgtatgagacctgcaaagtaagaacagtgaaagccggaacgttggagaaactcgtcgagcaccttgtgcctgccttccagggctccgacctgagttacgtgacaatcttcctgtgtacctatcgtgcgtttaccaccacgcagcaggtgctggatctgctatttaagaggtatggctgtatccttccttacagcgacgaagacggtggacctcaggatcagctcaaaaacgccatttcttcaattttgggtacttggcttgatcaatacagcgaagacttctgccagcccccagacttcccctgcctcaagcagctggtcgcctacgttcagttaaatatgcccggatcagatctggagaggcgagcccaccttctgctcgcccagctggagcactcagagccaattgaagccgaacccgaagcattgagccccgtgcccgcactgaaacctacccctgagctggagctggcactcactcctgcacgtgccccatcaccagtccctgctcccgctccggaacccgagccagcgcctacgcccgcacccggatccgaattggaggtagccccagcgcctgcccctgaactccaacaagcacccgaacctgctgtcggactcgagagcgctcctgctcctgcgctggagttggagcctgccccagaacaagatcctgctccttctcaaactctggagctggaacctgctcccgctcccgtgccaagtctacaacctagctggccctccccagttgtggccgaaaacggcctcagtgaagaaaaaccccacctgctcgtctttccccctgatctggttgcggaacagttcaccttaatggacgcagaactttttaagaaggtggtcccgtaccattgtcttgggtcgatctggtctcagcgcgataagaaaggcaaggaacacctggccccaacaattcgtgccacagttacccagttcaactcagtcgctaattgtgtaattaccacttgcctaggcaatcgaagcacgaaagcacctgatagggcccgagttgttgagcattggatagaggtagctagggagtgtcgcatcctgaaaaacttctctagcctttacgccattctgtcagccctccagagcaactccatccacaggttgaagaaaacatgggaggacgtgagccgcgactcgttccgtatttttcaaaagctaagtgagatcttctccgatgagaataactattccctttcccgcgagctgctcatcaaagaaggaacctcaaaatttgccacgctcgagatgaacccaaagagagcccagaagagacccaaggagactgggatcatccagggaaccgtcccatacctgggcacttttctgactgatctcgtgatgctggacacagctatgaaggattatctttatgggagactgattaacttcgagaaacggagaaaagaattcgaagttatcgcacagattaaactactgcagtcagcgtgcaataattacagcattgcacccgacgaacaattcggcgcatggttccgggcagttgagagattgagcgaaaccgaatcttacaatctctcatgtgaattggagcctccttcggagtccgcgtctaacacactgcgcacaaaaaaaaatactgccatagttaagcggtggtctgacagacaggccccaagcactgaactctctacctccggttcttctcactctaagagctgtgatcagttaagatgtggcccttatctctcatcaggcgacatcgctgacgctctctcagtgcactctgctggctcatcctctagcgatgttgaagaaatcaacatctctttcgtgcctgaaagcccagacggtcaggaaaagaaattctgggaaagcgcttctcaatcctctccagagacatccggcatctcgtccgcgagttcaagcaccagctccagcagtgcttctacgactccagttgctgccacaagaactcacaaacgaagcgttagcggactgtgtaactccagtagcgctttgcctctgtataatcagcaggtaggggactgttgtattataagggtcagcctggatgtagacaacggtaacatgtacaagtctattctcgttacaagtcaagacaaggcaccagctgtgatccggaaagcgatggataagcacaatctggaggaggaggaacctgaggattacgaactgttacagattctctccgatgacaggaagcttaaaatccctgaaaacgcgaatgtgttttatgcaatgaatagtaccgctaattacgacttcgtgctcaaaaaacgaacttttaccaagggggtaaaggtcaaacatggcgcatccagtactctccccaggatgaagcagaaaggcttaaagatcgccaagggtatattctag

SEQ ID NO: 96380 - DNA, 2919 bp, Artificial Sequence
  derived and/or modified sequence
agtgtctgggcgggaagccgggccccagggcctgatgtgcctgtgggggcactccacagcccctgcccacaccctctcctccccgcctctgctgttctgctccctgccctgtgccctccacttgcagccagggactgggcatccacccggccaggttcccaggaagagctccacgcaggagatcggtgaggagctgatcaacggagtcatctactccatctccctgcgcaaggtgcagctgcaccacggaggcaacaaggggcagcgctggctcgggtatgagaatgagtcggccctgaacctttatgagacttgcaaggtgcggaccgtgaaggctggcacgctggagaagctggtggagcacctggtgccagccttccagggcagcgacctctcctacgtcaccatcttcctgtgtacctatagagccttcaccaccacccaacaggtcctggacctgctgttcaaaagatacggctgcatcctcccctattccgacgaggatggtggaccccaggaccaacttaaaaatgccatctcctccatcctgggcacctggctggaccagtactcggaggatttctgtcaacctccggactttccctgcctcaagcagctggtggcctacgtgcagctcaacatgccaggctcagacctggagcgccgtgcccaccttctcctggcccagctggagcactcggaacccattgaggcagagcctgaggctctgtcaccagtgccagctctaaaaccaactccagagctcgagctagctctaacaccagctcgagcacccagcccagtgccggctccagccccggagccagagccagctccaacaccagctccaggttcagagctagaagtagctccagcaccagctccggagctccagcaggctccagagccagctgtgggactagaatcggctccagcgccagctctggaactagagccagctccagaacaggatccagctccctcacaaactctagagctggagccagctccagcaccagttccatcattacagccttcctggccttcacctgtggttgcagagaacgggctgagtgaggagaagcctcacctcttggtgttccctccagatctggtggcagagcagtttacactgatggatgcggaactgttcaagaaggtggtgccctaccactgcctgggctccatctggtcccagcgggacaagaagggcaaggagcacctggcgcccaccatccgcgccactgtcacccagttcaacagtgtggccaactgtgtcatcaccacctgcctcgggaaccgaagcacgaaagccccagacagggccagggtggtggagcactggatcgaggtggccagggagtgccggatcctcaagaacttctcgtcactgtatgccatcctctctgccctgcagagcaactccatccaccgtctgaagaagacgtgggaagacgtttccagggacagtttccggatctttcagaagctgtcagagatcttctcagatgagaacaactactcattgagccgggagctgctcatcaaggagggcacctccaagtttgccaccctggagatgaaccccaagagagcccagaaacggccgaaggagacgggcatcatccagggcaccgttccctacctgggcacgttcctcaccgacctggtgatgctggacactgccatgaaggactatctgtatggcagactcatcaactttgagaagaggaggaaggagttcgaggtgatcgcccagatcaagctgctgcagtcggcctgcaacaactacagcatcgcgccagatgagcaatttggggcctggttccgggccgtggagcggctcagcgagactgagagctacaacctgtcgtgcgagctggagcccccatccgagtcagccagcaacaccctcaggaccaagaagaacacagccattgtcaagcgctggagcgaccgccaggcccccagcactgagctcagtaccagtggcagctcccactccaagtcctgtgaccagctcaggtgtggcccctacctcagcagcggggacatcgctgacgcgctcagcgtgcactcggccggctcctctagctccgacgtggaggagatcaacatcagcttcgtcccggagtctcctgatggccaggaaaagaagttctgggaatcagcctcacagtcatccccggagacctccggcatcagctcagcctccagcagcacctcgtcctcctcagcctccaccacgcccgtggctgccacacgcacccacaagcgctctgtctcagggctctgcaactccagctccgcgctgccgctctacaaccagcaggtgggcgactgctgtatcatccgcgtcagcctggacgtggacaatggcaacatgtacaagagcatcctggtgaccagccaagataaggctccggctgtaatccgcaaggccatggacaaacacaacctggaggaggaggagccggaggactatgagctgctgcagattctctcagatgaccggaagctgaagatccctgaaaacgccaacgtcttctatgccatgaactctaccgccaactatgactttgtcctcaagaagcggaccttcaccaagggagtgaaggtcaagcacggagccagctccaccctccctcgcatgaagcagaaaggactcaagattgccaagggcatcttctgagggcatcctcccagggtctggctggctggtagccaagcacttatggaccagagtggcccaggccagctgggcgccttcctcccacctgccagcccagggtaccccagactccagtttcatcctgaacctctcccgctgctgggattgacgcctgccattggtcaggctgacctggcctcccgtggaccactcgctgccttaggtgccttctgctctctggaaccaga

SEQ ID NO: 96381 - DNA, 2658 bp, Artificial Sequence
  derived and/or modified sequence
atgtgcctgtggggccacagcaccgcccccgcccacaccctgagcagcccccccctgctgttctgcagcctgccctgcgccctgcacctgcagcccggcaccggccacccccccggccaggtgcccagaaagagcagcacccaggagatcggcgaggagctgatcaacggcgtgatctacagcatcagcctgagaaaggtgcagctgcaccacggcggcaacaagggccagagatggctgggctacgagaacgagagcgccctgaacctgtacgagacctgcaaggtgagaaccgtgaaggccggcaccctggagaagctggtggagcacctggtgcccgccttccagggcagcgacctgagctacgtgaccatcttcctgtgcacctacagagccttcaccaccacccagcaggtgctggacctgctgttcaagagatacggctgcatcctgccctacagcgacgaggacggcggcccccaggaccagctgaagaacgccatcagcagcatcctgggcacctggctggaccagtacagcgaggacttctgccagccccccgacttcccctgcctgaagcagctggtggcctacgtgcagctgaacatgcccggcagcgacctggagagaagagcccacctgctgctggcccagctggagcacagcgagcccatcgaggccgagcccgaggccctgagccccgtgcccgccctgaagcccacccccgagctggagctggccctgacccccgccagagcccccagccccgtgcccgcccccgcccccgagcccgagcccgcccccacccccgcccccggcagcgagctggaggtggcccccgcccccgcccccgagctgcagcaggcccccgagcccgccgtgggcctggagagcgcccccgcccccgccctggagctggagcccgcccccgagcaggaccccgcccccagccagaccctggagctggagcccgcccccgcccccgtgcccagcctgcagcccagctggcccagccccgtggtggccgagaacggcctgagcgaggagaagccccacctgctggtgttcccccccgacctggtggccgagcagttcaccctgatggacgccgagctgttcaagaaggtggtgccctaccactgcctgggcagcatctggagccagagagacaagaagggcaaggagcacctggcccccaccatcagagccaccgtgacccagttcaacagcgtggccaactgcgtgatcaccacctgcctgggcaacagaagcaccaaggcccccgacagagccagagtggtggagcactggatcgaggtggccagagagtgcagaatcctgaagaacttcagcagcctgtacgccatcctgagcgccctgcagagcaacagcatccacagactgaagaagacctgggaggacgtgagcagagacagcttcagaatcttccagaagctgagcgagatcttcagcgacgagaacaactacagcctgagcagagagctgctgatcaaggagggcaccagcaagttcgccaccctggagatgaaccccaagagagcccagaagagacccaaggagaccggcatcatccagggcaccgtgccctacctgggcaccttcctgaccgacctggtgatgctggacaccgccatgaaggactacctgtacggcagactgatcaacttcgagaagagaagaaaggagttcgaggtgatcgcccagatcaagctgctgcagagcgcctgcaacaactacagcatcgcccccgacgagcagttcggcgcctggttcagagccgtggagagactgagcgagaccgagagctacaacctgagctgcgagctggagccccccagcgagagcgccagcaacaccctgagaaccaagaagaacaccgccatcgtgaagagatggagcgacagacaggcccccagcaccgagctgagcaccagcggcagcagccacagcaagagctgcgaccagctgagatgcggcccctacctgagcagcggcgacatcgccgacgccctgagcgtgcacagcgccggcagcagcagcagcgacgtggaggagatcaacatcagcttcgtgcccgagagccccgacggccaggagaagaagttctgggagagcgccagccagagcagccccgagaccagcggcatcagcagcgccagcagcagcaccagcagcagcagcgccagcaccacccccgtggccgccaccagaacccacaagagaagcgtgagcggcctgtgcaacagcagcagcgccctgcccctgtacaaccagcaggtgggcgactgctgcatcatcagagtgagcctggacgtggacaacggcaacatgtacaagagcatcctggtgaccagccaggacaaggcccccgccgtgatcagaaaggccatggacaagcacaacctggaggaggaggagcccgaggactacgagctgctgcagatcctgagcgacgacagaaagctgaagatccccgagaacgccaacgtgttctacgccatgaacagcaccgccaactacgacttcgtgctgaagaagagaaccttcaccaagggcgtgaaggtgaagcacggcgccagcagcaccctgcccagaatgaagcagaagggcctgaagatcgccaagggcatcttctag

SEQ ID NO: 96382 - protein, 913 aa, Artificial Sequence
  derived and/or modified sequence
MAREAGQVCARPAVPRGRKGSVFFACVSVVTARRRAVARRAALQSPTPWLAPLPAPATTESSTQEIGEELINGVIYSISLRKVQLHHGGNKGQRWLGYENESALNLYETCKVRTVKAGTLEKLVEHLVPAFQGSDLSYVTIFLCTYRAFTTTQQVLDLLFKRYGRCDALTASSRYGCILPYSDEDGGPQDQLKNAISSILGTWLDQYSEDFCQPPDFPCLKQLVAYVQLNMPGSDLERRAHLLLAQLEHSEPIEAEPEALSPVPALKPTPELELALTPARAPSPVPAPAPEPEPAPTPAPGSELEVAPAPAPELQQAPEPAVGLESAPAPALELEPAPEQDPAPSQTLELEPAPAPVPSLQPSWPSPVVAENGLSEEKPHLLVFPPDLVAEQFTLMDAELFKKVVPYHCLGSIWSQRDKKGKEHLAPTIRATVTQFNSVANCVITTCLGNRSTKAPDRARVVEHWIEVARECRILKNFSSLYAILSALQSNSIHRLKKTWEDVSRDSFRIFQKLSEIFSDENNYSLSRELLIKEGTSKFATLEMNPKRAQKRPKETGIIQGTVPYLGTFLTDLVMLDTAMKDYLYGRLINFEKRRKEFEVIAQIKLLQSACNNYSIAPDEQFGAWFRAVERLSETESYNLSCELEPPSESASNTLRTKKNTAIVKRWSDRQAPSTELSTSGSSHSKSCDQLRCGPYLSSGDIADALSVHSAGSSSSDVEEINISFVPESPDGQEKKFWESASQSSPETSGISSASSSTSSSSASTTPVAATRTHKRSVSGLCNSSSALPLYNQQVGDCCIIRVSLDVDNGNMYKSILVTSQDKAPAVIRKAMDKHNLEEEEPEDYELLQILSDDRKLKIPENANVFYAMNSTANYDFVLKKRTFTKGVKVKHGASSTLPRMKQKGLKIAKGIF

SEQ ID NO: 96383 - protein, 985 aa, Artificial Sequence
  derived and/or modified sequence
MHRRRLALGLGFCLLAGTSLSVLWVYLENWLPVSYVPYYLPCPEILPMMMALSCLCHQQHEAALQEGEATPARGMVTVPSAQAAGAQAHTAADTHTLVGAHRLRGNLQPRASAAHLPATEPDHWGHGVCRGESSTQEIGEELINGVIYSISLRKVQLHHGGNKGQRWLGYENESALNLYETCKVRTVKAGTLEKLVEHLVPAFQGSDLSYVTIFLCTYRAFTTTQQVLDLLFKRYGRCDALTASSRYGCILPYSDEDGGPQDQLKNAISSILGTWLDQYSEDFCQPPDFPCLKQLVAYVQLNMPGSDLERRAHLLLAQLEHSEPIEAEPEALSPVPALKPTPELELALTPARAPSPVPAPAPEPEPAPTPAPGSELEVAPAPAPELQQAPEPAVGLESAPAPALELEPAPEQDPAPSQTLELEPAPAPVPSLQPSWPSPVVAENGLSEEKPHLLVFPPDLVAEQFTLMDAELFKKVVPYHCLGSIWSQRDKKGKEHLAPTIRATVTQFNSVANCVITTCLGNRSTKAPDRARVVEHWIEVARECRILKNFSSLYAILSALQSNSIHRLKKTWEDVSRDSFRIFQKLSEIFSDENNYSLSRELLIKEGTSKFATLEMNPKRAQKRPKETGIIQGTVPYLGTFLTDLVMLDTAMKDYLYGRLINFEKRRKEFEVIAQIKLLQSACNNYSIAPDEQFGAWFRAVERLSETESYNLSCELEPPSESASNTLRTKKNTAIVKRWSDRQAPSTELSTSGSSHSKSCDQLRCGPYLSSGDIADALSVHSAGSSSSDVEEINISFVPESPDGQEKKFWESASQSSPETSGISSASSSTSSSSASTTPVAATRTHKRSVSGLCNSSSALPLYNQQVGDCCIIRVSLDVDNGNMYKSILVTSQDKAPAVIRKAMDKHNLEEEEPEDYELLQILSDDRKLKIPENANVFYAMNSTANYDFVLKKRTFTKGVKVKHGASSTLPRMKQKGLKIAKGIF

SEQ ID NO: 96384 - DNA, 2742 bp, Artificial Sequence
  derived and/or modified sequence
atggcccgggaagctggacaggtctgtgcccgaccagctgtacctagggggcggaagggtagtgtcttttttgcttgtgtgagcgtagtgaccgccaggcggcgcgcagtggccagacgtgcggcactgcagtctcctacaccctggttggctcccttacccgctcccgcaaccactgagtcaagtacacaggaaattggcgaggaattaattaatggcgtgatctactccatctctctgaggaaagtgcaacttcaccacggtggaaacaaggggcaacgttggctcggctacgagaacgaatctgccctcaatttatacgagacatgcaaagtgagaacagtgaaagcaggcaccctggaaaagctggtggaacatttagttccagccttccaaggcagcgatctttcctacgtgactattttcctatgtacttacagggcctttaccactactcaacaggtacttgacctgctatttaaacgctacggcaggtgtgatgcgctcaccgcctcttcgcgatatggctgcatccttccatacagtgacgaagacggaggccctcaagatcagctgaaaaatgcaatctcaagtatcttgggcacatggttggatcagtactctgaggacttctgccagccccctgactttccgtgtctaaaacaactcgtcgcatatgttcaactgaatatgccagggtcagacctggagcgcagagcccacttgctcctcgcccagctggaacatagtgaacctattgaagcagaacctgaggctctttctcctgtgcctgctctgaagcccacaccagagctggaattagcattaactcccgcgagggccccttctccagtgcctgccccagccccagagccagagccagccccaacgcccgccccgggttccgaattagaggtggccccggcccctgctcctgagctgcagcaagccccagaaccagccgtgggcctcgagtctgcacccgcccccgctttggaattggagcccgcaccagagcaggaccccgccccctcccaaaccctggagctcgagcctgcccctgctccagtcccaagtcttcagccctcttggccctcaccagtggtggctgaaaacgggttgtccgaggaaaagccgcatctgctggtcttccctccagatttggttgcggagcagtttactctaatggatgccgagctgttcaagaaggtggtgccttatcattgtctcggctctatttggtcccagagggataagaaagggaaggaacacttagcacccactattcgggccactgtgacacagtttaacagcgtcgctaattgtgtgatcactacgtgccttggcaaccggtccactaaggcccctgatcgggctcgcgtcgtcgagcactggattgaagtcgctagggagtgcaggattctaaaaaatttctcctcgctgtatgccattctatctgctcttcagagcaattccatccatcggctaaagaagacgtgggaggacgtttctcgagactcattccgtatcttccaaaaactcagcgaaatattctccgacgagaacaattactctctgtctagggagcttctcatcaaggagggaacaagcaaattcgccaccctagagatgaatcctaagagagcgcaaaagcgcccgaaggaaacagggatcatccaagggacagtgccatacctcggcacctttctgaccgatctggtcatgttggacactgctatgaaagactatctgtatggccggctcatcaattttgagaaacgccgcaaggagttcgaggtgatagcacagatcaaacttctccagtccgcttgtaacaactactccatcgccccagatgaacagtttggcgcatggtttagagctgtagagcgactctcggaaaccgaatcctacaacctgtcctgcgaacttgaacccccatccgagtctgcctccaacactctgcggactaaaaagaacactgccattgttaaaaggtggagtgataggcaggcaccgagcaccgaactgtccactagtggttcgagccatagcaagtcctgcgaccagttacggtgcggaccttacctgagtagcggcgatatcgccgatgcattgagcgtacattcagcaggtagctctagtagcgacgtggaagaaataaacatttcctttgtgccggagagcccggacggccaggaaaaaaagttctgggaaagtgcaagccagagcagccccgagacttcaggtatatccagcgcctcttcgtctacatcctcgtcgagcgccagcacgaccccagtggccgctaccaggacacacaagcgctcagttagcgggttgtgtaatagtagctccgcccttcccctgtataatcagcaggtgggtgattgttgcatcatccgagtatcgctcgatgtggacaatgggaacatgtacaagtccatactggtcacatcgcaggacaaggcaccagccgttattcgtaaagctatggacaaacacaatctggaagaagaagaacccgaggattacgagctactccagatcctgtccgatgatcgcaaacttaagatccccgaaaacgccaacgtgttctacgcaatgaacagcaccgctaactatgacttcgttcttaaaaaacgcacattcacaaagggggtgaaggtcaagcacggcgcgagttcgactctgccccgcatgaagcagaaggggctaaaaatagccaagggaatcttctag

SEQ ID NO: 96385 - DNA, 2742 bp, Artificial Sequence
  derived and/or modified sequence
atggcccgggaggccggccaggtgtgtgcccggcctgctgtgccccggggcaggaaaggatctgtgttctttgcctgtgtgtctgtggtgacagcccggcggcgggctgtggccaggagagctgccctgcagagccccaccccctggctggcccccctgcctgccccagccaccacagagagcagcacccaggagatcggggaggagctgatcaacggggtcatctacagcatcagcctgaggaaggtgcagctgcaccacggcggcaacaagggccagcgctggctgggctatgaaaatgaaagtgccctgaacctgtatgagacctgcaaggtgaggacagtgaaggccggcaccctggagaagctggtggagcacctggtgcctgccttccagggcagtgacctgtcctatgtgaccatcttcctgtgcacctaccgggccttcaccaccacccagcaggtgctggacctgctcttcaagagatatggccgctgtgatgccctgacagccagcagccgctatggctgcatcctgccctacagtgatgaagatggcggcccccaggaccagctgaagaatgccatcagcagcatcctgggcacctggctggaccagtacagcgaggacttctgccagcccccagacttcccctgcctgaagcagctggtggcctacgtgcagctgaacatgcctggcagtgacctggagcggcgggcccacctgctgctggcccagctggagcacagcgagcccattgaagctgagcctgaggccctgagccctgtgcctgccctgaagcccaccccagagctggagctggccctgaccccagcccgggcccccagccctgtgcctgccccagcccctgagcctgagcccgcccccaccccagcccctggcagcgagctggaggtggccccagccccagcccctgagctgcagcaggcccctgagcctgctgtgggcctggagagcgccccagccccagccctggagctggagcccgcccctgagcaggaccctgcccccagccagaccctggagctggagcccgccccagcccctgtgcccagcctgcagcccagctggcccagccctgtggtggctgaaaatggcctgtctgaggagaagccccacctgctggtgtttcctccagacctggtggccgagcagttcaccctgatggatgctgagctgttcaagaaggtggtgccctaccactgcctgggcagcatctggagccagagggacaagaagggcaaggagcacctggcccccaccatccgggccaccgtgacccagttcaacagcgtggccaactgtgtgatcaccacctgcctgggcaacagaagcaccaaggccccagaccgggcccgggtggtggagcactggattgaggtggccagagaatgtcgcatcctgaagaacttcagcagcctgtatgccatcctgagcgccctgcagagcaacagcatccaccggctgaagaagacctgggaggatgtgtcccgggacagcttccgcatcttccagaagctgtctgagatcttcagtgatgagaacaactacagcctgagccgggagctgctgatcaaggagggcaccagcaagtttgccaccctggagatgaaccccaagagggcccagaagaggcccaaggagaccggcatcatccagggcaccgtgccctacctgggcaccttcctgacagacctggtgatgctggacacagccatgaaggactacctgtatggccgcctcatcaactttgagaagaggaggaaggagtttgaggtgattgcccagatcaagctgctgcagagcgcctgcaacaactacagcatcgccccagatgagcagtttggagcctggttccgggctgtggagcggctgtctgaaacagagagctacaacctgagctgtgagctggagccccccagcgagagcgccagcaacaccctgcggaccaagaagaacacagccatcgtgaagcgctggagcgaccggcaggcccccagcacagagctgagcaccagcggcagcagccacagcaagagctgtgaccagctgcgctgtggcccctacctgagcagcggggacattgctgatgccctgtctgtgcacagcgctggcagcagcagcagtgatgtggaggagatcaacatcagctttgtgcctgagagcccagatggccaggagaagaagttctgggagagcgccagccagagcagccctgagaccagcggcatcagcagcgccagcagcagcaccagcagcagcagcgccagcaccacccctgtggccgccaccaggacccacaagaggtctgtgtctggcctgtgcaacagcagcagcgccctgcccctgtacaaccagcaggtgggggactgctgcatcatccgggtgtccctggatgtggacaatggaaacatgtacaagagcatcctggtgaccagccaggacaaggccccagctgtgatcaggaaggccatggacaagcacaacctggaggaggaggagccagaagattatgagctgctgcagatcctgagtgatgacaggaagctgaagatcccagaaaatgccaacgtgttctacgccatgaacagcacagccaactatgactttgtgctgaagaagaggaccttcaccaagggcgtgaaggtgaagcacggggccagcagcaccctgcccaggatgaagcagaagggcctgaagatcgccaagggcatcttctag

SEQ ID NO: 96386 - DNA, 2742 bp, Artificial Sequence
  derived and/or modified sequence
atggcccgggaggccggccaggtgtgcgcccggcccgccgtgccccggggacgcaaagggtctgttttcttcgcttgtgtgtccgtagtgactgcccggcggagggccgtggctcgccgcgctgccctgcagagcccaaccccctggctggccccgcttccggcccctgccacgacggagtcttctacccaggaaattggagaggaactgattaatggagtcatttactccatttcactgcgtaaggttcagcttcatcatggcgggaataaaggccagcggtggctggggtacgaaaacgaaagcgccctaaacttatacgagacctgtaaagttaggacagttaaagctgggactttggagaaattagttgagcacttagtccccgcctttcaggggagtgacctgtcctacgtgacgattttcctgtgtacctatcgtgcgttcaccacaacacagcaggtgctggatctcctatttaaacgctacgggcgatgtgatgcactgaccgcctctagccgttatgggtgtattctgccatattcggatgaggacgggggtcctcaggaccagttaaagaacgctatcagcagcattcttggtacatggctggatcagtattccgaagatttctgccagccgcctgacttcccctgtctcaagcagcttgttgcttatgtacagcttaacatgcccgggtctgatctggagcggcgagcacacttactgcttgcacagttggaacatagcgagccaatcgaagctgagccagaagctctctccccagtgcccgctctgaaacctacccctgaactggagttagctctgacccccgctagggcaccttctcccgtgccagcacccgcccctgaacccgaacccgccccgacaccagctcccgggtccgagctggaggtggcaccagcgccagcgcccgagctacaacaagctccggagcctgctgtgggactcgaatctgcccccgcacccgccctggagctcgaaccagcgcctgaacaagacccagccccgagtcagaccctcgagctggagcccgcgcccgccccagtcccgagcctgcaaccaagttggccttcaccagtggtggcagagaatgggttaagcgaagaaaagccccacctgctcgtctttccccctgacctggttgcagagcagttcaccctcatggacgcggaactttttaaaaaggtggtcccctatcactgtctgggttcaatctggtctcagagagataaaaagggcaaagaacacctcgccccaacaatccgagcgaccgtgactcaatttaacagcgtcgctaattgtgtgattacaacatgtctcggaaacagaagcacaaaagcgcctgaccgtgctcgggtcgtcgagcattggatcgaggttgctcgcgagtgtcgaatcctgaaaaatttttcctctctgtatgcgatcctgagtgctctccagagcaactcgatccataggctcaagaagacgtgggaagacgtgtcacgagatagctttcgcatcttccaaaagctgagcgagatctttagcgacgaaaataactatagcctttctcgagaactcttaataaaagaggggaccagtaaattcgcgacactggagatgaacccaaagcgagcacaaaagcggccaaaggaaaccggtataattcaaggcacggtgccgtacctggggacatttttgaccgaccttgttatgctggacaccgcaatgaaggactacctctatgggaggctgatcaacttcgaaaagcgcaggaaggagtttgaagtaatagcccagattaaactgctccagagcgcttgcaacaactattcgatcgccccagatgaacaatttggggcttggtttagggcagtagagagactgtccgagacggagtcatacaatctgtcttgcgaacttgaacccccttcagaatccgcgagcaataccctgagaaccaaaaaaaatactgctatcgttaagaggtggtcagataggcaggccccgtccaccgagctctcaacatcagggtcttcgcattcaaagtcatgcgaccagttaaggtgtgggccctacttaagcagtggggacatcgccgatgcattgagcgtgcacagcgcaggttcaagctcttcagacgttgaggaaattaatattagctttgtccccgagtctcccgatggtcaggaaaaaaagttttgggaatctgcgtcccaatcaagtcccgagactagtggtatatcatccgcttcatccagcacgagcagctctagcgcctctaccacgcctgtggcagcaactcgaacacacaaacggagcgtgtccggcctgtgcaattccagttccgcactgccactttacaatcaacaagtgggcgattgctgtatcatacgggtctccttggatgtggacaatggaaatatgtacaaatctatcctcgtaacctcccaggataaagctcccgccgtgatcagaaaggcaatggacaagcacaaccttgaggaggaagagcccgaagactatgagctcttacagatcctgtctgacgatcgtaaactgaagatccctgaaaatgcaaatgtgttttatgccatgaatagcactgccaattacgatttcgtgctgaagaaaaggacatttactaagggtgttaaggtgaagcacggagctagctcaacactcccgcggatgaagcagaagggcctgaagattgctaaaggaatattctag

SEQ ID NO: 96387 - DNA, 2742 bp, Artificial Sequence
  derived and/or modified sequence
atggcacgcgaagctgggcaagtttgcgcacgccctgctgtgcccagaggccgaaagggctccgtgttttttgcctgtgtcagcgtggtcaccgcccgtaggagagctgtggctcgcagagcagcactccagtctcccactccctggctggcaccattacccgcacccgctactacagaatcctccacacaggaaataggtgaagaactgatcaacggcgtcatctatagtatctcgttacgtaaggtgcaactccatcatgggggtaacaaaggtcagcgctggttgggttacgaaaatgagtctgccttgaacttatacgagacctgcaaagtgagaactgtgaaggcaggcacactcgaaaaactggtggaacacctggtaccagcgttccagggaagcgacctctcttatgtcactattttcctgtgcacttatcgcgcatttacaaccacccagcaggtgctagacctcttgtttaagagatacggacgttgtgacgctttaacagcctcatctcggtacggctgcatactgccttattcagacgaggacggagggcctcaggaccagctcaagaacgctatctcttccattctgggcacatggctggatcagtattcagaggacttctgtcagcccccagattttccatgcctcaagcagttagtggcctacgtgcagttgaacatgcctggttctgaccttgaacgcagagctcatctgctgctcgcccagttggagcattccgagcccatcgaagcagaacccgaagccctttcccctgtacctgcactcaaacccactcccgagttggaactcgccctgacccccgcaagagcccctagcccggtgcctgcccctgcccctgagcctgagcctgctccaacgccagctcccggaagtgagctagaggtggcccctgcccctgccccagagctgcaacaagccccagaacctgccgtcggattagagagcgctcctgcacctgctttggagctcgaaccggctccggagcaggatcccgcaccatcgcagaccctggagctggagcccgcacccgctcccgtgccctcactgcagccgagctggccctcccctgtggtggccgagaacggccttagtgaagagaagcctcatctgctggtgttccctcccgatctggtggccgagcagtttaccctaatggacgcagagttgtttaaaaaagtagttccataccattgcctgggatctatatggtctcagcgcgacaagaagggcaaggaacatctcgcacctactatccgcgcaacagtcacccaattcaattctgtggccaattgcgtgatcacaacctgcctgggcaatcgcagtactaaagccccagatcgagcgagggtagtggagcactggattgaagttgcaagggaatgccgcattctgaagaatttctcatcactatatgccatcctgtctgccttgcaaagcaatagtatccaccgactgaagaagacttgggaagatgtctcccgcgacagttttaggattttccagaagttgagtgagatcttttctgatgagaataactactccctgagcagagaattactgattaaggaggggacttctaagttcgcaacactcgaaatgaacccaaagcgtgcacagaagcgccctaaagagactggcatcattcagggcaccgtgccttatctgggaacttttttaaccgaccttgtgatgcttgacacagctatgaaagactatctctacgggaggctcatcaatttcgagaagaggcgaaaagagtttgaggtgattgcccaaatcaaactattacagtctgcctgtaacaattacagcatcgccccagacgagcagtttggcgcttggtttcgagctgttgagaggctttcagaaaccgagtcatataatctcagttgtgaattggagccaccttccgaatccgcgtcgaacacactgagaactaagaaaaacacagccatagtgaaacgatggtccgataggcaggctccttccacagaactgtccacctctggatcatcacacagtaagtcatgtgaccagttgcgatgcggcccttatctaagctcaggcgacatcgcagacgccctatccgtgcactcagcaggcagcagttcatccgatgtggaggaaattaacatctctttcgtgccagaatccccagacggacaagaaaaaaagttttgggaatcagcatcccaatccagtccagagacaagcgggatcagtagcgcgtcttcttctacatcctcatcgagtgcctccacgacaccggtggctgctacccggacccacaagagatcagtgagcggtctgtgtaatagtagttcagccctgccattatacaatcaacaagtgggcgattgctgtataatccgcgtaagtttggacgtcgataatgggaatatgtacaaaagcatcctggtaactagtcaagacaaagcgccagccgtcatacggaaagccatggacaaacataacttggaagaggaagaaccagaggactacgagcttctccagatcttatcagatgaccgtaaactgaaaattcccgaaaacgcaaacgtcttctacgccatgaactccactgccaattacgattttgtgctgaaaaaacggacttttaccaaaggagtcaaagtcaaacacggagcctcaagtacactgcctaggatgaagcagaaaggtcttaagattgccaaaggtatattctag

SEQ ID NO: 96388 - DNA, 3691 bp, Artificial Sequence
  derived and/or modified sequence
actccactagggcacgcaggcgacgagcacactggcagagggcctcccgcagggcccactccccacctggctctcgccccaccatggcccgggaagcaggccaggtttgtgccaggcctgccgtgcccagggggaggaagggctctgtgttctttgcctgtgtctctgtggtgaccgccaggagaagggccgtcgcccgtcgtgccgctctccaaagcccgacaccttggctggcacctctgccagcaccggccaccaccgagagctccacgcaggagatcggtgaggagctgatcaacggagtcatctactccatctccctgcgcaaggtgcagctgcaccacggaggcaacaaggggcagcgctggctcgggtatgagaatgagtcggccctgaacctttatgagacttgcaaggtgcggaccgtgaaggctggcacgctggagaagctggtggagcacctggtgccagccttccagggcagcgacctctcctacgtcaccatcttcctgtgtacctatagagccttcaccaccacccaacaggtcctggacctgctgttcaaaaggtacggtagatgtgacgccctcacggcctcctctagatacggctgcatcctcccctattccgacgaggatggtggaccccaggaccaacttaaaaatgccatctcctccatcctgggcacctggctggaccagtactcggaggatttctgtcaacctccggactttccctgcctcaagcagctggtggcctacgtgcagctcaacatgccaggctcagacctggagcgccgtgcccaccttctcctggcccagctggagcactcggaacccattgaggcagagcctgaggctctgtcaccagtgccagctctaaaaccaactccagagctcgagctagctctaacaccagctcgagcacccagcccagtgccggctccagccccggagccagagccagctccaacaccagctccaggttcagagctagaagtagctccagcaccagctccggagctccagcaggctccagagccagctgtgggactagaatcggctccagcgccagctctggaactagagccagctccagaacaggatccagctccctcacaaactctagagctggagccagctccagcaccagttccatcattacagccttcctggccttcacctgtggttgcagagaacgggctgagtgaggagaagcctcacctcttggtgttccctccagatctggtggcagagcagtttacactgatggatgcggaactgttcaagaaggtggtgccctaccactgcctgggctccatctggtcccagcgggacaagaagggcaaggagcacctggcgcccaccatccgcgccactgtcacccagttcaacagtgtggccaactgtgtcatcaccacctgcctcgggaaccgaagcacgaaagccccagacagggccagggtggtggagcactggatcgaggtggccagggagtgccggatcctcaagaacttctcgtcactgtatgccatcctctctgccctgcagagcaactccatccaccgtctgaagaagacgtgggaagacgtttccagggacagtttccggatctttcagaagctgtcagagatcttctcagatgagaacaactactcattgagccgggagctgctcatcaaggagggcacctccaagtttgccaccctggagatgaaccccaagagagcccagaaacggccgaaggagacgggcatcatccagggcaccgttccctacctgggcacgttcctcaccgacctggtgatgctggacactgccatgaaggactatctgtatggcagactcatcaactttgagaagaggaggaaggagttcgaggtgatcgcccagatcaagctgctgcagtcggcctgcaacaactacagcatcgcgccagatgagcaatttggggcctggttccgggccgtggagcggctcagcgagactgagagctacaacctgtcgtgcgagctggagcccccatccgagtcagccagcaacaccctcaggaccaagaagaacacagccattgtcaagcgctggagcgaccgccaggcccccagcactgagctcagtaccagtggcagctcccactccaagtcctgtgaccagctcaggtgtggcccctacctcagcagcggggacatcgctgacgcgctcagcgtgcactcggccggctcctctagctccgacgtggaggagatcaacatcagcttcgtcccggagtctcctgatggccaggaaaagaagttctgggaatcagcctcacagtcatccccggagacctccggcatcagctcagcctccagcagcacctcgtcctcctcagcctccaccacgcccgtggctgccacacgcacccacaagcgctctgtctcagggctctgcaactccagctccgcgctgccgctctacaaccagcaggtgggcgactgctgtatcatccgcgtcagcctggacgtggacaatggcaacatgtacaagagcatcctggtgaccagccaagataaggctccggctgtaatccgcaaggccatggacaaacacaacctggaggaggaggagccggaggactatgagctgctgcagattctctcagatgaccggaagctgaagatccctgaaaacgccaacgtcttctatgccatgaactctaccgccaactatgactttgtcctcaagaagcggaccttcaccaagggagtgaaggtcaagcacggagccagctccaccctccctcgcatgaagcagaaaggactcaagattgccaagggcatcttctgagggcatcctcccagggtctggctggctggtagccaagcacttatggaccagagtggcccaggccagctgggcgccttcctcccacctgccagcccagggtaccccagactccagtttcatcctgaacctctcccgctgctgggattgacgcctgccattggtcaggctgacctggcctcccgtggaccactcgctgccttaggtgccttctgctctctggaaccagaggactagctgacttttgccaaggagcagtgccaacgggcatggcatggtgccctgcctgcccccgggcgccacctctgtacacttccctgacaccttcccaggtgtgggtcactgccacctgtgcccatgggcaccccagagcacccactgtgaccactgcagttctctcatgcccacaggcactggcctgtgaccttcgcaggggtcccggcccctcccaccactctagcctttctcaggctgcaccaaagattccatcatcagggccaactgagagtgagggagtctcacccaccgcttaccccagccctcccctgggagcagagagagaaaccctcttcatggaccagactctgcacccggtgagtgaggacagtcccagctgagtcccatcgatgttgaatctcatgccactgcaagtgccattcaccactgcgtcctgggctttacgagaccatgcaagacgggggttagtgaggaaggaggatttggggtgggggtggggtgattgaatatttgtataaaaagcaaaaagaaaaaaaaaatgtttgtttactgattggggaggggcaatatttatttgttgtaaatagcaaatgctagacttgaatattatattaaaatcctgtttctactat

SEQ ID NO: 96389 - DNA, 2742 bp, Artificial Sequence
  derived and/or modified sequence
atggccagagaggccggccaggtgtgcgccagacccgccgtgcccagaggcagaaagggcagcgtgttcttcgcctgcgtgagcgtggtgaccgccagaagaagagccgtggccagaagagccgccctgcagagccccaccccctggctggcccccctgcccgcccccgccaccaccgagagcagcacccaggagatcggcgaggagctgatcaacggcgtgatctacagcatcagcctgagaaaggtgcagctgcaccacggcggcaacaagggccagagatggctgggctacgagaacgagagcgccctgaacctgtacgagacctgcaaggtgagaaccgtgaaggccggcaccctggagaagctggtggagcacctggtgcccgccttccagggcagcgacctgagctacgtgaccatcttcctgtgcacctacagagccttcaccaccacccagcaggtgctggacctgctgttcaagagatacggcagatgcgacgccctgaccgccagcagcagatacggctgcatcctgccctacagcgacgaggacggcggcccccaggaccagctgaagaacgccatcagcagcatcctgggcacctggctggaccagtacagcgaggacttctgccagccccccgacttcccctgcctgaagcagctggtggcctacgtgcagctgaacatgcccggcagcgacctggagagaagagcccacctgctgctggcccagctggagcacagcgagcccatcgaggccgagcccgaggccctgagccccgtgcccgccctgaagcccacccccgagctggagctggccctgacccccgccagagcccccagccccgtgcccgcccccgcccccgagcccgagcccgcccccacccccgcccccggcagcgagctggaggtggcccccgcccccgcccccgagctgcagcaggcccccgagcccgccgtgggcctggagagcgcccccgcccccgccctggagctggagcccgcccccgagcaggaccccgcccccagccagaccctggagctggagcccgcccccgcccccgtgcccagcctgcagcccagctggcccagccccgtggtggccgagaacggcctgagcgaggagaagccccacctgctggtgttcccccccgacctggtggccgagcagttcaccctgatggacgccgagctgttcaagaaggtggtgccctaccactgcctgggcagcatctggagccagagagacaagaagggcaaggagcacctggcccccaccatcagagccaccgtgacccagttcaacagcgtggccaactgcgtgatcaccacctgcctgggcaacagaagcaccaaggcccccgacagagccagagtggtggagcactggatcgaggtggccagagagtgcagaatcctgaagaacttcagcagcctgtacgccatcctgagcgccctgcagagcaacagcatccacagactgaagaagacctgggaggacgtgagcagagacagcttcagaatcttccagaagctgagcgagatcttcagcgacgagaacaactacagcctgagcagagagctgctgatcaaggagggcaccagcaagttcgccaccctggagatgaaccccaagagagcccagaagagacccaaggagaccggcatcatccagggcaccgtgccctacctgggcaccttcctgaccgacctggtgatgctggacaccgccatgaaggactacctgtacggcagactgatcaacttcgagaagagaagaaaggagttcgaggtgatcgcccagatcaagctgctgcagagcgcctgcaacaactacagcatcgcccccgacgagcagttcggcgcctggttcagagccgtggagagactgagcgagaccgagagctacaacctgagctgcgagctggagccccccagcgagagcgccagcaacaccctgagaaccaagaagaacaccgccatcgtgaagagatggagcgacagacaggcccccagcaccgagctgagcaccagcggcagcagccacagcaagagctgcgaccagctgagatgcggcccctacctgagcagcggcgacatcgccgacgccctgagcgtgcacagcgccggcagcagcagcagcgacgtggaggagatcaacatcagcttcgtgcccgagagccccgacggccaggagaagaagttctgggagagcgccagccagagcagccccgagaccagcggcatcagcagcgccagcagcagcaccagcagcagcagcgccagcaccacccccgtggccgccaccagaacccacaagagaagcgtgagcggcctgtgcaacagcagcagcgccctgcccctgtacaaccagcaggtgggcgactgctgcatcatcagagtgagcctggacgtggacaacggcaacatgtacaagagcatcctggtgaccagccaggacaaggcccccgccgtgatcagaaaggccatggacaagcacaacctggaggaggaggagcccgaggactacgagctgctgcagatcctgagcgacgacagaaagctgaagatccccgagaacgccaacgtgttctacgccatgaacagcaccgccaactacgacttcgtgctgaagaagagaaccttcaccaagggcgtgaaggtgaagcacggcgccagcagcaccctgcccagaatgaagcagaagggcctgaagatcgccaagggcatcttctag

SEQ ID NO: 96390 - protein, 902 aa, Artificial Sequence
  derived and/or modified sequence
MVQRMWAEAAGPAGGAEPLFPGSRRSRSVWDAVRLEVGVPDSCPVVLHSFTQLDPDLPRPESSTQEIGEELINGVIYSISLRKVQLHHGGNKGQRWLGYENESALNLYETCKVRTVKAGTLEKLVEHLVPAFQGSDLSYVTIFLCTYRAFTTTQQVLDLLFKRYGCILPYSDEDGGPQDQLKNAISSILGTWLDQYSEDFCQPPDFPCLKQLVAYVQLNMPGSDLERRAHLLLAQLEHSEPIEAEPEALSPVPALKPTPELELALTPARAPSPVPAPAPEPEPAPTPAPGSELEVAPAPAPELQQAPEPAVGLESAPAPALELEPAPEQDPAPSQTLELEPAPAPVPSLQPSWPSPVVAENGLSEEKPHLLVFPPDLVAEQFTLMDAELFKKVVPYHCLGSIWSQRDKKGKEHLAPTIRATVTQFNSVANCVITTCLGNRSTKAPDRARVVEHWIEVARECRILKNFSSLYAILSALQSNSIHRLKKTWEDVSRDSFRIFQKLSEIFSDENNYSLSRELLIKEGTSKFATLEMNPKRAQKRPKETGIIQGTVPYLGTFLTDLVMLDTAMKDYLYGRLINFEKRRKEFEVIAQIKLLQSACNNYSIAPDEQFGAWFRAVERLSETESYNLSCELEPPSESASNTLRTKKNTAIVKRWSDRQAPSTELSTSGSSHSKSCDQLRCGPYLSSGDIADALSVHSAGSSSSDVEEINISFVPESPDGQEKKFWESASQSSPETSGISSASSSTSSSSASTTPVAATRTHKRSVSGLCNSSSALPLYNQQVGDCCIIRVSLDVDNGNMYKSILVTSQDKAPAVIRKAMDKHNLEEEEPEDYELLQILSDDRKLKIPENANVFYAMNSTANYDFVLKKRTFTKGVKVKHGASSTLPRMKQKGLKIAKGIF

SEQ ID NO: 96391 - DNA, 2709 bp, Artificial Sequence
  derived and/or modified sequence
atggtgcagcgaatgtgggcagaagcagccgggcccgcagggggtgccgaacccctgttcccaggcagccggcgatccagatctgtctgggatgccgtgaggcttgaagttggcgtgcccgatagctgtcccgtagtcttacatagtttcacgcagctggacccagacctgccaaggccagaaagtagtacccaggagattggcgaggaactcattaatggggtcatctactctatctccctccgaaaagttcaactgcatcacggggggaataagggacagcggtggctcggatatgagaatgagtcggccctgaacctgtatgagacgtgtaaggtgcgtaccgtaaaagccggtaccttggagaagctggtagagcacctggtgccagcattccaagggtctgacctgtcttacgtaaccatctttctatgcacttaccgcgccttcacgacaacgcagcaggtgttagatctcttgtttaaaagatatggatgcattcttccctacagcgatgaagatggtggcccccaggaccagctcaagaatgcgatctcctccatcttgggtacatggcttgaccagtacagcgaggatttctgccagccccccgactttccttgcttgaaacagcttgtggcatacgttcagcttaatatgccagggagtgaccttgagcgcagagctcacctgctgctggctcagttggaacactccgaacctatcgaggcggagcctgaagcactgagtccagtccctgcgctaaaaccgacaccagaactggaactcgccctgacccccgcacgagcccccagccctgttccagccccggccccggagcctgaaccagctcccacccctgcccctggcagcgagttggaagttgcccccgccccagcccctgagctccagcaagcccctgagcccgcagtgggcctggagtcagcccctgcccctgccttggaactagaacccgcccccgaacaagatccggcacccagccagacactggaactggaacctgccccggctccagtcccatccttgcaacccagctggccaagcccagtggtcgccgaaaatggcctgagtgaggagaagccacatttgctagtcttccccccagatctggtcgctgagcaatttactctgatggacgccgagttgtttaaaaaagtggtcccctaccactgcctcgggagcatctggtcacaaagggacaaaaaagggaaggagcacttggcacccactatacgcgctaccgtgacccagtttaatagtgtagccaattgcgtgatcactacctgcttgggtaatcggagtactaaagcccctgaccgagccagggttgttgaacattggatcgaagtggcaagagagtgcagaatcctaaagaatttctcatcactgtatgcaattctgagcgccctgcaatccaatagtatccaccgcctcaaaaagacatgggaagatgtttcgagagattctttccgtatctttcagaaacttagcgagatcttcagtgatgagaataactatagtctgtcccgcgagctgcttatcaaggagggcaccagcaaattcgctacactggaaatgaaccccaagagggcccagaaacgccctaaggaaacggggattattcagggaacggtgccttacttgggaacattcttaacagatctcgtgatgcttgataccgcaatgaaggactatctgtatggcagactgataaatttcgaaaaaaggcgtaaagaatttgaggtcattgctcaaataaagctgttgcagtcagcctgtaacaattatagtattgcccctgacgaacagttcggggcgtggttcagagcggtggagcggctgagcgagaccgaatcgtataatctgagctgcgagctggagcctccctccgaatctgcatctaacacacttcgcacaaagaaaaacactgctatcgtcaagcgctggtctgatcgacaggctcctagcactgaactgtctacctctggatcatctcactcgaagtcctgtgatcagctacggtgtggcccttatctgagctccggagatattgcggacgctctgagcgtccactcagctgggtcgtcttctagtgatgtcgaggagatcaatataagcttcgtgccagaaagtcctgacggccaggaaaagaagttttgggagagtgcatcacagtccagcccagagaccagcggaatatcaagcgcgtccagttccactagcagcagttctgccagcactacccctgttgccgctacacggacccacaagaggtctgtatctgggctctgcaattcctcttccgcgctccctttgtacaaccagcaggttggtgattgctgcatcatccgggtttccctggatgtggataatggcaatatgtataaaagcatcctggtgacgtcccaggacaaggctcccgccgttattagaaaagcaatggacaaacataacctcgaggaagaggagcctgaagactatgagctgcttcagatcctgagcgatgatcggaagctaaagatccccgaaaacgccaatgttttctacgcaatgaacagcaccgccaactatgatttcgtcctgaagaagcggaccttcacaaagggtgttaaagtcaagcacggagcctcttcaacgttgccacggatgaaacagaaagggctaaaaattgctaaggggatattctag

SEQ ID NO: 96392 - DNA, 2709 bp, Artificial Sequence
  derived and/or modified sequence
atggtgcagaggatgtgggccgaggccgccggccctgctggaggagctgagcccctcttccctggcagccgccgcagccgctctgtgtgggatgctgtgcggctggaggtgggcgtgcctgacagctgccctgtggtgctgcacagcttcacccagctggaccctgacctgcccaggcctgagagcagcacccaggagattggagaggagctgatcaatggagtcatctacagcatcagcctgaggaaggtgcagctgcaccacggcggcaacaagggccagcgctggctgggctatgaaaatgaaagtgccctgaacctgtatgagacctgcaaggtgaggacagtgaaggccggcaccctggagaagctggtggagcacctggtgcctgccttccagggcagtgacctgtcctatgtgaccatcttcctgtgcacctaccgggccttcaccaccacccagcaggtgctggacctgctcttcaagagatatggctgcatcctgccctacagtgatgaagatggcggcccccaggaccagctgaagaatgccatcagcagcatcctgggcacctggctggaccagtacagcgaggacttctgccagcccccagacttcccctgcctgaagcagctggtggcctacgtgcagctgaacatgcctggcagtgacctggagcggcgggcccacctgctgctggcccagctggagcacagcgagcccatcgaggccgagcctgaggccctgagccctgtgcctgccctgaagcccaccccagagctggagctggccctgaccccagcccgggcccccagccctgtgcctgccccagcccctgagcctgagcccgcccccaccccagcccctggcagcgagctggaggtggccccagccccagcccctgagctgcagcaggcccctgagcctgctgtgggcctggagagcgccccagccccagccctggagctggagcccgcccctgagcaggaccctgcccccagccagaccctggagctggagcccgccccagcccctgtgcccagcctgcagcccagctggcccagccctgtggtggccgagaatggcctgtctgaggagaagccccacctgctggtgttccccccagacctggtggccgagcagttcaccctgatggatgctgagctgttcaagaaggtggtgccctaccactgcctgggcagcatctggagccagagggacaagaagggcaaggagcacctggcccccaccatccgggccaccgtgacccagttcaacagcgtggccaactgtgtgatcaccacctgcctgggcaacagaagcaccaaggccccagaccgggcccgggtggtggagcactggattgaggtggcccgggagtgccgcatcctgaagaacttcagcagcctgtatgccatcctgagcgccctgcagagcaacagcatccaccggctgaagaagacctgggaggatgtgtcccgggacagcttccgcatcttccagaagctgtctgagatcttcagtgatgagaacaactacagcctgagccgggagctgctgatcaaggagggcaccagcaagtttgccaccctggagatgaaccccaagagggcccagaagaggcccaaggagaccggcatcatccagggcaccgtgccctacctgggcaccttcctgacagacctggtgatgctggacacagccatgaaggactacctgtatggccgcctcatcaactttgagaagaggaggaaggagtttgaagtcatcgcccagatcaagctgctgcagagcgcctgcaacaactacagcatcgccccagatgagcagtttggagcctggttccgggctgtggagcggctgtctgaaacagagagctacaacctgagctgtgagctggagcccccatctgagagcgccagcaacaccctgcggaccaagaagaacacagccatcgtgaagcgctggagcgaccggcaggcccccagcacagagctgagcaccagcggcagcagccacagcaagagctgtgaccagctgcgctgtggcccctacctgagcagcggggacattgctgatgccctgtctgtgcacagcgctggcagcagcagcagtgatgtggaggagatcaacatcagctttgtgcctgagagcccagatggccaggagaagaagttctgggagagcgccagccagagcagccctgagaccagcggcatcagcagcgccagcagcagcaccagcagcagcagcgccagcaccacccctgtggccgccaccaggacccacaagaggtctgtgtctggcctgtgcaacagcagcagcgccctgcccctgtacaaccagcaggtgggggactgctgcatcatccgggtgtccctggatgtggacaatggaaacatgtacaagagcatcctggtgaccagccaggacaaggccccagctgtgatcaggaaggccatggacaagcacaacctggaggaggaggagcctgaggactatgagctgctgcagatcctgagtgatgacaggaagctgaagatcccagaaaatgccaacgtgttctacgccatgaacagcacagccaactatgactttgtgctgaagaagaggaccttcaccaagggcgtgaaggtgaagcatggagccagcagcaccctgcccaggatgaagcagaagggcctgaagatcgccaagggcatcttctag

SEQ ID NO: 96393 - DNA, 2709 bp, Artificial Sequence
  derived and/or modified sequence
atggtgcagcggatgtgggccgaggccgccggccccgccggcggcgcagaaccgctcttcccaggttcccgaaggagtagatccgtttgggatgcggtgcgccttgaagtcggtgtgccggattcttgtcctgtggtcctgcactcatttacacagctggatcccgatctgccaagacccgaatcgtctactcaagaaattggagaagaattgataaacggggtgatctactccataagcctacgaaaggtgcaactccatcatggcggcaacaaaggtcagcgatggctcggatacgagaatgagagtgccctgaacctgtatgagacctgcaaggtccggaccgtgaaggcgggaacacttgaaaaactggtcgagcacctagttcccgcatttcaaggctccgacctgagttacgtgactatctttctgtgtacctatagagctttcaccaccactcagcaggtgctcgaccttctctttaaacgatatggatgcattctcccttactcagatgaagacggaggtcctcaggaccagcttaaaaacgcaattagtagcatcctgggcacctggctagatcaatacagtgaggacttctgccagccacccgactttccatgtctaaagcaactggttgcctacgtccagctaaatatgccaggaagtgatttggagagaagggcacacctcctgctggcccagctggaacactccgaaccaattgaggccgagccagaggcactcagtcccgtaccagccctcaagcctactccggagctggagctggcactgacacccgctagagctccttccccagtccctgcgcccgctcctgagcccgaaccggcacctacccccgcaccaggctctgaattggaggtcgcgccggccccagcgccagagctgcagcaagcaccagagccggcagtgggtttagagagcgcaccggcccctgctctcgaactagagcccgcccccgagcaggatcccgccccttcccaaactttagaactagagccagccccagccccagtcccctctttgcagccctcctggccatctcccgtggtagcggagaacgggctgtccgaggagaagcctcatctgctcgtgttccccccagacttggtagccgagcagttcaccctgatggacgcagaactttttaaaaaggttgtgccctaccattgccttggatccatatggtcccaacgtgacaaaaaaggcaaggagcacctagccccaactattcgagcaacggtgacacagtttaacagtgttgccaattgtgtaattacgacctgcctaggcaacagatctaccaaggcacccgaccgcgcgcgagtggtggaacattggattgaggtggctcgggaatgtcggatcttgaagaatttctcctccctctacgccatcttgtctgctctgcagtctaatagcatccatcgccttaaaaaaacatgggaagacgtctcacgggactcttttaggattttccagaaattaagtgaaattttttccgacgaaaataattactccctgtccagggagctgctcattaaagaaggcacctccaagttcgccacgttagaaatgaacccaaaaagggcacagaagagaccaaaagagacaggtatcatccagggaactgtgccttatctggggacatttctgactgatctggttatgctggacaccgctatgaaagactatctttacggaagacttatcaatttcgaaaaaaggagaaaggaatttgaagtcatcgcccaaatcaaactgctccagtccgcttgtaataactacagcatcgcacccgacgagcaatttggagcttggtttagggccgtggaaagactgtccgagactgaatcctataacttatcttgcgaactagagcctccaagtgagagtgccagcaacacactccgtactaagaagaacactgccattgtgaagcgctggtccgataggcaggcacctagcactgaactctctaccagcggctcctcgcacagcaaaagttgcgaccagcttaggtgcggaccatatctgagctccggcgacatagccgacgcgctttccgtgcatagcgctggcagttctagttccgacgtggaggagatcaacatcagcttcgtgcctgagtcccccgatggccaggagaagaagttctgggagtctgcttctcagtctagtcccgagacatccggtatcagcagcgcatcttcttctaccagttccagtagcgcaagcactactccagttgctgcaaccagaacccacaagagatctgtgagcgggctatgcaattcttccagcgccctgccgctttataaccaacaggttggcgattgttgcataattcgcgtctctcttgatgtagataatggcaatatgtacaaatccattctggtcaccagccaagataaagcaccagccgttatcagaaaggcaatggataagcacaacctcgaggaggaggaacctgaggactatgagctcctccagatcctcagcgacgacagaaagctgaagattcccgagaatgctaacgtcttctatgcgatgaactctacagccaattacgactttgtgctcaaaaagcgtaccttcacaaagggtgttaaggtgaaacatggcgcttccagcacattacctaggatgaaacagaagggcctgaagatcgcgaagggtatcttctag

SEQ ID NO: 96394 - DNA, 2709 bp, Artificial Sequence
  derived and/or modified sequence
atggtgcaaaggatgtgggccgaggctgcgggtccagcaggcggtgctgagcctctctttcccggaagtcggcgatcaagatctgtgtgggacgccgtgcggcttgaagttggagtgccagatagctgtcctgttgtgctgcactcattcacacagctagatcccgacctccctcggcctgaatcaagtacccaggaaattggcgaggagttgatcaatggggtgatttattcgataagcctccgtaaggtgcagttgcatcacggcggtaataaaggacaacggtggctgggttacgaaaacgagagtgcactgaacctgtacgaaacttgtaaggtgaggaccgtaaaagccggaacactggaaaaactagtggaacatttggttccagccttccagggcagtgacctctcctatgtgacgatcttcctgtgtacctacagagccttcaccactactcagcaggtgttagaccttctgtttaagagatatggctgtattctgccatactctgacgaagatggaggtcctcaggatcaacttaagaatgctatatcttctatactggggacatggctagatcaatactccgaggatttctgccagccgccagactttccatgcctcaagcagctcgttgcgtacgtgcaacttaatatgcccggatccgacttagagaggagagcacacctgctgctggctcaactggagcatagtgagcccatcgaggccgaacccgaggcgctgtcccctgttcctgcactgaaacctacccccgagctagagttggccctgacaccggcaagagctccatcccctgttccagcccctgcaccggaacccgagcccgcacctacaccagccccagggtcagaactggaggtcgcacctgcccctgctcctgaactgcagcaggcgccagagccagctgtgggactggagtctgcgccagcacccgctctggaactcgaaccagcaccagagcaggaccccgcacccagccagactctagagctcgaacccgctcccgcaccagttccttcgttacaacctagctggccttcccctgtggtggccgaaaatggcctttcagaggagaaaccacatctgttggtttttcctccagacctggtggcagagcagtttactcttatggatgccgagctcttcaaaaaagtcgtcccatatcattgcctgggctccatctggtcccagcgtgataagaaaggtaaagaacatctcgcaccaactataagagctacagttactcagttcaactcagtcgccaactgcgttatcaccacctgcctgggaaatcgctccaccaaggctcctgaccgcgcaagagtggtagaacactggatcgaggttgccagggaatgtaggatccttaaaaacttcagctctctgtacgccatcctgtccgctctgcagtccaattccatccacagactcaagaagacatgggaggacgtgtcccgggattcttttagaatctttcaaaagctgtccgaaatattttctgacgaaaataattattccttaagccgcgaactgttgatcaaagagggcactagcaaattcgcaacccttgagatgaacccaaagagggcacagaagcgaccaaaggagactggtattatccaggggaccgtaccatacctggggacattcttgaccgatctcgttatgctcgacaccgccatgaaggactacctgtacggccgtctgatcaatttcgagaagcgacgaaaagagttcgaggtgatcgcccaaattaaactgctccagagcgcctgtaacaattatagtatcgcccctgacgagcagttcggagcctggttcagggccgtggagagactatccgaaacagagtcttataacctgtcctgtgaactggagccacctagcgagagtgccagcaacacacttcggaccaagaaaaacactgccatagttaagcggtggtctgatcgtcaggcaccctccaccgagcttagcacctccggctctagtcactcaaaatcctgcgatcagctgagatgcggcccttacctctcaagcggggacatcgcggatgctctgtccgtgcatagtgctggatcttccagttcagatgttgaggaaattaacatttcgttcgtaccggaatcccccgacggccaggagaagaaattttgggaaagcgcctcacagagcagcccagagaccagtggcatcagctccgcaagcagcagcacgagttcatccagcgccagcaccaccccagtggccgctaccagaactcacaaacgaagcgtaagcggcttgtgcaacagctcaagcgcacttcccctgtacaatcagcaggtgggggactgctgcattatccgggtctcgctggacgtggacaatggcaacatgtataagtccatactagtgacgtcacaagacaaagcccctgccgtcataaggaaagccatggacaagcacaacctggaagaggaagagcccgaggactacgagttactccagatcctcagcgatgatcggaagctaaagatccccgaaaacgccaatgttttctacgcaatgaatagcacagcgaattacgactttgtcctcaagaagagaacattcaccaagggggtgaaggttaaacacggggcttcctcaacactgccacgcatgaaacagaaagggttaaagattgccaaaggaattttctag

SEQ ID NO: 96395 - DNA, 3598 bp, Artificial Sequence
  derived and/or modified sequence
gcgcccgcgctgcgagccttccatggtgcagcgcatgtgggccgaggcggccgggcctgctggcggcgccgagccgctgtttccgggctcccggcggagccgcagcgtgtgggacgccgtgcgcctggaggtgggcgtccccgacagctgcccggtggtgctgcacagcttcacgcagctagaccccgacctgccgcgcccggagagctccacgcaggagatcggtgaggagctgatcaacggagtcatctactccatctccctgcgcaaggtgcagctgcaccacggaggcaacaaggggcagcgctggctcgggtatgagaatgagtcggccctgaacctttatgagacttgcaaggtgcggaccgtgaaggctggcacgctggagaagctggtggagcacctggtgccagccttccagggcagcgacctctcctacgtcaccatcttcctgtgtacctatagagccttcaccaccacccaacaggtcctggacctgctgttcaaaagatacggctgcatcctcccctattccgacgaggatggtggaccccaggaccaacttaaaaatgccatctcctccatcctgggcacctggctggaccagtactcggaggatttctgtcaacctccggactttccctgcctcaagcagctggtggcctacgtgcagctcaacatgccaggctcagacctggagcgccgtgcccaccttctcctggcccagctggagcactcggaacccattgaggcagagcctgaggctctgtcaccagtgccagctctaaaaccaactccagagctcgagctagctctaacaccagctcgagcacccagcccagtgccggctccagccccggagccagagccagctccaacaccagctccaggttcagagctagaagtagctccagcaccagctccggagctccagcaggctccagagccagctgtgggactagaatcggctccagcgccagctctggaactagagccagctccagaacaggatccagctccctcacaaactctagagctggagccagctccagcaccagttccatcattacagccttcctggccttcacctgtggttgcagagaacgggctgagtgaggagaagcctcacctcttggtgttccctccagatctggtggcagagcagtttacactgatggatgcggaactgttcaagaaggtggtgccctaccactgcctgggctccatctggtcccagcgggacaagaagggcaaggagcacctggcgcccaccatccgcgccactgtcacccagttcaacagtgtggccaactgtgtcatcaccacctgcctcgggaaccgaagcacgaaagccccagacagggccagggtggtggagcactggatcgaggtggccagggagtgccggatcctcaagaacttctcgtcactgtatgccatcctctctgccctgcagagcaactccatccaccgtctgaagaagacgtgggaagacgtttccagggacagtttccggatctttcagaagctgtcagagatcttctcagatgagaacaactactcattgagccgggagctgctcatcaaggagggcacctccaagtttgccaccctggagatgaaccccaagagagcccagaaacggccgaaggagacgggcatcatccagggcaccgttccctacctgggcacgttcctcaccgacctggtgatgctggacactgccatgaaggactatctgtatggcagactcatcaactttgagaagaggaggaaggagttcgaggtgatcgcccagatcaagctgctgcagtcggcctgcaacaactacagcatcgcgccagatgagcaatttggggcctggttccgggccgtggagcggctcagcgagactgagagctacaacctgtcgtgcgagctggagcccccatccgagtcagccagcaacaccctcaggaccaagaagaacacagccattgtcaagcgctggagcgaccgccaggcccccagcactgagctcagtaccagtggcagctcccactccaagtcctgtgaccagctcaggtgtggcccctacctcagcagcggggacatcgctgacgcgctcagcgtgcactcggccggctcctctagctccgacgtggaggagatcaacatcagcttcgtcccggagtctcctgatggccaggaaaagaagttctgggaatcagcctcacagtcatccccggagacctccggcatcagctcagcctccagcagcacctcgtcctcctcagcctccaccacgcccgtggctgccacacgcacccacaagcgctctgtctcagggctctgcaactccagctccgcgctgccgctctacaaccagcaggtgggcgactgctgtatcatccgcgtcagcctggacgtggacaatggcaacatgtacaagagcatcctggtgaccagccaagataaggctccggctgtaatccgcaaggccatggacaaacacaacctggaggaggaggagccggaggactatgagctgctgcagattctctcagatgaccggaagctgaagatccctgaaaacgccaacgtcttctatgccatgaactctaccgccaactatgactttgtcctcaagaagcggaccttcaccaagggagtgaaggtcaagcacggagccagctccaccctccctcgcatgaagcagaaaggactcaagattgccaagggcatcttctgagggcatcctcccagggtctggctggctggtagccaagcacttatggaccagagtggcccaggccagctgggcgccttcctcccacctgccagcccagggtaccccagactccagtttcatcctgaacctctcccgctgctgggattgacgcctgccattggtcaggctgacctggcctcccgtggaccactcgctgccttaggtgccttctgctctctggaaccagaggactagctgacttttgccaaggagcagtgccaacgggcatggcatggtgccctgcctgcccccgggcgccacctctgtacacttccctgacaccttcccaggtgtgggtcactgccacctgtgcccatgggcaccccagagcacccactgtgaccactgcagttctctcatgcccacaggcactggcctgtgaccttcgcaggggtcccggcccctcccaccactctagcctttctcaggctgcaccaaagattccatcatcagggccaactgagagtgagggagtctcacccaccgcttaccccagccctcccctgggagcagagagagaaaccctcttcatggaccagactctgcacccggtgagtgaggacagtcccagctgagtcccatcgatgttgaatctcatgccactgcaagtgccattcaccactgcgtcctgggctttacgagaccatgcaagacgggggttagtgaggaaggaggatttggggtgggggtggggtgattgaatatttgtataaaaagcaaaaagaaaaaaaaaatgtttgtttactgattggggaggggcaatatttatttgttgtaaatagcaaatgctagacttgaatattatattaaaatcctgtttctactata

SEQ ID NO: 96396 - DNA, 2709 bp, Artificial Sequence
  derived and/or modified sequence
atggtgcagagaatgtgggccgaggccgccggccccgccggcggcgccgagcccctgttccccggcagcagaagaagcagaagcgtgtgggacgccgtgagactggaggtgggcgtgcccgacagctgccccgtggtgctgcacagcttcacccagctggaccccgacctgcccagacccgagagcagcacccaggagatcggcgaggagctgatcaacggcgtgatctacagcatcagcctgagaaaggtgcagctgcaccacggcggcaacaagggccagagatggctgggctacgagaacgagagcgccctgaacctgtacgagacctgcaaggtgagaaccgtgaaggccggcaccctggagaagctggtggagcacctggtgcccgccttccagggcagcgacctgagctacgtgaccatcttcctgtgcacctacagagccttcaccaccacccagcaggtgctggacctgctgttcaagagatacggctgcatcctgccctacagcgacgaggacggcggcccccaggaccagctgaagaacgccatcagcagcatcctgggcacctggctggaccagtacagcgaggacttctgccagccccccgacttcccctgcctgaagcagctggtggcctacgtgcagctgaacatgcccggcagcgacctggagagaagagcccacctgctgctggcccagctggagcacagcgagcccatcgaggccgagcccgaggccctgagccccgtgcccgccctgaagcccacccccgagctggagctggccctgacccccgccagagcccccagccccgtgcccgcccccgcccccgagcccgagcccgcccccacccccgcccccggcagcgagctggaggtggcccccgcccccgcccccgagctgcagcaggcccccgagcccgccgtgggcctggagagcgcccccgcccccgccctggagctggagcccgcccccgagcaggaccccgcccccagccagaccctggagctggagcccgcccccgcccccgtgcccagcctgcagcccagctggcccagccccgtggtggccgagaacggcctgagcgaggagaagccccacctgctggtgttcccccccgacctggtggccgagcagttcaccctgatggacgccgagctgttcaagaaggtggtgccctaccactgcctgggcagcatctggagccagagagacaagaagggcaaggagcacctggcccccaccatcagagccaccgtgacccagttcaacagcgtggccaactgcgtgatcaccacctgcctgggcaacagaagcaccaaggcccccgacagagccagagtggtggagcactggatcgaggtggccagagagtgcagaatcctgaagaacttcagcagcctgtacgccatcctgagcgccctgcagagcaacagcatccacagactgaagaagacctgggaggacgtgagcagagacagcttcagaatcttccagaagctgagcgagatcttcagcgacgagaacaactacagcctgagcagagagctgctgatcaaggagggcaccagcaagttcgccaccctggagatgaaccccaagagagcccagaagagacccaaggagaccggcatcatccagggcaccgtgccctacctgggcaccttcctgaccgacctggtgatgctggacaccgccatgaaggactacctgtacggcagactgatcaacttcgagaagagaagaaaggagttcgaggtgatcgcccagatcaagctgctgcagagcgcctgcaacaactacagcatcgcccccgacgagcagttcggcgcctggttcagagccgtggagagactgagcgagaccgagagctacaacctgagctgcgagctggagccccccagcgagagcgccagcaacaccctgagaaccaagaagaacaccgccatcgtgaagagatggagcgacagacaggcccccagcaccgagctgagcaccagcggcagcagccacagcaagagctgcgaccagctgagatgcggcccctacctgagcagcggcgacatcgccgacgccctgagcgtgcacagcgccggcagcagcagcagcgacgtggaggagatcaacatcagcttcgtgcccgagagccccgacggccaggagaagaagttctgggagagcgccagccagagcagccccgagaccagcggcatcagcagcgccagcagcagcaccagcagcagcagcgccagcaccacccccgtggccgccaccagaacccacaagagaagcgtgagcggcctgtgcaacagcagcagcgccctgcccctgtacaaccagcaggtgggcgactgctgcatcatcagagtgagcctggacgtggacaacggcaacatgtacaagagcatcctggtgaccagccaggacaaggcccccgccgtgatcagaaaggccatggacaagcacaacctggaggaggaggagcccgaggactacgagctgctgcagatcctgagcgacgacagaaagctgaagatccccgagaacgccaacgtgttctacgccatgaacagcaccgccaactacgacttcgtgctgaagaagagaaccttcaccaagggcgtgaaggtgaagcacggcgccagcagcaccctgcccagaatgaagcagaagggcctgaagatcgccaagggcatcttctag

SEQ ID NO: 96397 - protein, 442 aa, Artificial Sequence
  derived and/or modified sequence
MPLENLEEEGLPKNPDLRIAQLRFLLSLPEHRGDAAVRDELMAAVRDNNFWNRIRQEQTEDCPPSSPSRGWHCQDWPSRKPPTSIRLCFAKPIIKRHRMPSYMAPYYEALCKSLDWQIDVDLLNKMKKANEDELKRLDEELEDAEKNLGESEIRDAMMAKAEYLCRIGDKEGALTAFRKTYDKTVALGHRLDIVFYLLRIGLFYMDNDLITRNTEKAKSLIEEGGDWDRRNRLKVYQGLYCVAIRDFKQAAELFLDTVSTFTSYELMDYKTFVTYTVYVSMIALERPDLREKVIKGAEILEVLHSLPAVRQYLFSLYECRYSVFFQSLAVVEQEMKKDWLFAPHYRYYVREMRIHAYSQLLESYRSLTLGYMAEAFGVGVEFIDQELSRFIAAGRLHCKIDKVNEIVETNRPDSKNWQYQETIKKGDLLLNRVQKLSRVINM

SEQ ID NO: 96398 - DNA, 1329 bp, Artificial Sequence
  derived and/or modified sequence
atgcccctggagaacctggaggaggagggcctgcccaagaaccccgacctgagaatcgcccagctgagattcctgctgagcctgcccgagcacagaggcgacgccgccgtgagagacgagctgatggccgccgtgagagacaacaacttctggaacagaatcagacaggagcagaccgaggactgcccccccagcagccccagcagaggctggcactgccaggactggcccagcagaaagccccccaccagcatcagactgtgcttcgccaagcccatcatcaagagacacagaatgcccagctacatggccccctactacgaggccctgtgcaagagcctggactggcagatcgacgtggacctgctgaacaagatgaagaaggccaacgaggacgagctgaagagactggacgaggagctggaggacgccgagaagaacctgggcgagagcgagatcagagacgccatgatggccaaggccgagtacctgtgcagaatcggcgacaaggagggcgccctgaccgccttcagaaagacctacgacaagaccgtggccctgggccacagactggacatcgtgttctacctgctgagaatcggcctgttctacatggacaacgacctgatcaccagaaacaccgagaaggccaagagcctgatcgaggagggcggcgactgggacagaagaaacagactgaaggtgtaccagggcctgtactgcgtggccatcagagacttcaagcaggccgccgagctgttcctggacaccgtgagcaccttcaccagctacgagctgatggactacaagaccttcgtgacctacaccgtgtacgtgagcatgatcgccctggagagacccgacctgagagagaaggtgatcaagggcgccgagatcctggaggtgctgcacagcctgcccgccgtgagacagtacctgttcagcctgtacgagtgcagatacagcgtgttcttccagagcctggccgtggtggagcaggagatgaagaaggactggctgttcgccccccactacagatactacgtgagagagatgagaatccacgcctacagccagctgctggagagctacagaagcctgaccctgggctacatggccgaggccttcggcgtgggcgtggagttcatcgaccaggagctgagcagattcatcgccgccggcagactgcactgcaagatcgacaaggtgaacgagatcgtggagaccaacagacccgacagcaagaactggcagtaccaggagaccatcaagaagggcgacctgctgctgaacagagtgcagaagctgagcagagtgatcaacatgtag

SEQ ID NO: 96399 - DNA, 1329 bp, Artificial Sequence
  derived and/or modified sequence
atgcctctggagaatctggaggaggaagggttgcccaagaacccggaccttcggattgcccagttgaggttcctgctgtctctgccagagcaccggggagacgctgctgtccgcgacgaattgatggctgcggtccgggacaacaacttctggaatcggatacggcaggaacagacagaagactgtccaccgagctccccgtctcgaggctggcactgccaggactggccatcgagaaagcctccgaccagtatccggttatgttttgctaagcccataatcaagaggcacagaatgccttcttatatggccccgtactacgaggcactctgtaagagcctggactggcagatcgacgtcgatctgctcaataaaatgaagaaagccaacgaggatgagctgaagcgcctcgacgaagaactggaggacgcggagaagaatctgggggaaagcgaaatccgcgacgccatgatggccaaggctgaatatttgtgcagaataggtgacaaagagggcgcattaacagccttcaggaagacctacgataaaaccgtggcactgggccataggctggatatagtgttttatctgttacggattgggcttttttacatggacaacgatctgattacccgcaacacagagaaggccaagtcattaatcgaagagggtggtgactgggataggcgaaataggctcaaggtttatcagggcctctattgtgtggcaatccgcgacttcaagcaggcagccgaactattccttgacactgtttctacattcacgagttacgaactgatggactataaaaccttcgtgacctacactgtgtacgtttccatgatcgccctcgaacgcccggacctcagggaaaaagtgattaagggggcagaaatacttgaagtactccacagtcttcccgcagtgcggcagtaccttttttctctttacgaatgtcgatattcagtcttcttccagtcactggcagtagtcgagcaggagatgaaaaaggactggctgtttgctccacattacaggtactatgtcagagagatgcggatccacgcatacagccagctgctcgaatcttaccgctccctgacactgggctacatggccgaggcattcggagtgggcgtggagttcatcgaccaagagctgtcccggtttatcgcagctgggcgtttacattgcaagatcgacaaggtaaacgagatagtggaaacaaatcgacctgatagcaaaaattggcagtaccaggagaccattaaaaagggcgatctcctcctgaatcgagtgcaaaaactgagtcgagtgatcaatatgtag

SEQ ID NO: 96400 - DNA, 1329 bp, Artificial Sequence
  derived and/or modified sequence
atgcccctggagaacctggaggaggagggcctgcccaagaacccagacctgagaattgcccagctgcgcttcctgctgagcctgcctgagcacagaggagatgctgctgtgagagatgagctgatggctgctgtgcgggacaacaacttctggaaccgcatccggcaggagcagacagaggactgcccccccagcagccccagccggggctggcactgccaggactggcccagcaggaagccacccaccagcatccggctgtgctttgccaagcccatcatcaagaggcacaggatgcccagctacatggccccctactatgaggccctgtgcaagagcctggactggcagattgatgtggacctgctgaacaagatgaagaaggccaatgaagatgagctgaagaggctggatgaggagctggaggatgctgagaagaacctgggggagagcgagatcagagatgccatgatggccaaggccgagtacctgtgcagaattggagacaaggagggcgccctgacagccttcaggaagacctatgacaagacagtggccctgggccaccggctggacatcgtgttctacctgctgcgcatcggcctcttctacatggacaatgacctgatcaccaggaacacagagaaggccaagagcctgattgaggagggcggggactgggacagaagaaaccggctgaaggtgtaccagggcctgtactgtgtggccatccgggacttcaagcaggccgctgagctgttcctggacacagtgtccaccttcaccagctatgagctgatggactacaagacctttgtgacctacacagtgtatgtgtccatgattgccctggagaggccagacctgcgggagaaggtgatcaagggagctgagatcctggaggtgctgcacagcctgcctgctgtgcggcagtacctgttcagcctgtatgagtgccgctacagcgtcttcttccagagcctggccgtggtggagcaggagatgaagaaggactggctgtttgccccccactaccgctactacgtgcgggagatgagaattcatgcctacagccagctgctggagagctaccgcagcctgaccctgggctacatggccgaggccttcggcgtgggcgtggagttcatcgaccaggagctgagccgcttcatcgctgctggccgcctgcactgcaagattgacaaggtgaatgagatcgtggagaccaacagaccagacagcaagaactggcagtaccaggagaccatcaagaagggggacctgctgctgaacagagtgcagaagctgagcagggtcatcaacatgtag

SEQ ID NO: 96401 - DNA, 1329 bp, Artificial Sequence
  derived and/or modified sequence
atgcccctggagaacctggaggaggagggcctgcccaagaaccccgacctccgaatcgcccaactccgtttcctccttagcctgcccgagcacaggggagatgccgccgttcgagatgaacttatggctgccgtcagggataataatttttggaacagaatccgacaggagcaaaccgaagattgtccacctagctctccttctcggggttggcactgccaggattggccttcaagaaaaccaccaacctcgattcgattgtgcttcgccaaacccatcattaagcggcaccggatgccgagctacatggctccgtactacgaggccctgtgcaaaagcctggactggcaaattgacgtcgacctgctgaataagatgaagaaggccaacgaggacgagctcaaacggcttgatgaggaactggaagatgcagagaagaatctgggcgagagcgagattcgtgatgccatgatggctaaagctgaatacctctgcaggattggtgacaaggaaggcgcactgaccgcctttcggaagacttatgataagacggttgctctggggcaccgcttggacatcgtcttttacctcctcagaattgggctcttctacatggacaacgatctcatcacaaggaacactgagaaagcgaagtccttgattgaggaggggggggactgggaccggaggaaccgactgaaggtgtaccagggcctgtattgcgtcgccatccgggactttaagcaggcggctgagctctttttagatacggtttccacctttacatcatatgagctgatggattacaagactttcgtgacttacactgtttatgtctccatgatagcccttgaacgtccagatctgagagaaaaagtcattaagggcgctgaaatcttggaggtgctgcattcccttcccgccgttcgtcagtatctgttctctctgtacgaatgcaggtactccgtgttcttccaatccctggctgtcgttgaacaggaaatgaagaaggattggctgtttgctccacactatagatattacgtccgagagatgaggatccacgcctatagtcaactgctcgagtcatataggtctctcacgctcggctacatggccgaagctttcggcgtcggcgttgaattcatcgaccaggagctgtcacgattcattgccgctggaagactgcactgtaagattgacaaagtgaacgagatcgtcgagactaataggcctgatagcaagaattggcagtaccaggaaaccatcaaaaagggcgatttactcctcaatcgagtccagaaactatcacgggtcattaacatgtag

SEQ ID NO: 96402 - DNA, 1329 bp, Artificial Sequence
  derived and/or modified sequence
atgccccttgagaatctggaagaagagggtttaccgaaaaaccccgatcttcgaattgcgcaactccgcttcctgctgagtctgcctgagcacagaggcgacgccgctgtgcgcgatgaactgatggctgccgttcgcgacaataacttctggaaccggataagacaggagcagactgaagattgtcctccgtccagcccttctcgaggctggcattgccaggattggccttctaggaagcctcctacctccatccggctgtgttttgctaagccaatcatcaagagacaccgaatgcctagttatatggcaccttactacgaggccctctgcaagtcccttgattggcagatcgatgtggacttgctgaacaaaatgaaaaaagcaaatgaagacgagcttaaaaggcttgacgaagagttggaggacgccgaaaaaaacctgggggaatcagaaattcgggatgcaatgatggctaaggccgaatatctgtgcagaattggggataaagaaggcgctctgacagcattccgcaaaacctacgataaaacagttgcactggggcaccgcttggacatcgtcttttacctcctccggatcgggctcttttacatggataatgatcttatcacaagaaacactgaaaaggccaagtccctgattgaagagggcggagattgggaccggagaaacaggctgaaggtttatcaaggcctgtattgtgtcgctatacgggattttaagcaggcggcagaactgtttctcgacacagtgtccacatttacaagttacgagctgatggattacaagacttttgtcacatataccgtgtatgtcagtatgatcgctctggaaagaccggatctgagggagaaggttatcaaaggcgctgagatactcgaggtgcttcactctctgcccgctgtgcgccagtatttatttagtttgtacgagtgtaggtattctgtgttctttcaatctctggctgtcgtcgagcaggagatgaaaaaggattggctttttgcccctcattatcgctattacgtccgcgaaatgcgcattcacgcctactcccagcttctggaaagctataggagccttactctgggctacatggcggaggcgttcggggttggggtcgaattcatcgaccaggagctgtcgaggttcatcgctgccggtcgactgcactgtaagatcgataaagtaaacgagatcgtggagaccaatcggcctgattccaagaattggcagtaccaggagacaatcaagaaaggggacttgctgctgaaccgcgtgcaaaaactgagcagagtgattaacatgtag

SEQ ID NO: 96403 - DNA, 1495 bp, Artificial Sequence
  derived and/or modified sequence
gcagccggtcgtaaccaagttgtgtcctgtcagccgctgtccccttcgccgcgatgccgctggagaacctggaggaggagggtctgcccaagaaccccgacttgcgtatcgcgcagctgcgcttcctgctcagcctgcccgagcaccgcggagacgctgccgtgcgcgacgagctgatggcggccgtccgcgataacaacttttggaacagaatccggcaagagcaaaccgaggattgccctccctccagccctagtagaggttggcattgccaggattggccgtcacgcaaacctcccaccagcatacgtttatgttttgccaagccgattattaagcgccatcgcatgccttcctacatggctccttactatgaagccttgtgcaaatccctcgactggcagatagacgtggacctactcaataaaatgaagaaggcaaatgaagatgagttgaagcgtttggatgaggagctggaagatgcagagaagaatctaggagagagcgaaattcgcgatgcaatgatggcaaaggccgagtacctctgccggataggtgacaaagagggagctctgacagcctttcgcaagacatatgacaaaactgtggccctgggtcaccgattggatattgtattctatctccttaggattggcttattttatatggataatgatctcatcacacgaaacacagaaaaggccaaaagcttaatagaagaaggaggagactgggacaggagaaaccgcctaaaagtgtatcagggtctttattgtgtggctattcgtgatttcaaacaggcagctgaactcttccttgacactgtttcaacatttacatcctatgaactcatggattataaaacatttgtgacttatactgtctatgtcagtatgattgccttagaaagaccagatctcagggaaaaggtcattaaaggagcagagattcttgaagtgttgcacagtcttccagcagttcggcagtatctgttttcactctatgaatgccgttactctgttttcttccaatcattagcggttgtggaacaggaaatgaaaaaggactggctttttgcccctcattatcgatactatgtaagagaaatgagaattcatgcatacagtcagctgctggaatcatataggtcattaacccttggctatatggcagaagcgtttggtgttggtgtggaattcattgatcaggaactgtccaggtttattgctgccgggagactacactgcaaaatagataaagtgaatgaaatagtagaaaccaacagacctgatagcaagaactggcagtaccaagaaactatcaagaaaggagatctgctactaaacagagttcaaaaactttccagagtaattaatatgtaaagccatgtaactaacaaaggatttgctttagagataattatttggaatttttatagcttacttcacaatgtgcccaggtcagctgtataaaataaatactgcattgttgtttc

SEQ ID NO: 96404 - protein, 351 aa, Artificial Sequence
  derived and/or modified sequence
MNESNDSTNYDMAPYYEALCKSLDWQIDVDLLNKMKKANEDELKRLDEELEDAEKNLGESEIRDAMMAKAEYLCRIGDKEGALTAFRKTYDKTVALGHRLDIVFYLLRIGLFYMDNDLITRNTEKAKSLIEEGGDWDRRNRLKVYQGLYCVAIRDFKQAAELFLDTVSTFTSYELMDYKTFVTYTVYVSMIALERPDLREKVIKGAEILEVLHSLPAVRQYLFSLYECRYSVFFQSLAVVEQEMKKDWLFAPHYRYYVREMRIHAYSQLLESYRSLTLGYMAEAFGVGVEFIDQELSRFIAAGRLHCKIDKVNEIVETNRPDSKNWQYQETIKKGDLLLNRVQKLSRVINM

SEQ ID NO: 96405 - DNA, 1056 bp, Artificial Sequence
  derived and/or modified sequence
atgaacgagagcaacgacagcaccaactacgacatggccccctactacgaggccctgtgcaagagcctggactggcagatcgacgtggacctgctgaacaagatgaagaaggccaacgaggacgagctgaagagactggacgaggagctggaggacgccgagaagaacctgggcgagagcgagatcagagacgccatgatggccaaggccgagtacctgtgcagaatcggcgacaaggagggcgccctgaccgccttcagaaagacctacgacaagaccgtggccctgggccacagactggacatcgtgttctacctgctgagaatcggcctgttctacatggacaacgacctgatcaccagaaacaccgagaaggccaagagcctgatcgaggagggcggcgactgggacagaagaaacagactgaaggtgtaccagggcctgtactgcgtggccatcagagacttcaagcaggccgccgagctgttcctggacaccgtgagcaccttcaccagctacgagctgatggactacaagaccttcgtgacctacaccgtgtacgtgagcatgatcgccctggagagacccgacctgagagagaaggtgatcaagggcgccgagatcctggaggtgctgcacagcctgcccgccgtgagacagtacctgttcagcctgtacgagtgcagatacagcgtgttcttccagagcctggccgtggtggagcaggagatgaagaaggactggctgttcgccccccactacagatactacgtgagagagatgagaatccacgcctacagccagctgctggagagctacagaagcctgaccctgggctacatggccgaggccttcggcgtgggcgtggagttcatcgaccaggagctgagcagattcatcgccgccggcagactgcactgcaagatcgacaaggtgaacgagatcgtggagaccaacagacccgacagcaagaactggcagtaccaggagaccatcaagaagggcgacctgctgctgaacagagtgcagaagctgagcagagtgatcaacatgtag

SEQ ID NO: 96406 - DNA, 1056 bp, Artificial Sequence
  derived and/or modified sequence
atgaatgagtcaaatgactcaaccaattatgacatggctccatattacgaggcactgtgtaagtcactcgactggcaaatcgacgtggatctcttaaacaagatgaaaaaggccaacgaagatgagttgaagaggctcgacgaggaactagaagacgctgaaaagaacctcggagaatctgaaattagggacgctatgatggcaaaggctgagtatttatgcagaatcggagacaaggagggggctcttaccgcatttcgaaaaacatacgataaaaccgtggccttaggacaccgcttggatatcgtgttctacctcctgcgaattggcctgttttatatggataacgacctcatcactaggaatacggagaaagcaaagtcactgatcgaagagggcggcgattgggacagaagaaatcgattgaaggtgtatcagggcctgtattgcgtagcgatcagagacttcaaacaggccgcagagctgtttctcgataccgtgtctacatttacttcctatgagctgatggattacaaaacctttgtcacctacactgtatatgtgtctatgatcgcgcttgaacgtccagacctgagagaaaaggttattaaaggcgctgagattctggaagtcttacattccctgcccgcagtacgccaatacctcttctccttatatgagtgcagatatagtgtgttctttcagtcactggccgtcgtcgaacaagaaatgaagaaagactggctgttcgcaccccactatcggtactacgtccgagagatgaggattcacgcttattcccagcttctggaatcttacagatctctgaccctggggtacatggccgaagcttttggggtgggagtggaatttatagatcaggagttgtctcggtttattgccgcagggcgcctccactgtaagatcgacaaggtcaatgaaatcgtcgagaccaatcgccctgattctaaaaattggcagtatcaggagactattaagaagggcgacttgctccttaatcgggtccagaagctgagtagagtgatcaatatgtag

SEQ ID NO: 96407 - DNA, 1056 bp, Artificial Sequence
  derived and/or modified sequence
atgaatgaaagcaatgacagcaccaactatgacatggccccctactatgaggccctgtgcaagagcctggactggcagattgatgtggacctgctgaacaagatgaagaaggccaatgaagatgagctgaagaggctggatgaggagctggaggatgctgagaagaacctgggggagagcgagatcagagatgccatgatggccaaggccgagtacctgtgccgcatcggggacaaggagggcgccctgacagccttcaggaagacctatgacaagacagtggccctgggccaccggctggacatcgtgttctacctgctgagaattggcctcttctacatggacaatgacctgatcaccaggaacacagagaaggccaagagcctcatcgaggagggcggggactgggacagaagaaaccggctgaaggtgtaccagggcctgtactgtgtggccatccgggacttcaagcaggccgctgagctgttcctggacacagtgtccaccttcaccagctatgagctgatggactacaagacctttgtgacctacacagtgtatgtgtccatgattgccctggagaggccagacctgcgggagaaggtgatcaagggagctgagatcctggaggtgctgcacagcctgcctgctgtgcggcagtacctgttcagcctgtatgaatgtcgctacagcgtcttcttccagagcctggccgtggtggagcaggagatgaagaaggactggctgtttgccccccactaccgctactacgtgcgggagatgaggatccacgcctacagccagctgctggagagctaccgcagcctgaccctgggctacatggccgaggcctttggagtgggcgtggagttcatcgaccaggagctgagccgcttcatcgccgccggccgcctgcactgcaagattgacaaggtgaatgaaattgtggagaccaacagaccagacagcaagaactggcagtaccaggagaccatcaagaagggggacctgctgctgaacagagtgcagaagctgagcagggtcatcaacatgtag

SEQ ID NO: 96408 - DNA, 1316 bp, Artificial Sequence
  derived and/or modified sequence
tagataggggttttcatttaggccttgcgacatggctgttacatgaccttggttggtctgtttccctaacctctttgtgcctcatttgtcttacctactaaataggctaatagtactacctcgcagcatgaagatgattttaataagatgaatgagagtaacgactcgacaaactatgacatggctccttactatgaagccttgtgcaaatccctcgactggcagatagacgtggacctactcaataaaatgaagaaggcaaatgaagatgagttgaagcgtttggatgaggagctggaagatgcagagaagaatctaggagagagcgaaattcgcgatgcaatgatggcaaaggccgagtacctctgccggataggtgacaaagagggagctctgacagcctttcgcaagacatatgacaaaactgtggccctgggtcaccgattggatattgtattctatctccttaggattggcttattttatatggataatgatctcatcacacgaaacacagaaaaggccaaaagcttaatagaagaaggaggagactgggacaggagaaaccgcctaaaagtgtatcagggtctttattgtgtggctattcgtgatttcaaacaggcagctgaactcttccttgacactgtttcaacatttacatcctatgaactcatggattataaaacatttgtgacttatactgtctatgtcagtatgattgccttagaaagaccagatctcagggaaaaggtcattaaaggagcagagattcttgaagtgttgcacagtcttccagcagttcggcagtatctgttttcactctatgaatgccgttactctgttttcttccaatcattagcggttgtggaacaggaaatgaaaaaggactggctttttgcccctcattatcgatactatgtaagagaaatgagaattcatgcatacagtcagctgctggaatcatataggtcattaacccttggctatatggcagaagcgtttggtgttggtgtggaattcattgatcaggaactgtccaggtttattgctgccgggagactacactgcaaaatagataaagtgaatgaaatagtagaaaccaacagacctgatagcaagaactggcagtaccaagaaactatcaagaaaggagatctgctactaaacagagttcaaaaactttccagagtaattaatatgtaaagccatgtaactaacaaaggatttgctttagagataattatttggaatttttatagcttacttcacaatgtgcccaggtcagctgtataaaataaatactgcattgttgtttc

SEQ ID NO: 96409 - DNA, 1056 bp, Artificial Sequence
  derived and/or modified sequence
atgaacgagagcaacgacagcaccaactacgacatggccccctactacgaggccctgtgtaaatccctcgactggcagattgatgtggacctactcaataagatgaaaaaggctaatgaagacgaacttaaaaggctcgacgaggaactggaagatgccgagaaaaatctgggagaatcggagattagagacgcgatgatggccaaagcggaatatctttgccgcatcggcgacaaagagggcgccctcaccgccttccgaaagacatatgacaagaccgtggccctcggacataggctcgacatcgtcttctacctcttacgaatcggactcttttatatggataacgacctaattaccagaaacacggagaaggccaagtctttaattgaagaaggaggtgactgggatcggcgcaataggctcaaggtctaccagggactgtattgcgtcgctatacgggatttcaagcaggctgcggagctgtttctcgataccgtgtccacctttaccagttacgaactaatggattacaaaaccttcgttacctacacagtttacgtatccatgatagcactagaacgacctgatctcagggaaaaagtcattaagggcgcagagatcttagaggtgctgcatagcctgccagccgtcaggcagtaccttttctctctgtacgaatgcagatactccgtgtttttccaatcactagcggtggtcgaacaagaaatgaagaaagattggctctttgctccccactacaggtattacgtacgcgaaatgcgcattcacgcctactcccagcttcttgagagttatcgctcccttacgctgggatacatggctgaggctttcggggttggcgtagaatttattgatcaggagttgtctcgcttcatagctgctggtcggctgcattgcaaaatcgacaaggtgaacgaaatcgtggagaccaaccgtccagactctaaaaactggcagtatcaggaaactatcaagaagggtgacctgctcctcaaccgcgttcagaagctcagtagagtgatcaacatgtag

SEQ ID NO: 96410 - DNA, 1056 bp, Artificial Sequence
  derived and/or modified sequence
atgaatgaatctaatgatagcaccaattacgatatggctccatactatgaggcactgtgtaagagtttggattggcagatagatgttgatctactgaacaagatgaaaaaggctaacgaagacgagctgaagcggctcgacgaagagctggaggacgctgaaaaaaatctgggcgagagtgagataagggacgcgatgatggcaaaggcggagtacttgtgcagaatcggcgacaaggaaggcgcactaactgccttcagaaagacctacgacaaaaccgtggctctgggtcacagactggacattgtcttctacctgctgaggatagggctattctacatggacaacgatttaatcacaaggaataccgaaaaggcgaagtcgttgatagaggagggcggtgactgggacagacgtaataggcttaaagtgtatcagggactttattgcgttgctataagagactttaagcaggctgcggaactgttcttggacaccgtgagcactttcaccagctatgaactgatggattacaaaaccttcgtgacttatactgtttacgtgagtatgatcgctctagagcgccctgacttgagggagaaagtgatcaaaggtgccgagatcctagaggttctgcactctctccccgctgtacgtcagtacttatttagcctgtacgaatgcaggtattctgtctttttccagagtctggccgtcgttgaacaggagatgaagaaagactggttattcgctccacactatagatattacgtccgagagatgagaattcacgcttactctcaactactggagtcttacaggtctcttaccctcgggtatatggcggaggcatttggcgttggtgtagaattcattgaccaggaactgtcccgtttcattgctgccggtcgtctgcattgcaagattgataaggtgaatgaaattgtcgaaacaaatcgacctgatagcaaaaactggcaataccaggagaccattaagaagggcgacctgttgcttaacagggtgcaaaagctgagcagagtcatcaacatgtag

SEQ ID NO: 96411 - protein, 630 aa, Artificial Sequence
  derived and/or modified sequence
MSDKSELKAELERKKQRLAQIREEKKRKEEERKKKETDQKKEAVAPVQEESDLEKKRREAEALLQSMGLTPESPIAEQPLRVVTADTCLFHYLVPPPMSPSSKSVSTPSEAGSQDSGDGAVGSRRGPIKLGMAKITQVDFPPREIVTYTKETQTPVMAQPKEDEEEDDDVVAPKPPIEPEEEKTLKKDEENDSKAPPHELTEEEKQQILHSEEFLSFFDHSTRIVERALSEQINIFFDYSGRDLEDKEGEIQAGAKLSLNRQFFDERWSKHRVVSCLDWSSQYPELLVASYNNNEDAPHEPDGVALVWNMKYKKTTPEYVFHCQSAVMSATFAKFHPNLVVGGTYSGQIVLWDNRSNKRTPVQRTPLSAAAHTHPVYCVNVVGTQNAHNLISISTDGKICSWSLDMLSHPQDSMELVHKQSKAVAVTSMSFPVGDVNNFVVGSEEGSVYTACRHGSKAGISEMFEGHQGPITGIHCHAAVGAVDFSHLFVTSSFDWTVKLWTTKNNKPLYSFEDNADYVYDVMWSPTHPALFACVDGMGRLDLWNLNNDTEVPTASISVEGNPALNRVRWTHSGREIAVGDSEGQIVIYDVGEQIAVPRNDEWARFGRTLAEINANRADAEEEAATRIPA

SEQ ID NO: 96412 - DNA, 1893 bp, Artificial Sequence
  derived and/or modified sequence
atgtctgataagagcgagctcaaagccgagctggagcgtaagaagcagagactcgcccagatccgtgaggagaagaagcgaaaggaggaggaacggaagaagaaggagaccgaccagaagaaagaagctgtcgccccagtacaagaggagtcggaccttgaaaagaagagacgtgaggccgaggcactgctgcagagcatggggctgaccccagaatcccccattgccgagcagcctctgcgagtggtcacagccgatacctgcttatttcactatctggtcccaccaccaatgtccccatcttccaaatcagtgagtacaccgtccgaggctggctcacaggattcgggggacggagcagtcgggtctagacggggaccaatcaagctgggcatggccaaaattacccaggtcgacttcccacccagggagatcgtaacgtacactaaagaaacgcagactcccgtgatggctcagcccaaagaggatgaggaggaggatgacgatgtggtcgccccaaaacctcccatcgaacccgaggaggaaaagaccttgaaaaaagatgaagaaaatgattcaaaggccccccctcacgagctaacggaagaggaaaaacagcaaatcctccactcggaggagttcctatcatttttcgatcatagtacccgaatagtggagagagcactgtcagaacagataaacatcttctttgattacagtggccgagaccttgaggacaaggagggcgagatccaggccggagctaaactgagtcttaaccgccaattctttgacgagcggtggtctaaacaccgcgttgtctcttgccttgactggtcgtctcagtatcctgaactcctagtagccagctataataataacgaggatgccccccacgaaccagatggagtggcgctggtgtggaacatgaaatataagaagaccactcctgaatacgtcttccactgtcaatctgctgttatgtccgcgaccttcgcaaaattccaccctaatctggtggttggcggcacctactccggccagatcgtattgtgggataaccggtccaacaaaagaactcctgtgcagaggaccccccttagcgctgccgctcacacgcatccagtgtattgcgtgaatgtggtagggactcagaacgctcacaatctaatttcgatctcaacagacggcaaaatctgttcctggagtttagacatgttgtcccacccccaggacagtatggaactggttcataagcaatctaaagccgtggccgtcacttctatgagcttccccgtgggagacgtgaacaattttgtggtgggttcagaggagggctcagtttatacagcttgcagacatgggagcaaggctgggataagcgagatgttcgagggacatcaggggcccatcaccgggatccactgtcacgcagctgtgggagccgtggatttctcacacctgtttgtcaccagctcatttgactggactgttaaactctggaccactaaaaataataagcccctttacagctttgaggataacgccgattacgtgtatgacgtcatgtggagcccaacccatccagcgctgttcgcttgcgtcgacggtatggggcggcttgatctgtggaacctgaacaacgacactgaagttcctaccgcatcaattagcgtggaagggaatccagcactgaaccgagtgcggtggacacattcgggacgagaaatagctgtgggcgattccgaagggcagatcgtgatttacgatgtcggggaacagatcgctgtgccgcgcaatgatgaatgggcccggttcggcagaacactcgctgagatcaatgcaaacagagcggacgctgaggaagaggcagctactcggattccagcttag

SEQ ID NO: 96413 - DNA, 1893 bp, Artificial Sequence
  derived and/or modified sequence
atgtctgacaagtctgagctgaaggccgagctggagaggaagaagcagaggctggcccagatccgggaggagaagaagaggaaggaggaggagaggaagaagaaggagacagaccagaagaaggaggccgtggcccctgtgcaggaggagagtgacctggagaagaagagaagagaggccgaggccctgctgcagagcatgggcctgaccccagagagccccatcgccgagcagcccctgcgggtggtgacagctgacacctgcctcttccactacctggtgcccccacccatgagccccagcagcaagtctgtgtccaccccatctgaggccggcagccaggacagcggagatggagctgtgggcagccggcggggccccatcaagctgggcatggccaagatcacccaggtggacttccccccccgggagatcgtgacctacaccaaggagacccagacccctgtgatggcccagcccaaggaggatgaggaggaggatgatgatgtggtggcccccaagccacccatcgagcctgaggaggagaagaccctgaagaaggatgaggagaatgacagcaaggcccctcctcatgagctgacagaggaggagaagcagcagatcctgcacagcgaggagttcctgtccttctttgaccacagcacccgcatcgtggagcgggccctgtctgagcagatcaacatcttctttgactacagcggccgggacctggaggacaaggagggggagatccaggccggggccaagctgagcctgaaccggcagttctttgatgagcgctggagcaagcaccgggtggtgtcctgcctggactggagcagccagtacccagagctgctggtggccagctacaacaacaatgaagatgcccctcatgagccagatggagtggccctggtgtggaacatgaagtacaagaagaccaccccagaatatgtgttccactgccagagcgctgtgatgtctgccacctttgccaagttccaccccaacctggtggtgggcggcacctacagcggccagatcgtgctgtgggacaacagaagcaacaagaggacccctgtgcagaggacccccctgtctgctgctgcccacacccaccctgtgtactgtgtgaatgtggtgggcacccagaatgcccacaacctgatcagcatcagcacagatggcaagatctgctcctggagcctggacatgctgagccacccccaggacagcatggagctggtgcacaagcagagcaaggctgtggccgtgacctccatgtccttccctgtgggagatgtgaacaactttgtggtgggcagcgaggagggctctgtgtacacagcctgccgccacggcagcaaggccggcatcagcgagatgtttgagggccaccagggccccatcaccggcatccactgccacgccgctgtgggcgctgtggacttcagccacctgtttgtgaccagcagctttgactggacagtgaagctgtggaccaccaagaacaacaagcccctgtacagctttgaagataatgctgactatgtgtatgatgtgatgtggagccccacccacccagccctgtttgcctgtgtggatggcatgggccgcctggacctgtggaacctgaacaatgacacagaggtgcccacagccagcatctctgtggagggcaacccagccctgaacagagtgcgctggacccacagcggccgggagattgctgtgggggacagcgagggccagatcgtcatctatgatgtgggggagcagattgctgtgcccagaaatgatgagtgggcccgcttcggccgcaccctggccgagatcaatgccaacagagcagatgctgaggaggaggccgccacccgcatcccagcctag

SEQ ID NO: 96414 - DNA, 1893 bp, Artificial Sequence
  derived and/or modified sequence
atgagcgacaagagcgagctgaaggccgagctggagcggaagaagcaacggctcgcacagatccgagaggaaaaaaaacgcaaggaagaggaaagaaagaaaaaggagacagaccagaagaaagaggccgtggcgcctgtgcaggaggaatcagatttagagaaaaaacgccgggaggccgaagctttgctgcagtcaatgggcctcacacctgagtcccccatagcagagcagcctctgcgcgtagttaccgcggacacctgcctttttcattatctggtgccaccccccatgagcccatcttccaaaagcgtgagcaccccttcggaggcggggagtcaggactccggagacggcgccgttgggagtcgtcgaggccctattaagttgggcatggccaagattacccaggtcgatttccctccacgcgagattgtgacgtacacaaaagaaacacagacaccagttatggcccagcctaaggaagatgaggaagaagacgacgacgtggtcgcccccaaacctcctatcgagcctgaggaagagaaaacactgaagaaagacgaagagaatgactccaaggcaccgcctcacgaactgacggaggaggaaaagcaacagatcctgcactcagaggaatttttgtccttctttgatcattcaaccaggattgtggagagagctctcagcgagcagatcaacatcttcttcgattactcaggtagggatctggaggacaaggagggtgaaatccaggcgggtgccaaactgtcactgaatcgccaattttttgatgaacgctggagcaaacacagagtcgtgtcgtgtctcgattggagcagtcagtacccagaattgctcgtggcctcttacaacaacaacgaggatgcccctcacgagcccgacggtgtcgcccttgtgtggaacatgaagtacaagaaaacgacccctgagtacgtctttcactgtcagagcgctgtgatgagcgccactttcgccaaatttcatccaaacctggttgttgggggcacctacagtggccagattgtgttgtgggataataggtctaacaagcgcacgcccgtgcaaaggacgcccctcagcgctgctgcccatacccaccccgtctactgtgtaaacgtcgtcggaacacaaaatgcccataacctgatctctatctccaccgacggtaaaatctgttcttggtctctggacatgctctcccacccgcaggattccatggaactcgtgcacaagcagagtaaagctgttgcagtaaccagcatgagctttcctgtgggagacgtgaacaactttgtcgtgggcagcgaggagggatctgtgtatacagcttgccgccacggctccaaggctggcatttcagaaatgttcgaaggacaccagggaccgatcacaggaatccattgtcacgcagctgtgggagctgtagacttttcacacctcttcgtcacctccagcttcgactggaccgtcaaactgtggaccaccaaaaacaataagcctctatactcgttcgaagataatgctgactacgtgtatgatgtcatgtggtctcctacacaccccgctctattcgcttgtgtagatggaatgggcaggctcgatctatggaatctgaacaatgacaccgaagtaccaacagcttccatatctgtagagggcaacccagcccttaatagggtgcgttggactcatagcgggcgcgaaatagcggtgggagatagcgaaggacagatcgtgatttatgatgtaggtgaacaaatcgccgtaccaaggaacgatgaatgggctcgatttgggaggaccctcgctgaaatcaatgctaatcgcgccgatgccgaagaagaagcagccactcgcattccagcctag

SEQ ID NO: 96415 - DNA, 1893 bp, Artificial Sequence
  derived and/or modified sequence
atgtctgataaaagtgagctgaaggcagagctcgagagaaaaaagcagagactggctcagatccgcgaggagaagaaaagaaaggaagaggagaggaaaaaaaaggagacggaccagaagaaggaagcagtggctcctgttcaggaggagagcgacctcgaaaagaaaaggcgtgaagctgaggctttgcttcagagtatggggctcacacctgaatcgcctatagctgaacagccactacgggtggtgacagctgatacctgtctgtttcactatcttgtgccccctccgatgagcccgagctccaaatctgtgagcacaccctccgaagcgggttcacaggattctggagacggagccgtgggctcaaggagaggtccgattaaactgggtatggcaaagattactcaagtggacttcccaccacgggagatagtgacttatactaaagaaacacagactccggttatggcccagcctaaggaagatgaagaagaggatgacgacgtcgtcgcacccaaacctcccattgaacctgaagaggagaaaaccctcaagaaagatgaagagaatgacagtaaggccccaccgcatgaactgaccgaagaggaaaaacagcaaattctccactctgaggagttcctgagcttctttgaccacagcaccagaatcgttgagcgggcattgagcgagcagattaacatattttttgattatagcgggagagacctggaggataaagagggcgagatccaggctggggctaaactgtcattaaaccgccaattttttgacgagcgctggtccaagcatcgggttgtgtcttgccttgactggtccagccagtacccagagctgctcgtggcgagctataacaacaacgaggatgcacctcacgagcccgatggagtggcattagtgtggaatatgaagtacaaaaaaaccacccctgagtacgtgtttcattgtcaaagtgcggttatgagcgcgactttcgcgaagttccaccccaacctcgtagtcggtggtacttactcaggccaaatcgtattgtgggacaaccgatcgaacaagcgcacgcctgttcagcgaactcctctgagcgctgccgcacacacccaccctgtctattgtgtgaacgttgtggggactcagaacgctcacaacctcattagcatcagtactgacggtaagatttgcagctggtcgcttgacatgctgagccacccccaagattccatggaacttgtccacaagcagtcaaaggcagtcgccgtgacaagtatgtctttccctgtgggcgacgtcaacaatttcgtcgtcggttccgaggaagggagcgtatacacagcctgcaggcacggctccaaagcgggtatttcagaaatgttcgagggccatcagggcccaatcactggcatacactgccatgctgccgtgggggcagtggatttctcccacctgttcgttaccagctccttcgactggacagtcaagctgtggaccaccaaaaataataagcctttatattcatttgaagacaacgccgattacgtgtacgacgtaatgtggtcacccacacatccggctctcttcgcatgcgtggacggaatgggcagattggacctatggaacctgaacaacgatacggaagtgccgactgcatcaattagcgtagaaggaaatccagccctcaatcgcgtcagatggactcacagcggaagggagattgccgtgggtgacagtgaaggacaaattgttatctatgatgtaggagaacagattgctgtccccagaaacgatgagtgggccaggttcgggaggactcttgctgagataaacgccaatcgtgccgacgcagaagaggaggccgctactagaatacccgcatag

SEQ ID NO: 96416 - DNA, 1893 bp, Artificial Sequence
  derived and/or modified sequence
atgagcgacaagagcgagctgaaggccgagctggagagaaagaagcagagactggcccagatcagagaggagaagaagagaaaggaggaggagagaaagaagaaggagaccgaccagaagaaggaggccgtggcccccgtgcaggaggagagcgacctggagaagaagagaagagaggccgaggccctgctgcagagcatgggcctgacccccgagagccccatcgccgagcagcccctgagagtggtgaccgccgacacctgcctgttccactacctggtgcccccccccatgagccccagcagcaagagcgtgagcacccccagcgaggccggcagccaggacagcggcgacggcgccgtgggcagcagaagaggccccatcaagctgggcatggccaagatcacccaggtggacttcccccccagagagatcgtgacctacaccaaggagacccagacccccgtgatggcccagcccaaggaggacgaggaggaggacgacgacgtggtggcccccaagccccccatcgagcccgaggaggagaagaccctgaagaaggacgaggagaacgacagcaaggcccccccccacgagctgaccgaggaggagaagcagcagatcctgcacagcgaggagttcctgagcttcttcgaccacagcaccagaatcgtggagagagccctgagcgagcagatcaacatcttcttcgactacagcggcagagacctggaggacaaggagggcgagatccaggccggcgccaagctgagcctgaacagacagttcttcgacgagagatggagcaagcacagagtggtgagctgcctggactggagcagccagtaccccgagctgctggtggccagctacaacaacaacgaggacgccccccacgagcccgacggcgtggccctggtgtggaacatgaagtacaagaagaccacccccgagtacgtgttccactgccagagcgccgtgatgagcgccaccttcgccaagttccaccccaacctggtggtgggcggcacctacagcggccagatcgtgctgtgggacaacagaagcaacaagagaacccccgtgcagagaacccccctgagcgccgccgcccacacccaccccgtgtactgcgtgaacgtggtgggcacccagaacgcccacaacctgatcagcatcagcaccgacggcaagatctgcagctggagcctggacatgctgagccacccccaggacagcatggagctggtgcacaagcagagcaaggccgtggccgtgaccagcatgagcttccccgtgggcgacgtgaacaacttcgtggtgggcagcgaggagggcagcgtgtacaccgcctgcagacacggcagcaaggccggcatcagcgagatgttcgagggccaccagggccccatcaccggcatccactgccacgccgccgtgggcgccgtggacttcagccacctgttcgtgaccagcagcttcgactggaccgtgaagctgtggaccaccaagaacaacaagcccctgtacagcttcgaggacaacgccgactacgtgtacgacgtgatgtggagccccacccaccccgccctgttcgcctgcgtggacggcatgggcagactggacctgtggaacctgaacaacgacaccgaggtgcccaccgccagcatcagcgtggagggcaaccccgccctgaacagagtgagatggacccacagcggcagagagatcgccgtgggcgacagcgagggccagatcgtgatctacgacgtgggcgagcagatcgccgtgcccagaaacgacgagtgggccagattcggcagaaccctggccgagatcaacgccaacagagccgacgccgaggaggaggccgccaccagaatccccgcctag

SEQ ID NO: 96417 - DNA, 2211 bp, Artificial Sequence
  derived and/or modified sequence
agttggtgttgggggcttaggcgagggacgttaccgggaagttgcaggcgggaggactcttccccatccagtcacctgacaggtcacaaacatgtcagacaaaagtgaattaaaggctgagttggaacgtaagaagcagcgactggcccaaatcagagaggaaaagaagagaaaagaagaagaaaggaaaaaaaaagaaacagaccagaagaaggaagctgttgctcctgtgcaagaagaatcagatcttgaaaaaaaaaggagagaagctgaagcattgcttcaaagcatggggctaactccagaatcccccattgctgagcaacctctccgtgtagtaacagcggatacctgtctatttcactatttagtccctcctcctatgtctccatcctccaaatctgtgagcactccaagtgaagctggaagccaagactctggagatggcgccgtgggatctagacgaggacctattaaacttggaatggctaaaatcacgcaagtcgactttcctcctcgagaaattgtcacgtatacaaaggaaactcagactccagttatggctcaacccaaagaagatgaagaggaagatgatgatgtagtggctcctaaaccacctattgaacctgaagaagagaaaactttaaagaaagatgaggaaaatgatagtaaagctccccctcatgagctgactgaagaagaaaagcaacaaatcttgcactctgaggaatttttaagtttctttgaccattctacaagaattgtagaaagagctctttctgagcagattaacatcttctttgactatagtgggagagatttggaagacaaagaaggagagattcaagcaggtgctaaactgtcattaaatcgacaattttttgacgaacgttggtcaaagcatcgggtggttagttgtttggattggtcatctcagtatccggagttactcgtggcttcctataacaacaatgaagatgcccctcatgagcctgatggtgtggcccttgtatggaatatgaaatacaaaaaaactaccccagagtatgtgtttcactgccagtcagctgtgatgtctgccacatttgcaaaatttcatccaaatcttgttgttggtggtacatattcaggccaaattgtgctttgggataaccgtagcaataaaagaactccagtgcaaagaactccactgtcagcagctgcacacacacaccctgtatattgtgtaaatgttgttggaacacaaaatgctcacaatctgattagcatctctactgatggaaaaatttgttcatggagtctggacatgctttcccatccacaggatagcatggagttggttcataaacagtcaaaagcagtagctgtgacatctatgtccttccctgttggagatgtcaacaactttgttgttgggagtgaagaaggttctgtgtacacagcatgccgccatggcagcaaagctggaatcagtgagatgtttgaggggcatcaaggaccaatcactggcatccattgtcatgcagctgttggagcagtagacttctcacatctttttgtcacttcatcgtttgactggacagtaaagctttggacaactaagaataacaagcctttgtattcatttgaagataatgcagactatgtttatgatgttatgtggtcacctacccacccagccctgtttgcctgtgtggatggcatggggagattggatttgtggaatctcaataatgacacagaggtaccaactgccagcatttctgtggagggtaatcctgctcttaatcgtgtgagatggacccattctggcagagagattgctgtgggtgattctgaaggacagattgttatatacgatgtgggagagcagattgctgttccccgcaatgatgaatgggcacggtttggccgaacacttgcagaaattaatgcaaaccgagctgatgcagaggaggaagcagctacccgaatacctgcttagttcctgaaaaggggagtgtaactagtggatttgggaaaggttcttaagtagatcctgagactatttgcatgcttctgtctaaatgataattaaaaggaaatttcatggattaaaccatgggtttaatgcagcaaggaaacttacaatgtccctttatatataacatgcatcttgttttggatttgtgtcattttttaatatagctgattgacttcacagaaagcagc

SEQ ID NO: 96418 - protein, 612 aa, Artificial Sequence
  derived and/or modified sequence
MSDKSELKAELERKKQRLAQIREEKKRKEEERKKKETDQKKEAVAPVQEESDLEKKRREAEALLQSMGLTPESPIVPPPMSPSSKSVSTPSEAGSQDSGDGAVGSRRGPIKLGMAKITQVDFPPREIVTYTKETQTPVMAQPKEDEEEDDDVVAPKPPIEPEEEKTLKKDEENDSKAPPHELTEEEKQQILHSEEFLSFFDHSTRIVERALSEQINIFFDYSGRDLEDKEGEIQAGAKLSLNRQFFDERWSKHRVVSCLDWSSQYPELLVASYNNNEDAPHEPDGVALVWNMKYKKTTPEYVFHCQSAVMSATFAKFHPNLVVGGTYSGQIVLWDNRSNKRTPVQRTPLSAAAHTHPVYCVNVVGTQNAHNLISISTDGKICSWSLDMLSHPQDSMELVHKQSKAVAVTSMSFPVGDVNNFVVGSEEGSVYTACRHGSKAGISEMFEGHQGPITGIHCHAAVGAVDFSHLFVTSSFDWTVKLWTTKNNKPLYSFEDNADYVYDVMWSPTHPALFACVDGMGRLDLWNLNNDTEVPTASISVEGNPALNRVRWTHSGREIAVGDSEGQIVIYDVGEQIAVPRNDEWARFGRTLAEINANRADAEEEAATRIPA

SEQ ID NO: 96419 - DNA, 1839 bp, Artificial Sequence
  derived and/or modified sequence
atgagcgataagtccgaactcaaggccgagttggaacggaaaaaacagagactagctcagatcagagaggaaaagaaaaggaaggaggaggagcggaagaagaaggagactgaccagaaaaaggaagcagtggctcctgtgcaggaggaatcagatctggagaagaaacggcgtgaagctgaggcccttctccaatccatgggtctaactcctgagtcaccaattgttcctccgcccatgtctccgagctccaagagcgtctctacaccctccgaggctggcagtcaggactccggcgatggagccgttgggtccagaagaggacccataaagctcggcatggcgaagattactcaggtcgattttccaccaagagagatcgtgacctacacaaaagagactcaaacccccgtgatggctcagccaaaggaggatgaggaggaagatgacgatgtggtcgccccaaaacctcctatcgaacctgaggaagagaagacccttaaaaaggacgaagagaacgattctaaggcaccccctcatgagctaaccgaagaagagaagcaacagatactgcactcggaagagtttctgagtttttttgatcactctacacgtatcgtagagcgagccctcagcgagcagataaacattttctttgattattccggccgggacctggaagacaaagagggcgaaattcaagctggggccaagttgtccttgaacagacagttttttgacgaacggtggtcaaaacaccgcgttgtgtcatgtctcgactggtcctcccaataccctgaactgttggtggcaagttataataacaatgaagacgcacctcacgagcctgacggagttgccctcgtgtggaacatgaaatataaaaagacaacacccgaatatgtttttcattgccagagcgcagtgatgtccgccacattcgcaaagtttcaccctaatctggtcgtgggaggtacgtattctggtcagatcgtgctgtgggacaacaggagcaataagaggactccggtccagcggacccccctatctgccgctgctcatacccacccagtatattgtgtgaatgtggtgggcacccagaacgcacataacttgatttccatctcgaccgacggaaagatttgttcctggtccctcgacatgttgtcccatccacaggactcaatggagctcgtacacaaacaaagcaaagccgtggccgtgacatcgatgtcttttccggtaggcgacgtcaacaactttgtggtgggctccgaagaaggctccgtttatactgcatgccggcacggtagcaaagccggcattagtgaaatgttcgagggtcaccagggtcctatcacgggtatacactgccacgccgccgtgggagctgttgatttctctcacttattcgtgactagtagcttcgactggaccgtcaagctctggacgaccaagaataataagccactgtattctttcgaggacaacgcggattatgtttacgacgtgatgtggtcgcctactcatcccgccttgtttgcctgcgttgacggaatgggcaggctggatctgtggaacctcaacaacgataccgaagtgcctaccgcctccatatccgtcgaagggaatccagccttaaatcgcgtgagatggacccacagcggccgcgagatcgcagtcggggattcagagggtcaaatcgtcatctatgatgtcggggaacagatcgccgttccgagaaacgacgaatgggcccgcttcggccggactttggctgaaataaacgcaaatcgagctgacgccgaggaggaagctgcaacccggattcctgcttag

SEQ ID NO: 96420 - DNA, 1839 bp, Artificial Sequence
  derived and/or modified sequence
atgagcgacaaatccgaacttaaagccgagctggaaaggaagaagcagcggctcgcccagattcgggaggaaaaaaagaggaaggaagaagagcgcaaaaaaaaagagacggatcaaaagaaggaagctgtcgcaccagtgcaagaagagtccgacctggagaaaaagcggagagaggccgaggctctgctgcagagtatgggcctcacacccgagagccccattgtacctcccccaatgtccccctccagtaagtctgtgtctactccgtcagaagctggaagtcaagactccggcgacggcgcagtcggatctagacgggggcctataaaactgggtatggcaaaaatcacccaggttgacttcccaccacgggagatcgtgacatatacgaaagagacccagacgcccgttatggcccagccaaaggaggacgaggaagaagacgatgacgtagtggcccccaagccccctatagagccagaagaggagaagacactgaaaaaagacgaggaaaatgactctaaggcccccccccacgagctgactgaggaggaaaagcagcagatcctgcatagtgaagagttcttgagtttttttgatcactctactcgcatcgtcgaaagggccttatctgaacagatcaacatcttcttcgattacagtggtcgagatttggaggacaaggaaggagaaattcaagcaggagcaaaactgtcgcttaatcgccagttctttgacgagcgttggagtaagcaccgcgtagtcagctgcctggattggagctcacagtacccggagctgctcgtggccagttacaacaataatgaggacgccccgcatgagccagatggggtggcactggtgtggaacatgaagtacaagaagaccacaccagagtatgttttccattgccagtctgccgtgatgagcgctacatttgcaaagtttcatccaaacctagtggtgggcggcacatattcaggacagattgtgctgtgggacaataggtcaaataagcgcacacctgtccagcgcacccccctcagcgcggccgctcatacccatcccgtctactgcgtgaacgtcgtgggaacacaaaacgctcataatctgatttcaattagcacagatggaaaaatctgcagctggagcctggatatgctgagccatccccaggatagtatggaactggtacacaaacagagcaaagcggtggccgtgaccagcatgtcctttccagtcggtgacgtcaataactttgtcgtcggctcggaagagggttcagtgtacaccgcctgccgccatgggagtaaggctggtatctcagaaatgtttgagggacatcaggggccaattaccgggattcactgccacgctgcggtcggagctgtcgattttagccacctattcgtgacatcgtcctttgactggacagtcaaattgtggacgacaaaaaacaataagccactgtacagtttcgaggacaatgctgactacgtctacgacgtcatgtggtcacccacacacccagccctgtttgcttgtgtcgacggcatgggacgtcttgacctctggaacctcaacaacgacaccgaagtgcctaccgccagcatttcagttgagggcaaccctgcgctgaacagagtccgatggacacactcagggcgggaaattgcagttggagacagcgaaggccaaattgtcatttacgatgtgggcgagcagatagcagtgcctcgaaatgacgaatgggcgagatttggacgtaccctcgcggaaattaacgccaatcgagcagacgcggaggaggaggctgccacacgtatccctgcctag

SEQ ID NO: 96421 - DNA, 1839 bp, Artificial Sequence
  derived and/or modified sequence
atgtctgacaagtctgagctgaaggccgagctggagaggaagaagcagaggctggcccagatccgggaggagaagaagaggaaggaggaggagaggaagaagaaggagacagaccagaagaaggaggccgtggcccctgtgcaggaggagagtgacctggagaagaagagaagagaggccgaggccctgctgcagagcatgggcctgaccccagagagccccatcgtgcccccacccatgagccccagcagcaagtctgtgtccaccccatctgaggccggcagccaggacagcggagatggagctgtgggcagccggcggggccccatcaagctgggcatggccaagatcacccaggtggacttccccccccgggagatcgtgacctacaccaaggagacccagacccctgtgatggcccagcccaaggaggatgaggaggaggatgatgatgtggtggcccccaagccacccatcgagcctgaggaggagaagaccctgaagaaggatgaggagaatgacagcaaggcccctcctcatgagctgacagaggaggagaagcagcagatcctgcacagcgaggagttcctgtccttctttgaccacagcacccgcatcgtggagcgggccctgtctgagcagatcaacatcttctttgactacagcggccgggacctggaggacaaggagggggagatccaggccggggccaagctgagcctgaaccggcagttctttgatgagcgctggagcaagcaccgggtggtgtcctgcctggactggagcagccagtacccagagctgctggtggccagctacaacaacaatgaagatgcccctcatgagccagatggagtggccctggtgtggaacatgaagtacaagaagaccaccccagaatatgtgttccactgccagagcgctgtgatgtctgccacctttgccaagttccaccccaacctggtggtgggcggcacctacagcggccagatcgtgctgtgggacaacagaagcaacaagaggacccctgtgcagaggacccccctgtctgctgctgcccacacccaccctgtgtactgtgtgaatgtggtgggcacccagaatgcccacaacctgatcagcatcagcacagatggcaagatctgctcctggagcctggacatgctgagccacccccaggacagcatggagctggtgcacaagcagagcaaggctgtggccgtgacctccatgtccttccctgtgggagatgtgaacaactttgtggtgggcagcgaggagggctctgtgtacacagcctgccgccacggcagcaaggccggcatcagcgagatgtttgagggccaccagggccccatcaccggcatccactgccacgccgctgtgggcgctgtggacttcagccacctgtttgtgaccagcagctttgactggacagtgaagctgtggaccaccaagaacaacaagcccctgtacagctttgaagataatgctgactatgtgtatgatgtgatgtggagccccacccacccagccctgtttgcctgtgtggatggcatgggccgcctggacctgtggaacctgaacaatgacacagaggtgcccacagccagcatctctgtggagggcaacccagccctgaacagagtgcgctggacccacagcggccgggagattgctgtgggggacagcgagggccagatcgtcatctatgatgtgggggagcagattgctgtgcccagaaatgatgagtgggcccgcttcggccgcaccctggccgagatcaatgccaacagagcagatgctgaggaggaggccgccacccgcatcccagcctag

SEQ ID NO: 96422 - DNA, 1839 bp, Artificial Sequence
  derived and/or modified sequence
atgagcgacaagagcgagctgaaggccgagctggagcggaagaagcaaagattggcacagatcagagaggagaaaaaacgaaaagaagaagagcggaagaagaaagaaacggatcagaagaaagaagcagttgcgccagtgcaggaggagtcagacttagagaagaagcggagggaggctgaggccctcctccaatccatgggcctgacgccagaaagtcccatcgtccccccccctatgtcacccagttcaaagtcagtcagcactccatcggaggctggaagtcaagatagtggcgatggcgccgtgggcagtcgcagaggccccatcaaactgggtatggccaagattacccaagtcgactttcccccacgggaaattgtcacctacacgaaagagactcagaccccagttatggcacaacccaaagaagatgaggaggaggatgacgacgtggtggcccccaagccccctatcgaacctgaagaggagaaaacactgaagaaggatgaggagaacgattctaaggcgccaccacatgaacttaccgaggaggagaagcagcaaattttgcactccgaggaatttcttagcttcttcgaccatagcacccggatcgttgaaagagctctaagtgagcagattaacattttcttcgattatagcgggagagatctcgaggataaggaaggagagatccaggcaggagcaaaactgtcccttaatcgccaatttttcgacgaacgctggtcaaagcaccgggtcgtcagctgcctggattggtcttctcagtaccccgagttacttgtggccagttacaataacaacgaggacgctccccacgaacccgacggggtggccctcgtgtggaatatgaaatacaagaagaccacccccgaatacgtcttccattgccagtcagctgtgatgtccgccacgtttgccaagttccacccgaaccttgtagtgggaggcacttacagcggacagatcgtattatgggataatagatccaacaagcggacccccgtgcagcgaactccactttctgcagctgcacacacccatccagtgtactgcgttaatgttgttggcacacaaaacgctcataatctgatttcaatctctacagatgggaaaatctgtagctggtcactggacatgctttcacatccacaggacagcatggagctggttcacaaacagagtaaggcagtggcggtgaccagcatgtcgttccccgtgggggatgtcaataattttgtggttggaagcgaagagggcagcgtctacaccgcatgtaggcacggatcgaaggcagggatcagcgagatgtttgaagggcaccaggggccgatcacagggatccactgccacgccgccgtgggggccgtggatttttctcacctgtttgttacctcatcgtttgattggaccgtcaaactttggaccactaaaaataacaaacccttgtacagcttcgaggataatgcggactacgtgtatgacgtcatgtggtcaccaactcaccccgccctatttgcatgtgtcgacgggatggggagactggatctctggaatctgaataacgacacagaagtgcccacggcaagtatttcagtggagggaaatccagccctgaaccgagtgcgctggacacactctgggcgggagatcgcagtgggtgattctgaggggcagatcgtgatatacgacgtgggcgaacagattgccgttcctcggaatgacgagtgggccaggtttggcaggaccctcgcagaaattaacgcaaaccgagctgacgccgaggaggaagccgccacccgcatccctgcctag

SEQ ID NO: 96423 - DNA, 1839 bp, Artificial Sequence
  derived and/or modified sequence
atgagcgacaagagcgagctgaaggccgagctggagcggaagaagcaacggctcgcacaaattcgcgaggagaagaagagaaaagaggaggaacgaaagaagaaggagaccgaccaaaaaaaagaggccgtcgcccccgtccaggaggaatctgacctggaaaaaaaacgccgagaagccgaagcactgctgcagtctatgggactgacacctgagtcccccattgtgcccccccccatgtcccctagcagtaaatcagtgtctactccgtcagaggctggctctcaggatagtggcgatggcgccgttggttctagacgcgggccgattaaattgggcatggcaaagattacacaggttgacttccctccacgcgagatcgtgacatataccaaggaaacccaaacccctgtgatggctcaaccaaaagaggatgaggaagaggatgacgacgtggttgctcctaagccaccaatagaacccgaggaagagaaaaccctgaaaaaggacgaggagaatgattccaaggcacccccccatgaactaaccgaggaagagaagcagcagattctgcattctgaggagtttctctcctttttcgatcactcgaccaggattgtcgagcgggctctatccgaacagatcaacatctttttcgactatagcggaagagatcttgaagataaggagggagaaattcaggcaggcgccaaactcagcctgaaccgtcaattttttgatgagcgctggagcaaacacagggtggtgagctgtcttgattggagctctcaatacccagagctgttagtggctagctacaacaacaacgaagatgctcctcacgaaccggacggggtggccctcgtctggaatatgaagtataaaaagaccacccctgaatacgtcttccactgccagtccgctgttatgtcagccacattcgcaaagttccacccaaatctcgttgtgggcggcacctactccggtcaaatcgtcctctgggataatcgttctaataagcgcactcccgtccaacgcacccccctgtccgctgctgctcacacacacccagtgtactgcgtgaacgttgtgggcacccaaaatgctcacaaccttatctcaatcagcacagacgggaagatctgctcctggagcttagacatgctgtcccatccgcaggattctatggaacttgtacacaagcaatctaaggctgtagccgtaacaagtatgagtttccccgtcggagatgtcaataactttgtagtggggagtgaggaaggatctgtctatactgcgtgtagacacgggtctaaggcagggatttctgaaatgttcgaaggtcaccagggccctattaccggaatccattgtcacgccgccgtaggtgccgtggacttcagccacctgttcgtgacgtcttcattcgattggacagtgaagctgtggactaccaagaacaataaacctctgtacagcttcgaggacaacgccgactacgtctacgatgttatgtggtctcctacccatccggctctgtttgcatgtgtggacggcatgggccgccttgatctctggaacctaaacaacgacaccgaggttccgaccgcctctatctcagtagaagggaaccccgcactaaatcgtgtgcggtggacgcactctgggagagaaattgcggtgggcgattctgaagggcagattgttatttatgacgttggcgaacagatcgccgtgcccagaaatgatgagtgggctcgtttcggacggactctggccgagataaatgctaatagagctgatgctgaggaggaggccgccacaaggataccagcatag

SEQ ID NO: 96424 - DNA, 1839 bp, Artificial Sequence
  derived and/or modified sequence
atgtcggacaagagcgagctgaaagccgagttggagcggaaaaaacagaggctggcacagatccgggaggagaagaagagaaaggaggaagagcggaagaaaaaagaaacagatcagaagaaagaggcagtggcccctgtgcaggaggagagcgacttagaaaagaagcggcgtgaggctgaggccctgctgcagtccatgggtctgacaccagaatcacccatcgtgccccctccaatgtcaccttccagcaagagtgtgagcacgcctagcgaggctggctctcaggattccggagatggtgccgtcggatctcgcagggggcctatcaaactgggtatggcgaaaattacgcaagttgattttccgcctcgcgagattgtgacttatacaaaggagacccagacacctgtgatggcccagcctaaggaagacgaagaagaagatgatgacgtagtcgcgccaaagccgccaatcgagccggaggaggaaaagactctcaagaaggacgaagaaaatgactcgaaagcccctccgcacgagcttacagaagaggaaaagcagcagatcctgcatagtgaggagttcctctcctttttcgaccattccacgaggatcgtcgaaagagccctctcagagcaaataaatatttttttcgattactctggacgcgatttagaagataaggagggggaaattcaagcaggggcaaaactgtcactgaacagacagttcttcgatgaacggtggagtaaacatagagttgtgtcctgtctggattggagctcacagtacccggaactgctcgtggctagttataacaataacgaggacgctcctcatgaacccgacggtgtggccctggtgtggaacatgaaatacaaaaaaacaacaccagagtatgtatttcattgccagtcagctgttatgagcgccacctttgcaaaatttcaccctaaccttgtggtcggcggtacttattctggacagatagtcctgtgggacaaccgaagcaacaagcgtacacctgtgcagagaacccctctttcggccgctgcccatacacaccctgtttactgcgtgaatgtcgtgggaacacagaatgcccacaatttgatctccattagtacagatggtaaaatctgtagctggagtctcgacatgttgtcgcaccctcaagattcaatggaattggtgcataagcagtccaaagccgtggcagtgaccagcatgagctttccggtgggagatgttaacaactttgtcgttgggtccgaagagggctctgtttatacggcttgtagacatggcagtaaagcaggaataagtgagatgtttgaaggacaccaagggcctatcacaggtattcattgccatgcggctgtgggcgcagtcgactttagccacctgttcgtaacatcctcttttgactggacagtaaaactatggaccactaaaaacaacaagcctctctactcctttgaagacaacgcggactacgtgtacgacgtaatgtggagcccgactcaccctgccctgtttgcctgcgtagatgggatgggcagactggatctctggaatctcaataacgataccgaagttccgactgcgtctatatccgtcgaagggaaccctgcgttgaatcgagtgcgttggacccatagcgggagagagatcgcagtgggggatagcgaagggcagatagtgatctatgatgtgggggagcagatagcagtccctcggaacgacgaatgggcgaggtttgggcgaacacttgccgagataaacgccaatagagcagacgcagaggaggaggccgcaactaggatccctgcctag

SEQ ID NO: 96425 - DNA, 1839 bp, Artificial Sequence
  derived and/or modified sequence
atgagcgacaaatccgagctgaaggccgagctagagcgcaagaagcaacgacttgcacagatcagagaagaaaaaaagcgcaaagaagaagagagaaaaaaaaaagagacagaccagaagaaggaagccgttgcaccagtccaggaagaaagcgatttggagaaaaagcgcagggaggcagaagccctcctccagagcatgggcttaactcccgaaagccccatcgttcctcctcctatgtctccgagcagcaagtctgtgagcacaccatctgaggctggctcccaggactcgggcgacggagcagtggggtcacgaagggggcctatcaaattgggaatggcgaaaatcacacaggtggatttcccacccagagagatcgtgacctacaccaaggagacccagacacctgtcatggctcagcccaaagaggacgaagaagaagacgatgatgtcgtggcccctaagcccccaattgaacctgaggaggagaagaccctcaaaaaagatgaggagaacgattcaaaagcacctcctcatgagctgactgaggaggagaagcagcagattctgcactccgaagagttccttagtttttttgatcactctactaggatcgtggagagggctctcagcgaacaaattaacatttttttcgattactccgggagggatctcgaagacaaggaaggtgaaattcaagccggagcgaagctgagcctgaaccgacagttctttgatgagcgatggagtaagcacagggttgtgagttgtctagactggtcgtcgcagtacccagagctattggtagccagctacaacaacaacgaggatgccccacacgagcctgatggtgttgctttagtttggaacatgaagtacaaaaagactacccccgaatacgtcttccattgtcagtccgccgtgatgtccgctactttcgccaagttccatccaaacctggtggtcggcggtacttattctggacaaatcgtgctgtgggacaatcgatctaacaagaggacccctgtgcagcgaactcctctgtcagccgctgcccatacccatcctgtctattgcgtgaatgtagtgggcacacaaaacgcccataatctgatctcaatcagcaccgacggtaaaatctgttcctggtcccttgatatgttgtcccacccccaagactcgatggagctcgtgcacaaacagagtaaagcagtcgctgttactagcatgagcttccctgtgggcgacgtcaataattttgtggtgggatctgaggagggcagcgtttacactgcttgtcggcacggcagtaaagccggaatcagcgaaatgttcgaaggtcaccaagggcctatcacaggcattcactgtcacgccgcagtcggcgcagtggacttttcacatctcttcgtgacctcgtccttcgactggacagtgaaactgtggacgactaaaaataacaaacctctgtattcctttgaagacaacgctgactacgtatacgatgtcatgtggtcgccaacccatcccgctctgttcgcctgtgtcgatggcatgggcaggctggatctgtggaaccttaacaatgacactgaagttcctactgccagtatttccgtcgagggtaatccagcactgaaccgagtaaggtggacccattcgggaagggagatcgccgtgggcgacagcgaggggcagattgttatatatgacgtcggcgagcagatcgccgtgcccaggaacgacgagtgggcacggttcggcagaacacttgctgagattaacgccaatagggctgacgctgaggaagaagcagccactcgtattccagcttag

SEQ ID NO: 96426 - DNA, 1839 bp, Artificial Sequence
  derived and/or modified sequence
atgagcgacaagagcgagctgaaggccgagctggagagaaagaagcagagactggcccagatcagagaggagaagaagagaaaggaggaggagagaaagaagaaggagaccgaccagaagaaggaggccgtggcccccgtgcaggaggagagcgacctggagaagaagagaagagaggccgaggccctgctgcagagcatgggcctgacccccgagagccccatcgtgcccccccccatgagccccagcagcaagagcgtgagcacccccagcgaggccggcagccaggacagcggcgacggcgccgtgggcagcagaagaggccccatcaagctgggcatggccaagatcacccaggtggacttcccccccagagagatcgtgacctacaccaaggagacccagacccccgtgatggcccagcccaaggaggacgaggaggaggacgacgacgtggtggcccccaagccccccatcgagcccgaggaggagaagaccctgaagaaggacgaggagaacgacagcaaggcccccccccacgagctgaccgaggaggagaagcagcagatcctgcacagcgaggagttcctgagcttcttcgaccacagcaccagaatcgtggagagagccctgagcgagcagatcaacatcttcttcgactacagcggcagagacctggaggacaaggagggcgagatccaggccggcgccaagctgagcctgaacagacagttcttcgacgagagatggagcaagcacagagtggtgagctgcctggactggagcagccagtaccccgagctgctggtggccagctacaacaacaacgaggacgccccccacgagcccgacggcgtggccctggtgtggaacatgaagtacaagaagaccacccccgagtacgtgttccactgccagagcgccgtgatgagcgccaccttcgccaagttccaccccaacctggtggtgggcggcacctacagcggccagatcgtgctgtgggacaacagaagcaacaagagaacccccgtgcagagaacccccctgagcgccgccgcccacacccaccccgtgtactgcgtgaacgtggtgggcacccagaacgcccacaacctgatcagcatcagcaccgacggcaagatctgcagctggagcctggacatgctgagccacccccaggacagcatggagctggtgcacaagcagagcaaggccgtggccgtgaccagcatgagcttccccgtgggcgacgtgaacaacttcgtggtgggcagcgaggagggcagcgtgtacaccgcctgcagacacggcagcaaggccggcatcagcgagatgttcgagggccaccagggccccatcaccggcatccactgccacgccgccgtgggcgccgtggacttcagccacctgttcgtgaccagcagcttcgactggaccgtgaagctgtggaccaccaagaacaacaagcccctgtacagcttcgaggacaacgccgactacgtgtacgacgtgatgtggagccccacccaccccgccctgttcgcctgcgtggacggcatgggcagactggacctgtggaacctgaacaacgacaccgaggtgcccaccgccagcatcagcgtggagggcaaccccgccctgaacagagtgagatggacccacagcggcagagagatcgccgtgggcgacagcgagggccagatcgtgatctacgacgtgggcgagcagatcgccgtgcccagaaacgacgagtgggccagattcggcagaaccctggccgagatcaacgccaacagagccgacgccgaggaggaggccgccaccagaatccccgcctag

SEQ ID NO: 96427 - DNA, 2589 bp, Artificial Sequence
  derived and/or modified sequence
aattcccagaacgcactgctcgtcgcacgcaggttttccttgttgccggggtttgtagttcttctcgatcgtgtcagtttgtaaggcgagggcggaagttggattcctggcctgagaatattaggcgtagttttccagtttttggcaaagcggaaatacttaaggcccctgggttgactgggttctttgttttatctaccggcttctgctttacgacaggtcacaaacatgtcagacaaaagtgaattaaaggctgagttggaacgtaagaagcagcgactggcccaaatcagagaggaaaagaagagaaaagaagaagaaaggaaaaaaaaagaaacagaccagaagaaggaagctgttgctcctgtgcaagaagaatcagatcttgaaaaaaaaaggagagaagctgaagcattgcttcaaagcatggggctaactccagaatcccccattgtccctcctcctatgtctccatcctccaaatctgtgagcactccaagtgaagctggaagccaagactctggagatggcgccgtgggatctagacgaggacctattaaacttggaatggctaaaatcacgcaagtcgactttcctcctcgagaaattgtcacgtatacaaaggaaactcagactccagttatggctcaacccaaagaagatgaagaggaagatgatgatgtagtggctcctaaaccacctattgaacctgaagaagagaaaactttaaagaaagatgaggaaaatgatagtaaagctccccctcatgagctgactgaagaagaaaagcaacaaatcttgcactctgaggaatttttaagtttctttgaccattctacaagaattgtagaaagagctctttctgagcagattaacatcttctttgactatagtgggagagatttggaagacaaagaaggagagattcaagcaggtgctaaactgtcattaaatcgacaattttttgacgaacgttggtcaaagcatcgggtggttagttgtttggattggtcatctcagtatccggagttactcgtggcttcctataacaacaatgaagatgcccctcatgagcctgatggtgtggcccttgtatggaatatgaaatacaaaaaaactaccccagagtatgtgtttcactgccagtcagctgtgatgtctgccacatttgcaaaatttcatccaaatcttgttgttggtggtacatattcaggccaaattgtgctttgggataaccgtagcaataaaagaactccagtgcaaagaactccactgtcagcagctgcacacacacaccctgtatattgtgtaaatgttgttggaacacaaaatgctcacaatctgattagcatctctactgatggaaaaatttgttcatggagtctggacatgctttcccatccacaggatagcatggagttggttcataaacagtcaaaagcagtagctgtgacatctatgtccttccctgttggagatgtcaacaactttgttgttgggagtgaagaaggttctgtgtacacagcatgccgccatggcagcaaagctggaatcagtgagatgtttgaggggcatcaaggaccaatcactggcatccattgtcatgcagctgttggagcagtagacttctcacatctttttgtcacttcatcgtttgactggacagtaaagctttggacaactaagaataacaagcctttgtattcatttgaagataatgcagactatgtttatgatgttatgtggtcacctacccacccagccctgtttgcctgtgtggatggcatggggagattggatttgtggaatctcaataatgacacagaggtaccaactgccagcatttctgtggagggtaatcctgctcttaatcgtgtgagatggacccattctggcagagagattgctgtgggtgattctgaaggacagattgttatatacgatgtgggagagcagattgctgttccccgcaatgatgaatgggcacggtttggccgaacacttgcagaaattaatgcaaaccgagctgatgcagaggaggaagcagctacccgaatacctgcttagttcctgaaaaggggagtgtaactagtggatttgggaaaggttcttaagtagatcctgagactatttgcatgcttctgtctaaatgataattaaaaggaaatttcatggattaaaccatgggtttaatgcagcaaggaaacttacaatgtccctttatatataacatgcatcttgttttggatttgtgtcattttttaatatagctgattgacttcacagaaagcagcttttttgaattctaatacataggtgtatatttggtattagttattttgagttcttttcaacttataacactgtatacagttatttctaaagcacagatgaaataagttctgcatatttttaaataatcacagttccctgttatacagataatgttctcactacccataatatgtaggaacattgtttctccttagccgtagtatgcatacacctatccatgttcattctgacatcctttgttgtctttataattcatgtggtagttacctataaataaaaacaaatatgcgttaa

SEQ ID NO: 96428 - DNA, 2572 bp, Artificial Sequence
  derived and/or modified sequence
ttttatttctgggagcgacctcgttctggtgaggctatttgtccctaagctctcgccgtagcagccgccgcccatccctctttgtgtgctttggaaagccgcggagctggtggtggctacagttggtgttgggggcttaggcgagggacgttaccgggaagttgcaggcgggaggactcttccccatccagtcacctgacaggtcacaaacatgtcagacaaaagtgaattaaaggctgagttggaacgtaagaagcagcgactggcccaaatcagagaggaaaagaagagaaaagaagaagaaaggaaaaaaaaagaaacagaccagaagaaggaagctgttgctcctgtgcaagaagaatcagatcttgaaaaaaaaaggagagaagctgaagcattgcttcaaagcatggggctaactccagaatcccccattgtccctcctcctatgtctccatcctccaaatctgtgagcactccaagtgaagctggaagccaagactctggagatggcgccgtgggatctagacgaggacctattaaacttggaatggctaaaatcacgcaagtcgactttcctcctcgagaaattgtcacgtatacaaaggaaactcagactccagttatggctcaacccaaagaagatgaagaggaagatgatgatgtagtggctcctaaaccacctattgaacctgaagaagagaaaactttaaagaaagatgaggaaaatgatagtaaagctccccctcatgagctgactgaagaagaaaagcaacaaatcttgcactctgaggaatttttaagtttctttgaccattctacaagaattgtagaaagagctctttctgagcagattaacatcttctttgactatagtgggagagatttggaagacaaagaaggagagattcaagcaggtgctaaactgtcattaaatcgacaattttttgacgaacgttggtcaaagcatcgggtggttagttgtttggattggtcatctcagtatccggagttactcgtggcttcctataacaacaatgaagatgcccctcatgagcctgatggtgtggcccttgtatggaatatgaaatacaaaaaaactaccccagagtatgtgtttcactgccagtcagctgtgatgtctgccacatttgcaaaatttcatccaaatcttgttgttggtggtacatattcaggccaaattgtgctttgggataaccgtagcaataaaagaactccagtgcaaagaactccactgtcagcagctgcacacacacaccctgtatattgtgtaaatgttgttggaacacaaaatgctcacaatctgattagcatctctactgatggaaaaatttgttcatggagtctggacatgctttcccatccacaggatagcatggagttggttcataaacagtcaaaagcagtagctgtgacatctatgtccttccctgttggagatgtcaacaactttgttgttgggagtgaagaaggttctgtgtacacagcatgccgccatggcagcaaagctggaatcagtgagatgtttgaggggcatcaaggaccaatcactggcatccattgtcatgcagctgttggagcagtagacttctcacatctttttgtcacttcatcgtttgactggacagtaaagctttggacaactaagaataacaagcctttgtattcatttgaagataatgcagactatgtttatgatgttatgtggtcacctacccacccagccctgtttgcctgtgtggatggcatggggagattggatttgtggaatctcaataatgacacagaggtaccaactgccagcatttctgtggagggtaatcctgctcttaatcgtgtgagatggacccattctggcagagagattgctgtgggtgattctgaaggacagattgttatatacgatgtgggagagcagattgctgttccccgcaatgatgaatgggcacggtttggccgaacacttgcagaaattaatgcaaaccgagctgatgcagaggaggaagcagctacccgaatacctgcttagttcctgaaaaggggagtgtaactagtggatttgggaaaggttcttaagtagatcctgagactatttgcatgcttctgtctaaatgataattaaaaggaaatttcatggattaaaccatgggtttaatgcagcaaggaaacttacaatgtccctttatatataacatgcatcttgttttggatttgtgtcattttttaatatagctgattgacttcacagaaagcagcttttttgaattctaatacataggtgtatatttggtattagttattttgagttcttttcaacttataacactgtatacagttatttctaaagcacagatgaaataagttctgcatatttttaaataatcacagttccctgttatacagataatgttctcactacccataatatgtaggaacattgtttctccttagccgtagtatgcatacacctatccatgttcattctgacatcctttgttgtctttataattcatgtggtagttacctataaataaaaacaaatatgcgttaa

SEQ ID NO: 96429 - protein, 611 aa, Artificial Sequence
  derived and/or modified sequence
MSDKSELKAELERKKQRLAQIREEKKRKEEERKKKETDQKKEAVAPVQEESDLEKKRREAEALLQSMGLTPESPIVPPPMSPSSKSVSTPSEAGSQDSGDGAVGSRRGPIKLGMAKITQVDFPPREIVTYTKETQTPVMAQPKEDEEEDDDVVAPKPPIEPEEEKTLKKDEENDSKAPPHELTEEEKQQILHSEEFLSFFDHSTRIVERALSEQINIFFDYSGRDLEDKEGEIQAGAKLSLNRQFFDERWSKHRVVSCLDWSSQYPELLVASYNNNEDAPHEPDGVALVWNMKYKKTTPEYVFHCQSAVMSATFAKFHPNLVVGGTYSGQIVLWDNRSNKRTPVQRTPLSAAAHTHPVYCVNVVGTQNAHNLISISTDGKICSWSLDMLSHPQDSMELVHKQSKAVAVTSMSFPVGDVNNFVVGSEEGSVYTACRHGSKAGISEMFEGHQGPITGIHCHAAVGAVDFSHLFVTSSFDWTVKLWTTKNNKPLYSFEDNADYVYDVMWSPTHPALFACVDGMGRLDLWNLNNDTEVPTASISVEGNPALNRVRWTHSGREIAVGDSEGQIVIYDVGEIAVPRNDEWARFGRTLAEINANRADAEEEAATRIPA

SEQ ID NO: 96430 - DNA, 1836 bp, Artificial Sequence
  derived and/or modified sequence
atgtccgataagtctgagctgaaggcagagctggagcggaaaaaacaacgactggcccaaattagggaggagaaaaagcgcaaggaagaagaaagaaagaagaaagaaacggatcagaagaaggaggccgtagctcctgttcaggaggagagtgacctggaaaagaagcgtagggaggccgaggctctgctacagagcatgggcttaactccagaatccccaatcgtacccccccccatgtctccttccagtaagtcagtaagcacccctagcgaagcggggtcccaagattcaggcgatggcgccgtcggcagccggaggggacctatcaagctcggcatggctaaaatcacacaggtcgactttcctccccgggagatcgttacttacactaaggagacccagacaccggtcatggcacagcctaaagaagatgaagaagaggatgatgacgtagtagcacctaaacctcctattgagccggaagaagaaaaaacgctcaagaaggatgaagaaaacgacagcaaagccccacctcatgagcttaccgaagaagagaagcagcagatcctgcattcagaagagttcttatcatttttcgaccatagtactaggatcgtggagagggcactcagtgaacaaataaacatattctttgactattcaggccgggatctggaagataaggagggcgaaatacaggccggagccaagctctcactgaacaggcagttttttgatgaaaggtggtctaagcacagagtcgtctcgtgcctggactggtccagtcagtatcctgaattgctcgtcgcaagttataacaataacgaggacgctccacatgaacctgatggtgttgcattagtgtggaacatgaagtataagaagacaacaccggagtacgtcttccactgtcagtcggccgtcatgtcagctaccttcgccaaattccaccctaacctcgtcgtgggcggaacatattcagggcagatagtcctttgggataatcgctccaacaaacgtacccctgtgcaacgcacgccattaagtgcggccgcccacacacatccagtgtactgtgtgaacgtcgtggggactcagaacgcccataacctaatcagcatatcaaccgatgggaaaatctgtagctggtcgctcgacatgctgagccatccacaggactcgatggagctggtgcacaaacagtcgaaagctgtcgcagtcacaagtatgtctttccccgtgggagatgtgaacaacttcgtcgtggggtctgaggagggtagcgtctacacagcctgtagacacgggagtaaggctggcatcagcgagatgttcgaggggcatcagggcccgataaccggtatccactgccacgcagcagtaggcgcagtggactttagccatctgtttgttaccagctcttttgattggacagtaaagctgtggaccactaagaataacaaacccctctattctttcgaggataatgctgactatgtgtatgacgtaatgtggagtcccactcaccccgccctcttcgcttgtgtagacggaatgggcaggcttgatctgtggaacctcaataacgacacagaagtgcccactgcaagcattagtgtagagggcaacccagcccttaatagagtgcgctggacgcacagcggaagggaaatcgccgtgggtgactccgaagggcagattgtgatctatgatgttggcgagatcgctgtccctcggaatgacgagtgggctaggtttggtaggactctggcagaaatcaacgccaaccgggccgacgctgaagaagaggcagcgacacgaattccggcgtag

SEQ ID NO: 96431 - DNA, 1836 bp, Artificial Sequence
  derived and/or modified sequence
atgtctgacaagtctgagctgaaggccgagctggagaggaagaagcagaggctggcccagatccgggaggagaagaagaggaaggaggaggagaggaagaagaaggagacagaccagaagaaggaggccgtggcccctgtgcaggaggagagtgacctggagaagaagagaagagaggccgaggccctgctgcagagcatgggcctgaccccagagagccccatcgtgcccccacccatgagccccagcagcaagtctgtgtccaccccatctgaggccggcagccaggacagcggagatggagctgtgggcagccggcggggccccatcaagctgggcatggccaagatcacccaggtggacttccccccccgggagatcgtgacctacaccaaggagacccagacccctgtgatggcccagcccaaggaggatgaggaggaggatgatgatgtggtggcccccaagccacccatcgagcctgaggaggagaagaccctgaagaaggatgaggagaatgacagcaaggcccctcctcatgagctgacagaggaggagaagcagcagatcctgcacagcgaggagttcctgtccttctttgaccacagcacccgcatcgtggagcgggccctgtctgagcagatcaacatcttctttgactacagcggccgggacctggaggacaaggagggggagatccaggccggggccaagctgagcctgaaccggcagttctttgatgagcgctggagcaagcaccgggtggtgtcctgcctggactggagcagccagtacccagagctgctggtggccagctacaacaacaatgaagatgcccctcatgagccagatggagtggccctggtgtggaacatgaagtacaagaagaccaccccagaatatgtgttccactgccagagcgctgtgatgtctgccacctttgccaagttccaccccaacctggtggtgggcggcacctacagcggccagatcgtgctgtgggacaacagaagcaacaagaggacccctgtgcagaggacccccctgtctgctgctgcccacacccaccctgtgtactgtgtgaatgtggtgggcacccagaatgcccacaacctgatcagcatcagcacagatggcaagatctgctcctggagcctggacatgctgagccacccccaggacagcatggagctggtgcacaagcagagcaaggctgtggccgtgacctccatgtccttccctgtgggagatgtgaacaactttgtggtgggcagcgaggagggctctgtgtacacagcctgccgccacggcagcaaggccggcatcagcgagatgtttgagggccaccagggccccatcaccggcatccactgccacgccgctgtgggcgctgtggacttcagccacctgtttgtgaccagcagctttgactggacagtgaagctgtggaccaccaagaacaacaagcccctgtacagctttgaagataatgctgactatgtgtatgatgtgatgtggagccccacccacccagccctgtttgcctgtgtggatggcatgggccgcctggacctgtggaacctgaacaatgacacagaggtgcccacagccagcatctctgtggagggcaacccagccctgaacagagtgcgctggacccacagcggccgggagattgctgtgggggacagcgagggccagatcgtcatctatgatgtgggggagattgctgtgcccagaaatgatgagtgggccaggtttggaagaaccctggccgagatcaatgccaacagagcagatgctgaggaggaggccgccacccgcatcccagcctag

SEQ ID NO: 96432 - DNA, 1836 bp, Artificial Sequence
  derived and/or modified sequence
atgagcgacaagagcgagctgaaggccgagctggagcggaagaagcaaaggctcgcccagatacgtgaagagaaaaagaggaaagaggaggagaggaagaaaaaggaaactgatcagaagaaggaagcggtagcccccgtacaggaagagtccgatctggaaaagaagcgcagagaggccgaagctttgctccagagcatgggactgaccccggaaagtccaatagtgccaccccctatgtcacccagcagtaagtctgtgtccaccccttccgaggccggatcccaggattcaggagacggcgcggtaggcagccggagaggtccaatcaagctggggatggctaagataacacaggtcgattttcctccccgggagatcgtgacttacaccaaagagactcagacacctgtaatggcccagcctaaggaggacgaggaggaggacgacgatgtagttgcccctaagccgcctatcgagcctgaagaggagaagaccttaaagaaggatgaggagaatgattccaaggcgcctcctcacgagctcactgaggaggaaaaacagcagatcctccatagcgaagagtttctgtcatttttcgaccatagtacacgaatagtcgaacgcgctctcagcgagcagattaacatctttttcgattattccggcagggatttagaggataaagagggtgagattcaggccggagccaaattgagcctcaaccggcagtttttcgacgagcgctggtcaaaacatagggtggtgagttgcctggactggtctagccaatatccggaactgctcgtggcgtcatataataataatgaggatgccccccacgaacctgacggagtcgcactcgtgtggaacatgaaatataagaaaactacaccggagtacgtgttccattgccagagcgctgtgatgagtgccaccttcgcaaaatttcatccaaacctggttgttggcgggacatactccggacagattgtgctttgggacaacagatccaataaacgaacaccagtgcaacggactccgctctctgccgctgcacatacacacccagtttattgtgtgaatgtggtcggtacgcagaacgcacataatctaattagtatctcaaccgatgggaaaatttgctcttggagcttggatatgttatcccacccgcaagattctatggagctggtccataagcagtcaaaagccgtggccgtgaccagcatgtccttcccagttggagatgttaacaactttgtggtaggttccgaggaaggcagcgtgtacaccgcttgtaggcatgggagcaaggcaggcatctcagaaatgttcgagggacatcagggccccattacaggcatccattgtcacgccgctgtcggtgcagttgattttagccatctgtttgtcacaagtagctttgactggaccgtcaagttgtggacaacgaagaataataaaccactgtattcattcgaagataatgccgattacgtttatgatgtaatgtggagccctacacacccggccttattcgcctgcgtagacgggatgggaagactggacctgtggaatttgaataatgacaccgaggtcccaacggcctctattagcgtcgagggaaaccccgccctgaaccgcgttcggtggacgcacagcggtcgggaaatcgccgttggggattctgaagggcagattgtaatctacgacgtcggcgagattgccgtgccccgcaacgatgagtgggcgagattcggcagaaccttggctgaaataaacgccaatcgagccgatgctgaagaggaagcagcgacaagaatccccgcgtag

SEQ ID NO: 96433 - DNA, 1836 bp, Artificial Sequence
  derived and/or modified sequence
atgtcagacaagagcgagctcaaagctgagttggagcggaaaaagcaaaggctggctcagatcagagaggagaagaagcggaaagaagaggaacggaagaaaaaggagactgaccaaaagaaagaggcggttgcaccagtgcaggaagagagcgacctcgaaaagaagagacgagaggcagaggctttgctgcagagcatgggtctgacaccagagtcccctatcgttccacccccaatgtcaccttcgtccaaatctgtatctacaccctccgaagctgggtcacaggacagcggggacggagccgtaggtagtcgcagagggccaatcaagctgggcatggccaagataactcaggtcgactttcctcccagagaaatcgtcacctatactaaggaaacccagacccctgtgatggcgcagccaaaagaagacgaagaggaagatgatgacgtcgtagcccctaagcctccgatagagcccgaagaggaaaaaacactgaaaaaagacgaagagaatgactccaaggcaccccctcacgaactcactgaggaggagaagcagcagatcctgcactctgaagagtttctgagcttttttgaccactctactcgtattgtcgagagggctttgagcgagcaaatcaacatcttctttgactactcgggcagagatctggaagacaaggagggggagatacaggccggtgcaaagctttcactgaatagacagtttttcgatgagagatggtcaaagcatagggtcgtctcctgcctggactggtccagccagtacccagaactgttggtggcctcctacaataataatgaggatgctcctcatgaaccagacggagtcgctctcgtttggaatatgaaatacaaaaaaacgactcctgaatacgtattccattgccaatcggctgtaatgtctgcaacatttgctaaatttcatcctaatctggtcgtaggcggaacttattctggtcagatcgtcctctgggacaatagaagcaataaacggacacctgtgcaaagaacccccttgagcgcagcagcccacacacatccagtctactgcgtaaatgttgtgggaactcaaaacgcccataatctcatcagcatatccacggacggcaagatctgttcttggtccctggacatgttgagtcatcctcaagattccatggagctggtgcacaagcaatcaaaagccgttgcagtcacatccatgtccttccccgtgggagatgtgaataatttcgtggtcggctcggaggaaggaagcgtttacactgcctgcagacacggttccaaggccggaatctcagaaatgttcgaaggacatcagggacccataactggcattcattgccatgccgctgtgggcgcagtggacttcagtcatctatttgttacgtccagcttcgactggacagtgaagctctggacaaccaagaacaataaacctctttatagtttcgaggacaacgccgattatgtatacgatgtcatgtggtcaccaacgcaccctgctctcttcgcttgtgtggacgggatggggagactggacctctggaacctgaataatgataccgaggtgcccaccgccagcataagtgtagaaggaaacccagcattgaatagggttcgctggacccatagcgggcgagagattgccgttggtgactctgaggggcagattgtgatctacgacgttggtgagattgccgtgcccagaaatgacgaatgggctcgcttcggcaggacgctcgccgaaattaatgctaaccgcgctgatgctgaggaagaagctgctacacgaatccctgcttag

SEQ ID NO: 96434 - DNA, 1836 bp, Artificial Sequence
  derived and/or modified sequence
atgagcgacaagagcgagctgaaggccgagctggagagaaagaagcagagactggcccagatcagagaggagaagaagagaaaggaggaggagagaaagaagaaggagaccgaccagaagaaggaggccgtggcccccgtgcaggaggagagcgacctggagaagaagagaagagaggccgaggccctgctgcagagcatgggcctgacccccgagagccccatcgtgcccccccccatgagccccagcagcaagagcgtgagcacccccagcgaggccggcagccaggacagcggcgacggcgccgtgggcagcagaagaggccccatcaagctgggcatggccaagatcacccaggtggacttcccccccagagagatcgtgacctacaccaaggagacccagacccccgtgatggcccagcccaaggaggacgaggaggaggacgacgacgtggtggcccccaagccccccatcgagcccgaggaggagaagaccctgaagaaggacgaggagaacgacagcaaggcccccccccacgagctgaccgaggaggagaagcagcagatcctgcacagcgaggagttcctgagcttcttcgaccacagcaccagaatcgtggagagagccctgagcgagcagatcaacatcttcttcgactacagcggcagagacctggaggacaaggagggcgagatccaggccggcgccaagctgagcctgaacagacagttcttcgacgagagatggagcaagcacagagtggtgagctgcctggactggagcagccagtaccccgagctgctggtggccagctacaacaacaacgaggacgccccccacgagcccgacggcgtggccctggtgtggaacatgaagtacaagaagaccacccccgagtacgtgttccactgccagagcgccgtgatgagcgccaccttcgccaagttccaccccaacctggtggtgggcggcacctacagcggccagatcgtgctgtgggacaacagaagcaacaagagaacccccgtgcagagaacccccctgagcgccgccgcccacacccaccccgtgtactgcgtgaacgtggtgggcacccagaacgcccacaacctgatcagcatcagcaccgacggcaagatctgcagctggagcctggacatgctgagccacccccaggacagcatggagctggtgcacaagcagagcaaggccgtggccgtgaccagcatgagcttccccgtgggcgacgtgaacaacttcgtggtgggcagcgaggagggcagcgtgtacaccgcctgcagacacggcagcaaggccggcatcagcgagatgttcgagggccaccagggccccatcaccggcatccactgccacgccgccgtgggcgccgtggacttcagccacctgttcgtgaccagcagcttcgactggaccgtgaagctgtggaccaccaagaacaacaagcccctgtacagcttcgaggacaacgccgactacgtgtacgacgtgatgtggagccccacccaccccgccctgttcgcctgcgtggacggcatgggcagactggacctgtggaacctgaacaacgacaccgaggtgcccaccgccagcatcagcgtggagggcaaccccgccctgaacagagtgagatggacccacagcggcagagagatcgccgtgggcgacagcgagggccagatcgtgatctacgacgtgggcgagatcgccgtgcccagaaacgacgagtgggccagattcggcagaaccctggccgagatcaacgccaacagagccgacgccgaggaggaggccgccaccagaatccccgcctag

SEQ ID NO: 96435 - DNA, 2494 bp, Artificial Sequence
  derived and/or modified sequence
cggaagttggattcctggcctgagaatattaggcgtagttttccagtttttggcaaagcggaaatacttaaggcccctgggttgactgggttctttgttttatctaccggcttctgctttacgacaggtcacaaacatgtcagacaaaagtgaattaaaggctgagttggaacgtaagaagcagcgactggcccaaatcagagaggaaaagaagagaaaagaagaagaaaggaaaaaaaaagaaacagaccagaagaaggaagctgttgctcctgtgcaagaagaatcagatcttgaaaaaaaaaggagagaagctgaagcattgcttcaaagcatggggctaactccagaatcccccattgtccctcctcctatgtctccatcctccaaatctgtgagcactccaagtgaagctggaagccaagactctggagatggcgccgtgggatctagacgaggacctattaaacttggaatggctaaaatcacgcaagtcgactttcctcctcgagaaattgtcacgtatacaaaggaaactcagactccagttatggctcaacccaaagaagatgaagaggaagatgatgatgtagtggctcctaaaccacctattgaacctgaagaagagaaaactttaaagaaagatgaggaaaatgatagtaaagctccccctcatgagctgactgaagaagaaaagcaacaaatcttgcactctgaggaatttttaagtttctttgaccattctacaagaattgtagaaagagctctttctgagcagattaacatcttctttgactatagtgggagagatttggaagacaaagaaggagagattcaagcaggtgctaaactgtcattaaatcgacaattttttgacgaacgttggtcaaagcatcgggtggttagttgtttggattggtcatctcagtatccggagttactcgtggcttcctataacaacaatgaagatgcccctcatgagcctgatggtgtggcccttgtatggaatatgaaatacaaaaaaactaccccagagtatgtgtttcactgccagtcagctgtgatgtctgccacatttgcaaaatttcatccaaatcttgttgttggtggtacatattcaggccaaattgtgctttgggataaccgtagcaataaaagaactccagtgcaaagaactccactgtcagcagctgcacacacacaccctgtatattgtgtaaatgttgttggaacacaaaatgctcacaatctgattagcatctctactgatggaaaaatttgttcatggagtctggacatgctttcccatccacaggatagcatggagttggttcataaacagtcaaaagcagtagctgtgacatctatgtccttccctgttggagatgtcaacaactttgttgttgggagtgaagaaggttctgtgtacacagcatgccgccatggcagcaaagctggaatcagtgagatgtttgaggggcatcaaggaccaatcactggcatccattgtcatgcagctgttggagcagtagacttctcacatctttttgtcacttcatcgtttgactggacagtaaagctttggacaactaagaataacaagcctttgtattcatttgaagataatgcagactatgtttatgatgttatgtggtcacctacccacccagccctgtttgcctgtgtggatggcatggggagattggatttgtggaatctcaataatgacacagaggtaccaactgccagcatttctgtggagggtaatcctgctcttaatcgtgtgagatggacccattctggcagagagattgctgtgggtgattctgaaggacagattgttatatacgatgtgggagagattgctgttccccgcaatgatgaatgggcacggtttggccgaacacttgcagaaattaatgcaaaccgagctgatgcagaggaggaagcagctacccgaatacctgcttagttcctgaaaaggggagtgtaactagtggatttgggaaaggttcttaagtagatcctgagactatttgcatgcttctgtctaaatgataattaaaaggaaatttcatggattaaaccatgggtttaatgcagcaaggaaacttacaatgtccctttatatataacatgcatcttgttttggatttgtgtcattttttaatatagctgattgacttcacagaaagcagcttttttgaattctaatacataggtgtatatttggtattagttattttgagttcttttcaacttataacactgtatacagttatttctaaagcacagatgaaataagttctgcatatttttaaataatcacagttccctgttatacagataatgttctcactacccataatatgtaggaacattgtttctccttagccgtagtatgcatacacctatccatgttcattctgacatcctttgttgtctttataattcatgtggtagttacctataaataaaaacaaatatgcgttaa

SEQ ID NO: 96436 - protein, 254 aa, Artificial Sequence
  derived and/or modified sequence
MVSWIISRLVVLIFGTLYPAYSSYKAVKTKNVKEYVKWMMYWIVFAFFTTAETLTDIVLSWFPFYFELKIAFVIWLLSPYTKGSSVLYRKFVHPTLSNKEKEIDEYITQARDKSYETMMRVGKRGLNLAANAAVTAAAKGQGVLSEKLRSFSMQDLTLIRDEDALPLQRPDGRLRPSPGSLLDTIEDLGDDPALSLRSSTNPADSRTEASEDDMGDKAPKRAKPIKKAPKAEPLASKTLKTRPKKKTSGGGDSA

SEQ ID NO: 96437 - DNA, 765 bp, Artificial Sequence
  derived and/or modified sequence
atggtgtcctggattatctccagactggtcgtcttgatctttggcacactctaccctgcctactcgtcctacaaagccgtgaagacaaaaaacgtcaaggaatacgtcaaatggatgatgtattggatcgtgtttgcatttttcacaacagccgaaaccctaacggacatcgtcctatcctggttccccttttactttgaactcaagatcgcctttgtcatatggttactgtccccgtacaccaagggctcaagtgtcctgtacagaaaattcgtacaccccacactttccaacaaggaaaaggagatcgacgagtatattacccaggcaagggataaatcttacgaaactatgatgcgcgtcggaaagcgaggcctgaatttggcggctaatgctgccgttacagccgcggccaaaggccaaggggtccttagtgagaaacttcggtcgttctcaatgcaggacctgaccttgatccgagacgaggacgctcttcctctacagaggcccgacggccgcctgagaccatctcccggatcgctactggatacaatcgaggacctgggtgacgaccctgccttgagtctgagatctagcaccaaccctgccgatagtcggaccgaagcctccgaagacgacatgggagataaggccccaaaacgagcaaaaccaataaagaaagcaccaaaagctgagcctttggcatcaaaaacacttaagaccaggccgaagaagaagacttcgggaggaggagattcagcttag

SEQ ID NO: 96438 - DNA, 765 bp, Artificial Sequence
  derived and/or modified sequence
atggtgtcctggatcatcagccggctggtggtgctgatcttcggcaccctgtacccagcctacagcagctacaaggctgtgaagaccaagaatgtgaaggagtatgtgaagtggatgatgtactggatcgtgtttgccttcttcaccacagctgagaccctgacagacatcgtgctgtcctggttccccttctactttgagctgaagatcgccttcgtcatctggctgctgagcccctacaccaagggcagctctgtgctgtacaggaagtttgtgcaccccaccctgagcaacaaggagaaggagattgatgagtacatcacccaggcccgggacaagagctatgagaccatgatgagggtgggcaagaggggcctgaacctggccgccaatgctgctgtgacagctgctgccaagggccagggcgtgctgtctgagaagctgcggagcttctccatgcaggacctgaccctcatcagagatgaagatgccctgcccctgcagaggccagatggccgcctgcggcccagccctggcagcctgctggacaccatcgaggacctgggagatgatcctgccctgagcctgcggagcagcaccaacccagctgacagcaggacagaggcctctgaagatgacatgggagacaaggcccccaagagggccaagcccatcaagaaggcccccaaggccgagcccctggccagcaagaccctgaagacccggcccaagaagaagaccagcggcggcggggacagcgcctag

SEQ ID NO: 96439 - DNA, 765 bp, Artificial Sequence
  derived and/or modified sequence
atggtgagctggatcatcagccggctggtggtgctgatcttcggcaccctgtaccctgcgtattcctcatacaaggccgtgaaaacaaagaatgtcaaggagtatgtgaagtggatgatgtactggatagtgttcgctttctttaccactgccgagaccctaaccgatatcgtcctaagttggtttcctttctattttgagcttaaaattgcttttgtgatctggctgctgagcccctatactaagggctcctccgtcctgtaccggaagttcgtgcaccccactctgtcaaacaaggagaaagagatcgacgagtacatcacccaggctagggacaagtcctatgaaacaatgatgagggtcggtaaacgcggtcttaatttagccgccaacgccgccgtgacagcagccgccaaagggcagggcgtactgtcagaaaagctgaggtcattctcaatgcaggaccttacactgattagagacgaggatgcactacctctccagaggcccgatggaagactgcgcccttcccccggatccttactggacacaatcgaggacctgggggacgacccggccctgtcccttagatcgtctactaatcctgcagacagtcggactgaggccagcgaggatgacatgggggataaagcccctaaacgagccaagccaatcaaaaaggcccccaaagccgagcctctggcatccaaaaccttgaagactcggccgaaaaaaaaaacctccgggggaggcgacagcgcatag

SEQ ID NO: 96440 - DNA, 765 bp, Artificial Sequence
  derived and/or modified sequence
atggtctcatggatcattagccggctggtcgttcttatctttgggacactgtatcccgcatattcttcgtacaaggcagtgaaaactaagaacgtgaaggaatacgtcaaatggatgatgtactggatagtgtttgcgttcttcaccacagccgaaacactgacagatatagtcttatcctggtttccgttctacttcgaattaaagatcgcctttgtgatctggctcctcagcccgtatacaaaggggtcctccgttctgtaccgtaagttcgttcatcccacactgagcaataaagaaaaagaaatagatgagtatatcacccaggcgagagacaagagctacgagacaatgatgcgcgttggaaagagaggcctgaacctggccgctaacgcagccgttacagccgcagcaaagggtcagggagtcctgtcagagaagctgcggtcatttagtatgcaggatctaacactgataagggatgaggacgctttgcctctccagcggcctgacgggcgtctgcggcctagccccggaagcctgctcgatacaattgaggacctgggggatgatcccgcattatccctgcggtcctctacgaatccggcagacagcaggacggaggccagtgaagatgacatgggcgacaaagcccctaaacgagctaaacccatcaagaaggcccctaaggccgagccgctggcgagtaaaacactgaaaaccagaccaaagaagaagactagcggaggaggagactctgcatag

SEQ ID NO: 96441 - DNA, 2170 bp, Artificial Sequence
  derived and/or modified sequence
cacggcccgccgctgcggcagggacctcccctttaacggcggcgctgggcgctccgctgcccccgcggcggctgctgcagcggctgctgctgctactgcggctcctgctgccgccgccgccgccgctcggcctcaggcagctgcatcctcggccgggccgggtccccgccccgcgccgcgcccggccccgccatggtgtcctggatcatctctcgcctggtggtgctcatctttggcaccctgtacccagcctattcttcctacaaggccgtgaagacaaaaaacgtgaaggaatatgtgaaatggatgatgtactggatcgtctttgccttcttcaccacggccgagacgctcacggatatagtgctctcctggttccccttctactttgaactgaagatcgccttcgtgatatggctgctgtccccttacaccaagggctccagcgtgctctaccgcaagttcgtgcacccaacgctgtccaacaaggagaaggagatcgacgagtacatcacgcaggcccgagacaagagctatgagaccatgatgagggtgggcaagaggggcctgaaccttgccgccaatgctgcagtcacagctgccgccaagggccagggggtgctgtcagagaagctccgcagcttcagcatgcaggacctgaccctgatccgggacgaggacgcactgcccctgcagaggcctgacggccgcctccgacccagccctggcagcctcctggacaccatcgaggacttaggagatgaccctgccctgagtctaaggtccagcacaaacccggcagattcccggacagaggcttctgaggatgacatgggagacaaagctcccaagagggccaaacccatcaaaaaagcgcccaaagctgagccactggcttccaagacactgaagacccggcccaagaagaagacctctggcgggggcgactcagcttgagcccctccacccccgcaggctgcagagcaaggatgaagcctcaggaggggcctcagacccagcccctgctccacactgtgccagtagcctaggtgtctcaggcccctgggccccgcagatggccatttccggtgcctgcccagtggccactcttctggaaggggcttggaaaagaggaaggaggcccagctgtgggggttgagggtagagggtggaccagaggctgaggactgagccacccaaggaggtggggactgctcggcctccaccgctgttccgctgcagccccgccctgccccacccacccagtgccttgctgaagcccatagcaatccgcttctcagaggtcctgtcgtgtttccactgctcgccttggtttgggagcagggagggggaagtcctagcccagatggaccaaggacgggcctgaaggcacatgggggaaagggagcacacggggaggacgttggggaccctgggtggggcctccaggtgcagctgtggatggaagacagggattggcctgtgcttcagcgaccaggatggccaggccagagctgcagctgggggctcttttcctggtcattgggtggggctgagtgccacatgttcccacattaaaaaggggggtccagggctgtgtgagtgtgtctttctgggtctagggctcggggtagtttgggtcaaggactgtccctccagcagtcgcctcctcccaccctgagccccacagtcatctggccctttccctgctcaaccctccatcctaggctctgagcctcagaggacccagcccatgagagaacggggatctggggggcctctcacctgctcctatgaccttgctcccttttaggtcaccccattgccaccgtgcccctgggctggactcccgtgctcctcagggcccacccctgctctgtctggtacaggcccctgctgagtgggcccctctcctctgcccctggggtccatcccctcttgcccagggtccccatcctgtaccaagcagactgggccctaagacccctggcagaacccagcctctgctcacacccgccccagcttctgccacggcttcagtcagggccaggaggaacacgtgaaggagaaagagaaatgcaggagccgcggggctcccggttccttgggaagagggtgcccattggacctttggcactggatgagccaataaaccaaactctggcacctc

SEQ ID NO: 96442 - DNA, 765 bp, Artificial Sequence
  derived and/or modified sequence
atggtgagctggatcatcagcagactggtggtgctgatcttcggcaccctgtaccccgcctacagcagctacaaggccgtgaagaccaagaacgtgaaggagtacgtgaagtggatgatgtactggatcgtgttcgccttcttcaccaccgccgagaccctgaccgacatcgtgctgagctggttccccttctacttcgagctgaagatcgccttcgtgatctggctgctgagcccctacaccaagggcagcagcgtgctgtacagaaagttcgtgcaccccaccctgagcaacaaggagaaggagatcgacgagtacatcacccaggccagagacaagagctacgagaccatgatgagagtgggcaagagaggcctgaacctggccgccaacgccgccgtgaccgccgccgccaagggccagggcgtgctgagcgagaagctgagaagcttcagcatgcaggacctgaccctgatcagagacgaggacgccctgcccctgcagagacccgacggcagactgagacccagccccggcagcctgctggacaccatcgaggacctgggcgacgaccccgccctgagcctgagaagcagcaccaaccccgccgacagcagaaccgaggccagcgaggacgacatgggcgacaaggcccccaagagagccaagcccatcaagaaggcccccaaggccgagcccctggccagcaagaccctgaagaccagacccaagaagaagaccagcggcggcggcgacagcgcctag

SEQ ID NO: 96443 - protein, 271 aa, Artificial Sequence
  derived and/or modified sequence
MSPEMGELTQTRLQKIWIPHSSGSSRLQRRRGSSIPQFTNSPTMVIMVGLPARGKTYISTKLTRYLNWIGTPTKDNMEALQIRKQCALAALKDVHNYLSHEEGHVAVFDATNTTRERRSLILQFAKEHGYKGVCEEMTYEEIQEHYPEEFALRDQDKYRYRYPKGESYEDLVQRLEPVIMELERQENVLVICHQAVMRCLLAYFLDKSSDELPYLKCPLHTVLKLTPVAYGCKVESIYLNVEAVNTHREKPENVDITREPEEALDTVPAHY

SEQ ID NO: 96444 - protein, 406 aa, Artificial Sequence
  derived and/or modified sequence
MEEKTSRIKVFNLGQYRREAVSYKNYEFFLPDNMEALQIRKQCALAALKDVHNYLSHEEGHVAVFDATNTTRERRSLILQFAKEHGYKVFFIESICNDPGIIAENIRQVKLGSPDYIDCDREKVLEDFLKRIECYEVNYQPLDEELDSHLSYIKIFDVGTRYMVNRVQDHIQSRTVYYLMNIHVTPRSIYLCRHGESELNIRGRIGGDSGLSVRGKQYAYALANFIQSQGISSLKVWTSHMKRTIQTAEALGVPYEQWKALNEIDAGVCEEMTYEEIQEHYPEEFALRDQDKYRYRYPKGESYEDLVQRLEPVIMELERQENVLVICHQAVMRCLLAYFLDKSSDELPYLKCPLHTVLKLTPVAYGCKVESIYLNVEAVNTHREKPENVDITREPEEALDTVPAHY

SEQ ID NO: 96445 - DNA, 816 bp, Artificial Sequence
  derived and/or modified sequence
atgagtcctgagatgggtgaactgactcagacacggctgcagaagatatggatccctcactccagcggcagctcacggttgcagcgcagacgcggcagttccatcccccagtttaccaactcacctacaatggtcataatggtgggactaccggccaggggcaagacgtatattagcactaagcttacaaggtacctgaactggatcgggaccccgaccaaggataatatggaggccctgcagattcggaaacaatgtgcgctggctgccttgaaggacgtgcacaattatctgtcgcacgaagaaggacatgttgcggttttcgatgcaacaaacacaacgcgtgagcgacgaagccttattctgcaattcgctaaggaacacggctacaaaggggtgtgtgaggaaatgacgtacgaagaaatacaagagcattatcctgaagagtttgccctccgggatcaggacaaatacagataccgctatcccaagggagagtcctatgaagacctagtgcaacgacttgagcccgtaattatggaactggagaggcaggagaatgtcttagtcatctgtcatcaggctgttatgcgctgcttgcttgcctactttctggacaaatcgtcggacgagttgccatacctgaagtgccccctgcacaccgtactgaaactcacacccgtcgcgtatggttgcaaagtggaaagtatatacctaaacgtggaggcagtcaacacccaccgggagaagcctgagaatgtggatataacccgcgagccagaggaggcccttgacactgtcccagcccactactag

SEQ ID NO: 96446 - DNA, 1221 bp, Artificial Sequence
  derived and/or modified sequence
atggaagagaaaacttcccggatcaaggtattcaacctcggccagtaccgcagagaggccgtatcctacaagaattatgaatttttcctaccagacaacatggaagcactgcaaatcaggaagcaatgtgccctggctgcactgaaagacgtgcacaactatctgtcccatgaggagggccatgtggccgtgtttgacgccaccaacacaacccgagagaggcggtcactgatcctgcagtttgccaaggagcacggttacaaggtcttcttcattgagagtatttgcaatgaccccggaattatcgctgagaatatcaggcaggtgaaactgggctcacctgattatatcgattgtgacagagagaaagtgttagaggattttctgaagcggatcgaatgttatgaggtcaactaccagccattagatgaggagctggatagtcatctgtcgtacatcaaaatattcgacgtcgggaccagatatatggtgaacagagtccaggatcacatccaatctagaactgtgtactacctaatgaatattcacgtgaccccgcgttctatatatctgtgccgacacggagaaagcgaacttaacatccgtggaaggattggcggggattcaggactgagtgtgaggggaaaacagtacgcttatgctctagctaacttcatccagtctcaaggcattagttctctcaaggtgtggacctcccatatgaagcgcactattcaaaccgctgaggcactgggcgtgccctacgaacagtggaaagcactgaacgaaatcgacgctggagtgtgtgaggaaatgacttatgaagagatccaggagcactatcccgaagaattcgcactgcgggatcaggacaagtacagataccggtaccccaagggtgagagttacgaggacctcgttcaacgactcgaaccagtgattatggaactcgagagacaggagaacgtcctggtaatttgccaccaggccgtgatgcggtgcctgctggcttacttcttggacaaatcttcagatgagcttccttacctgaaatgtccattgcataccgtcttaaagttaacacctgtcgcctacgggtgtaaagtcgagtccatttacctgaatgtcgaagctgtgaatactcacagagagaaacctgagaatgtagacataacaagagaacctgaagaagccctcgacaccgtgcccgcgcactactag

SEQ ID NO: 96447 - DNA, 816 bp, Artificial Sequence
  derived and/or modified sequence
atgagccctgagatgggagagctgacccagacccggctgcagaagatctggatcccccacagcagcggcagcagccggctgcagaggcggcggggcagcagcatcccccagttcaccaacagccccaccatggtgatcatggtgggcctgcctgcccggggcaagacctacatcagcaccaagctgacccgctacctgaactggattggcacccccaccaaggacaacatggaggccctgcagatcaggaagcagtgtgccctggccgccctgaaggatgtgcacaactacctgagccatgaggagggccacgtggccgtgtttgatgccaccaacaccacccgggagaggaggagcctcatcctgcagtttgccaaggagcacggctacaagggcgtgtgtgaggagatgacctatgaggagatccaggagcactacccagaggagtttgccctgcgggaccaggacaagtaccgctaccgctaccccaagggggagagctatgaggacctggtgcagaggctggagcctgtgatcatggagctggagcggcaggagaatgtgctggtgatctgccaccaggccgtgatgcgctgcctgctggcctacttcctggacaagagcagtgatgagctgccctacctgaagtgccccctgcacacagtgctgaagctgacccctgtggcctacggctgcaaggtggagagcatctacctgaatgtggaggccgtgaacacccaccgggagaagccagaaaatgtggacatcacccgggagcctgaggaggccctggacacagtgcctgcccactactag

SEQ ID NO: 96448 - DNA, 1221 bp, Artificial Sequence
  derived and/or modified sequence
atggaggagaagaccagccgcatcaaggtgttcaacctgggccagtacagaagagaggccgtgtcctacaagaactatgagttcttcctgcctgacaacatggaggccctgcagatcaggaagcagtgtgccctggccgccctgaaggatgtgcacaactacctgagccatgaggagggccacgtggccgtgtttgatgccaccaacaccacccgggagcggcgcagcctcatcctgcagtttgccaaggagcacggctacaaggtgttcttcatcgagagcatctgcaatgaccccggcatcatcgccgagaacatccggcaggtgaagctgggcagcccagactacatcgactgtgaccgggagaaggtgctggaggacttcctgaagagaattgaatgttatgaggtgaactaccagcccctggatgaggagctggacagccacctgagctacatcaagatctttgatgtgggcacccgctacatggtgaacagagtgcaggaccacatccagagcaggacagtgtactacctgatgaacatccacgtgacccccaggagcatctacctgtgccgccacggggagagcgagctgaacatccggggcagaattggaggagacagcggcctgtctgtgcggggcaagcagtatgcctatgccctggccaacttcatccagagccagggcatcagcagcctgaaggtgtggaccagccacatgaagaggaccatccagacagctgaggccctgggcgtgccctatgagcagtggaaggccctgaatgaaattgatgctggggtgtgtgaggagatgacctatgaggagatccaggagcactacccagaggagtttgccctgcgggaccaggacaagtaccgctaccgctaccccaagggggagagctatgaggacctggtgcagaggctggagcccgtcatcatggagctggagcggcaggagaatgtgctggtgatctgccaccaggccgtgatgcgctgcctgctggcctacttcctggacaagagcagtgatgagctgccctacctgaagtgccccctgcacacagtgctgaagctgacccctgtggcctacggctgcaaggtggagagcatctacctgaatgtggaggccgtgaacacccaccgggagaagccagaaaatgtggacatcacccgggagcctgaggaggccctggacacagtgcctgcccactactag

SEQ ID NO: 96449 - DNA, 816 bp, Artificial Sequence
  derived and/or modified sequence
atgagccccgagatgggcgagctgacccagacccggctgcagaagatatggattccacacagttcaggctcctcacgcctacaaaggagacgcggcagtagtattccgcaatttacgaatagtccaactatggtgattatggtgggactgcctgctcgggggaaaacctatatctcaaccaagctgacgaggtacctgaactggattggcacgccaacaaaagacaacatggaagctctgcaaatccgcaaacagtgcgcgcttgcagcactgaaggacgttcataattatttgagccatgaggaagggcacgttgcagtgttcgacgcgacaaacacgacgcgggagcggcgaagtctgatcttacagtttgccaaggagcatggctacaagggagtgtgcgaggaaatgacctacgaagaaatccaggaacactaccccgaggagttcgcactacgcgaccaggacaaatatcgataccgataccccaaaggagagagctacgaggatttggttcagaggctggaacctgtgatcatggaactggagaggcaagagaacgtcctagtgatttgtcaccaagccgtcatgagatgtcttcttgcctactttttggacaaatcctccgatgaactgccatacttgaaatgtccactccacacagtcctcaagcttacacctgttgcttatggctgcaaggtggagtccatttacctgaatgtggaagcagtaaacactcacagagaaaagcctgaaaacgtagacatcacacgggagcccgaggaagctctggacacagtgccggcgcactactag

SEQ ID NO: 96450 - DNA, 1221 bp, Artificial Sequence
  derived and/or modified sequence
atggaggagaagaccagccggatcaaggtgttcaacctgggccagtacagaagggaagccgtatcatataagaattatgaattctttttgcctgataatatggaagctttacagattaggaagcagtgcgcacttgcagcactgaaagacgtgcacaattacctctctcacgaagaaggtcatgtcgccgtttttgacgcgacgaataccaccagagagaggcgctcactgatcttacaatttgcaaaggagcatgggtataaagtgttctttatcgagtcgatatgcaatgaccctggaattatcgccgaaaatatacggcaggttaagcttggctctcccgattacattgactgcgacagggaaaaagtcttagaggatttcttgaagaggattgaatgttacgaagtcaattaccagccgctagatgaagaattggacagccacctatcctatattaagatttttgatgtaggaacaagatatatggttaacagggtgcaggatcacatccagtctagaactgtatactacctgatgaatatacacgtcacccccaggagcatttatttgtgccgccacggtgaatccgaactaaacattcgaggacgaattggcggggacagtggactatcagtgaggggtaagcagtatgcatatgcattggctaatttcatccagagtcagggcatctcttctctcaaagtctggactagccatatgaaacggacaatccagactgccgaagccctaggagtgccatatgagcaatggaaagcattgaacgaaatcgatgccggagtatgcgaagaaatgacttatgaggaaattcaagaacactaccctgaagagttcgccttaagagaccaggataagtacaggtaccggtaccccaagggggagtcatatgaagatctggtgcaaaggttggagcctgttataatggagcttgagcggcaagagaatgtcctggtgatctgtcaccaggcagtgatgcgatgtctgcttgcctacttcctggacaagtcatctgatgaattgccatacctgaagtgtcccctgcacactgtgttgaagctcacccctgttgcttacggatgcaaagtcgagagtatttaccttaacgtcgaagccgtgaacacacatagggaaaagcctgagaacgtcgatataaccagagagccggaggaggcccttgatacggtgccagcccactactag

SEQ ID NO: 96451 - DNA, 816 bp, Artificial Sequence
  derived and/or modified sequence
atgtcaccagaaatgggggagctcacccagaccagactgcagaaaatttggatcccccattcctcaggaagtagcaggcttcagcgtagacgtggatcctcaataccccagtttacaaacagtccaactatggtgattatggtcggcttgcctgccagagggaagacttacatatcaaccaagttgacacggtatttaaattggattgggactcctaccaaagataatatggaggctctacaaatacggaaacagtgtgccctcgccgctcttaaggacgtgcataattatctctcacatgaagaaggtcacgtcgccgttttcgacgcaacaaacacaacacgggagcgacgttcattaatactgcagtttgccaaggaacacgggtataaaggggtgtgcgaagaaatgacctacgaagagattcaggaacattaccccgaggagtttgccctccgcgatcaggataagtaccgttacagatatccaaaaggggagtcctatgaggatttagtacagagattggaacccgtcatcatggagttagagagacaggagaatgtgctagtgatttgccaccaggcagtgatgcggtgtttgctggcttattttctggataaaagtagcgacgaactaccttatctgaagtgccccctacacacagtgttgaagttaacccccgtggcttacgggtgtaaggtcgagtcgatttacctcaacgttgaggccgtcaatacccatagagaaaagccagaaaacgtggacatcacgcgggagcccgaagaggcattagacactgtccccgctcattattag

SEQ ID NO: 96452 - DNA, 1221 bp, Artificial Sequence
  derived and/or modified sequence
atggaggagaaaacgtcccggatcaaggtgttcaatcttgggcagtaccggcgtgaggccgtatcttacaaaaattatgagtttttcctgccagacaatatggaggcattgcaaatcaggaagcaatgcgccttagcagctctcaaagacgtgcacaactacctctcccacgaggaaggacacgtggccgtgttcgatgccactaacactaccagagaacgcaggagtctcatattgcagtttgcaaaggaacacggctacaaggtcttttttatagaaagcatctgcaatgatcccggaattattgccgagaatattagacaagtgaagttgggaagccccgactacatcgattgcgaccgcgagaaggttctggaagacttcttgaagcgtatcgagtgctatgaggttaactatcagcctctggacgaagaacttgactcgcacctcagctacattaagatctttgacgtcggcaccagatatatggttaaccgcgtgcaggatcacatccagtccagaaccgtgtactaccttatgaatattcacgtgactccacgatcgatctacctctgccgccatggagagtctgaactgaacatcaggggcaggattgggggagactctgggctctctgtgcgcggtaaacagtacgcttacgctttggctaatttcatccaaagtcagggcatatcatcactgaaggtttggacgtctcatatgaagcggaccatccagacagctgaggccctgggggtgccatatgagcagtggaaggccctcaacgagattgatgctggcgtatgcgaggagatgacatatgaggagatccaagagcactatcccgaagagttcgccctgagagatcaagacaaatatcggtaccgctacccaaagggtgagtcgtatgaggatctcgtgcagaggcttgagccagtcataatggagctggagaggcaggaaaacgtcttagtgatttgccatcaggccgtcatgagatgcttgctcgcatacttcctggacaagtcttccgacgagctgccctacttgaaatgcccacttcacaccgtgctgaagctcactcccgtggcttatggctgtaaggtcgaatctatctacctaaatgtggaggctgtaaacacacacagggaaaaacctgaaaatgtggacattactagagaaccagaggaagccctggatacagtgcccgcacactattag

SEQ ID NO: 96453 - DNA, 1036 bp, Artificial Sequence
  derived and/or modified sequence
gacagctagtaagataggaagtgaggccaggtaccttgtgggcagtgatgtcattcggtgcgactcctaagatgtctccagagatgggagagctcacccaaaccaggttgcagaagatctggattccacacagcagcggcagcagcaggctgcaacggagaaggggctcatccataccccagtttaccaattcccccacaatggtgatcatggtgggtttaccagctcgaggcaagacctatatctccacaaagctcacacgatatctcaactggataggaacaccaactaaagacaacatggaagccctgcaaatcaggaagcagtgcgccctggcagccctgaaggatgttcacaactatctcagccatgaggaaggtcatgttgcggtttttgatgccaccaacactaccagagaacgacggtcactgatcctgcagtttgcaaaagaacatggttacaagggtgtctgtgaggagatgacctatgaagaaatccaggaacattaccctgaagaatttgcactgcgagaccaagataaatatcgctaccgctatcccaagggagagtcctatgaggatctggttcagcgtctggagccagtgataatggagctagaacgacaggagaatgtactggtgatctgccaccaggctgtcatgcggtgcctcctggcctatttcctggataaaagttcagatgagcttccatatctcaagtgccctctgcacacagtgctcaaactcactcctgtggcttatggctgcaaagtggaatccatctacctgaatgtggaggccgtgaacacacaccgggagaagcctgagaatgtggacatcacccgggaacctgaggaagccctggatactgtcccagcccactactgagccctttccaagaagtcaaactgcctgtgtcctcatcgccttccacctttaggaaatgctatctttgctcttctcctactctgccttggcctcactgaggcaccccacttccagtgaagaagtcctccgcaactcccaaacaagcctcg

SEQ ID NO: 96454 - DNA, 1591 bp, Artificial Sequence
  derived and/or modified sequence
gggaaccaacgaacacctccaggcttcctctttgatgccacccactggacctgccttgggggtctgtaaatgcaagagaaccgagtgttggataattagcgatggaagaaaaaacctctagaataaaagtgtttaatttaggccagtatcgacgagaggcagtgagctacaagaactatgaattctttcttccagacaacatggaagccctgcaaatcaggaagcagtgcgccctggcagccctgaaggatgttcacaactatctcagccatgaggaaggtcatgttgcggtttttgatgccaccaacactaccagagaacgacggtcactgatcctgcagtttgcaaaagaacatggttacaaggtgtttttcattgagtccatttgtaatgaccctggcataattgcagaaaacatcaggcaagtgaaacttggcagccctgattatatagactgtgaccgggaaaaggttctggaagactttctaaagagaattgagtgctatgaggtcaactaccaacccttggatgaggaactggacagccacctgtcctacatcaagatcttcgacgtgggcacacgctacatggtgaaccgagtgcaggatcacatccagagccgcacagtctactacctcatgaatatccatgtcacacctcgctccatctacctttgccgacatggcgagagtgaactcaacatcagaggccgcatcggaggtgactctggcctctcagttcgcggcaagcagtatgcctatgccctggccaacttcattcagtcccagggcatcagctccctgaaggtgtggaccagtcacatgaagaggaccatccagacagctgaggccctgggtgtcccctatgagcagtggaaggccctgaatgagattgatgcgggtgtctgtgaggagatgacctatgaagaaatccaggaacattaccctgaagaatttgcactgcgagaccaagataaatatcgctaccgctatcccaagggagagtcctatgaggatctggttcagcgtctggagccagtgataatggagctagaacgacaggagaatgtactggtgatctgccaccaggctgtcatgcggtgcctcctggcctatttcctggataaaagttcagatgagcttccatatctcaagtgccctctgcacacagtgctcaaactcactcctgtggcttatggctgcaaagtggaatccatctacctgaatgtggaggccgtgaacacacaccgggagaagcctgagaatgtggacatcacccgggaacctgaggaagccctggatactgtcccagcccactactgagccctttccaagaagtcaaactgcctgtgtcctcatcgccttccacctttaggaaatgctatctttgctcttctcctactctgccttggcctcactgaggcaccccacttccagtgaagaagtcctccgcaactcccaaacaagcctcgcttgctggccgcaaccaaggagctatctagctctggaggaaactttctttcttaattcctattctctgacgaataaagacttactgcctacaagaggagaggaggaggtcatggcgaggc

SEQ ID NO: 96455 - DNA, 816 bp, Artificial Sequence
  derived and/or modified sequence
atgagccccgagatgggcgagctgacccagaccagactgcagaagatctggatcccccacagcagcggcagcagcagactgcagagaagaagaggcagcagcatcccccagttcaccaacagccccaccatggtgatcatggtgggcctgcccgccagaggcaagacctacatcagcaccaagctgaccagatacctgaactggatcggcacccccaccaaggacaacatggaggccctgcagatcagaaagcagtgcgccctggccgccctgaaggacgtgcacaactacctgagccacgaggagggccacgtggccgtgttcgacgccaccaacaccaccagagagagaagaagcctgatcctgcagttcgccaaggagcacggctacaagggcgtgtgcgaggagatgacctacgaggagatccaggagcactaccccgaggagttcgccctgagagaccaggacaagtacagatacagataccccaagggcgagagctacgaggacctggtgcagagactggagcccgtgatcatggagctggagagacaggagaacgtgctggtgatctgccaccaggccgtgatgagatgcctgctggcctacttcctggacaagagcagcgacgagctgccctacctgaagtgccccctgcacaccgtgctgaagctgacccccgtggcctacggctgcaaggtggagagcatctacctgaacgtggaggccgtgaacacccacagagagaagcccgagaacgtggacatcaccagagagcccgaggaggccctggacaccgtgcccgcccactactag

SEQ ID NO: 96456 - DNA, 1221 bp, Artificial Sequence
  derived and/or modified sequence
atggaggagaagaccagcagaatcaaggtgttcaacctgggccagtacagaagagaggccgtgagctacaagaactacgagttcttcctgcccgacaacatggaggccctgcagatcagaaagcagtgcgccctggccgccctgaaggacgtgcacaactacctgagccacgaggagggccacgtggccgtgttcgacgccaccaacaccaccagagagagaagaagcctgatcctgcagttcgccaaggagcacggctacaaggtgttcttcatcgagagcatctgcaacgaccccggcatcatcgccgagaacatcagacaggtgaagctgggcagccccgactacatcgactgcgacagagagaaggtgctggaggacttcctgaagagaatcgagtgctacgaggtgaactaccagcccctggacgaggagctggacagccacctgagctacatcaagatcttcgacgtgggcaccagatacatggtgaacagagtgcaggaccacatccagagcagaaccgtgtactacctgatgaacatccacgtgacccccagaagcatctacctgtgcagacacggcgagagcgagctgaacatcagaggcagaatcggcggcgacagcggcctgagcgtgagaggcaagcagtacgcctacgccctggccaacttcatccagagccagggcatcagcagcctgaaggtgtggaccagccacatgaagagaaccatccagaccgccgaggccctgggcgtgccctacgagcagtggaaggccctgaacgagatcgacgccggcgtgtgcgaggagatgacctacgaggagatccaggagcactaccccgaggagttcgccctgagagaccaggacaagtacagatacagataccccaagggcgagagctacgaggacctggtgcagagactggagcccgtgatcatggagctggagagacaggagaacgtgctggtgatctgccaccaggccgtgatgagatgcctgctggcctacttcctggacaagagcagcgacgagctgccctacctgaagtgccccctgcacaccgtgctgaagctgacccccgtggcctacggctgcaaggtggagagcatctacctgaacgtggaggccgtgaacacccacagagagaagcccgagaacgtggacatcaccagagagcccgaggaggccctggacaccgtgcccgcccactactag

SEQ ID NO: 96457 - protein, 199 aa, Artificial Sequence
  derived and/or modified sequence
MGLTLLLLLLLGLEGQGIVGSLPEVLQAPVGSSILVQCHYRLQDVKAQKVWCRFLPEGCQPLVSSAVDRRAPAGRRTFLTDLGGGLLQVEMVTLQEEDAGEYGCMVDGARGPQILHRVSLNILPPEEEEETHKIGSLAENAFSDPAGSANPLEPSQDEKSIPLIWGAVLLVGLLVAAVVLFAVMAKRKQESLLSGPPRQ

SEQ ID NO: 96458 - DNA, 600 bp, Artificial Sequence
  derived and/or modified sequence
atgggcctgaccctgctgctgctgctgctgctgggcctggagggccagggcatcgtgggcagcctgcccgaggtgctgcaggcccccgtgggcagcagcatcctggtgcagtgccactacagactgcaggacgtgaaggcccagaaggtgtggtgcagattcctgcccgagggctgccagcccctggtgagcagcgccgtggacagaagagcccccgccggcagaagaaccttcctgaccgacctgggcggcggcctgctgcaggtggagatggtgaccctgcaggaggaggacgccggcgagtacggctgcatggtggacggcgccagaggcccccagatcctgcacagagtgagcctgaacatcctgccccccgaggaggaggaggagacccacaagatcggcagcctggccgagaacgccttcagcgaccccgccggcagcgccaaccccctggagcccagccaggacgagaagagcatccccctgatctggggcgccgtgctgctggtgggcctgctggtggccgccgtggtgctgttcgccgtgatggccaagagaaagcaggagagcctgctgagcggcccccccagacagtag

SEQ ID NO: 96459 - DNA, 600 bp, Artificial Sequence
  derived and/or modified sequence
atggggttgaccctgctgctgctcttactgctggggctagaaggccagggaatcgtaggttccctaccagaagtcctccaggccccagtcgggtcctccattcttgtccaatgccactaccgcctgcaggatgtgaaagcccagaaggtatggtgccgctttctgccagagggctgccagcctttagtaagttcagcggtcgatcgtagggctcctgctggcagacgcactttcctgacagatctgggaggtggactcctgcaggttgagatggtgactctccaggaggaggatgccggtgagtatggatgtatggtcgacggggccaggggcccacaaatcctgcatagggtgtccctcaacattctgccaccagaggaggaggaagagactcataaaattggctctctagctgagaacgccttctcagatcctgcgggaagcgccaacccactggagccctcccaggatgagaaatcaatcccgctcatctggggcgccgtactcctggtgggtttgctggtagcagcggtggtcctatttgcggtcatggccaaacgcaagcaggagtctctgcttagtggcccaccacggcaatag

SEQ ID NO: 96460 - DNA, 600 bp, Artificial Sequence
  derived and/or modified sequence
atgggcctgaccctgctgctgctgctgctgctgggcctggagggccagggcatcgtgggcagcctgcctgaggtgctgcaggcccctgtgggcagcagcatcctggtgcagtgccactaccgcctgcaggatgtgaaggcccagaaggtgtggtgccgcttcctgcctgagggctgccagcccctggtgtcctctgctgtggacagaagagccccagctggaagaaggaccttcctgacagacctgggcggcggcctgctgcaggtggagatggtgaccctgcaggaggaggatgctggggagtatggctgcatggtggatggagcccggggcccccagatcctgcaccgggtgtccctgaacatcctgcccccagaggaggaggaggagacccacaagattggcagcctggctgaaaatgccttcagtgaccctgctggcagcgccaaccccctggagcccagccaggatgagaagagcatccccctcatctggggcgctgtgctgctggtgggcctgctggtggccgctgtggtgctgtttgctgtgatggccaagaggaagcaggagagcctgctgagcggccccccccggcagtag

SEQ ID NO: 96461 - DNA, 600 bp, Artificial Sequence
  derived and/or modified sequence
atgggcctgaccctgctgctgctgctgctgctgggcctggagggccaaggcattgtaggctcccttccagaggtgttgcaggccccagtgggctcttccatcctggtacagtgtcactacaggttgcaggacgtgaaagcgcagaaagtctggtgcaggttcctgccagagggttgccagcctctggtctcttccgctgttgatcgccgggcacctgctggcaggcgaaccttcctgacagatctcggagggggactgctgcaggtcgagatggtgacgcttcaagaagaagatgctggtgagtacggctgtatggtcgacggggcgcgcgggcctcagatcctccatagggtgagtctgaacattcttcctcctgaagaagaagaagagacccacaagatcggctcattggccgaaaacgccttttctgatcccgccggctccgctaaccctttggaaccttcccaagacgaaaagagcatcccgctgatttggggcgccgtactgcttgttgggctgctcgtcgctgcagtcgtgctgtttgctgtgatggctaagaggaagcaggaaagcttgcttagcggaccaccccgccaatag

SEQ ID NO: 96462 - DNA, 600 bp, Artificial Sequence
  derived and/or modified sequence
atgggactgacacttctgctcctgctcctgttgggcttagaagggcaaggcatagtaggaagcctgcctgaagtactgcaggcacctgtgggttcctctatcttggtgcagtgtcactaccgcctacaggacgtcaaggctcaaaaagtctggtgccgattccttcctgaagggtgtcagcccttagtgagcagtgccgtggatcgcagggcacctgccggacggaggacatttcttaccgatctcggcggtggccttctgcaggtggagatggtgactctgcaggaggaggacgcaggcgagtatggttgtatggtcgatggcgctcgcggaccacaaatactgcaccgcgtgagtctgaatatcttgcctcctgaggaagaggaggagacccacaaaatcggctcactggccgagaatgctttcagcgatcccgcaggctctgcaaatcctctggagcctagccaagatgagaaaagcatacctcttatctggggtgccgtgctgctagtgggtttgctcgtggccgcagtcgtcttgttcgcagtaatggctaagagaaagcaggagagcctgctctcagggccacccagacagtag

SEQ ID NO: 96463 - protein, 200 aa, Artificial Sequence
  derived and/or modified sequence
MGLTLLLLLLLGLEEEEEETHKIGSLAENAFSDPAGSANPLEPSQDEKSIPLIWGAVLLVGLLVAAVVLFAVMAKRKQGNRLGVCGRFLSSRVSGMNPSSVVHHVSDSGPAAELPLDVPHIRLDSPPSFDNTTYTSLPLDSPSGKPSLPAPSSLPPLPPKVLVCSKPVTYATVIFPGGNKGGGTSCGPAQNPPNNQTPSS

SEQ ID NO: 96464 - DNA, 603 bp, Artificial Sequence
  derived and/or modified sequence
atgggcctgaccctgctgctgctgctgctgctgggcctggaggaggaggaggaggagacccacaagatcggcagcctggccgagaacgccttcagcgaccccgccggcagcgccaaccccctggagcccagccaggacgagaagagcatccccctgatctggggcgccgtgctgctggtgggcctgctggtggccgccgtggtgctgttcgccgtgatggccaagagaaagcagggcaacagactgggcgtgtgcggcagattcctgagcagcagagtgagcggcatgaaccccagcagcgtggtgcaccacgtgagcgacagcggccccgccgccgagctgcccctggacgtgccccacatcagactggacagcccccccagcttcgacaacaccacctacaccagcctgcccctggacagccccagcggcaagcccagcctgcccgcccccagcagcctgccccccctgccccccaaggtgctggtgtgcagcaagcccgtgacctacgccaccgtgatcttccccggcggcaacaagggcggcggcaccagctgcggccccgcccagaacccccccaacaaccagacccccagcagctag

SEQ ID NO: 96465 - DNA, 603 bp, Artificial Sequence
  derived and/or modified sequence
atggggctcacattattgctcctcttactgctgggactggaggaggaggaagaggaaactcacaagatcggaagcctcgccgagaatgccttctccgatcccgccggatctgcaaaccccctagagccttcccaggacgagaaaagcattccgctaatctggggtgccgtactgctggtgggactgttggttgctgcggtggtgctcttcgccgtcatggccaagagaaaacaggggaaccgcctgggagtgtgcgggcgcttcctgtcgtcgcgggtatctggcatgaatcccagcagtgtcgttcaccacgtttcagactcggggccagcagccgaactacccctggacgttccacatatacgcctggacagcccaccatcttttgataacaccacttacaccagcctccccttggattctcccagcgggaaacccagtctccccgccccaagctccctaccccccttaccgccgaaagtgcttgtttgttcgaaacctgttacatacgccacagtgatttttcccggcggtaataagggcggcggtacatcatgtggtcccgcacagaacccacccaacaaccagacaccgagctcctag

SEQ ID NO: 96466 - DNA, 603 bp, Artificial Sequence
  derived and/or modified sequence
atgggcctgaccctgctgctgctgctgctgctgggcctggaggaggaggaggaggagacccacaagattggcagcctggccgagaatgccttcagtgaccctgctggcagcgccaaccccctggagcccagccaggatgagaagagcatccccctcatctggggcgctgtgctgctggtgggcctgctggtggccgctgtggtgctgtttgctgtgatggccaagaggaagcagggcaaccggctgggcgtgtgtggccgcttcctgagcagccgggtgtctggcatgaaccccagctctgtggtgcaccacgtgtctgacagcggccctgctgctgagctgcccctggatgtgccccacatccggctggacagcccccccagctttgacaacaccacctacaccagcctgcccctggacagccccagcggcaagcccagcctgcctgcccccagcagcctgccccccctgccccccaaggtgctggtgtgcagcaagcctgtgacctacgccaccgtcatcttccctgggggcaacaagggcggcggcaccagctgtggccctgcccagaacccccccaacaaccagacccccagcagctag

SEQ ID NO: 96467 - DNA, 603 bp, Artificial Sequence
  derived and/or modified sequence
atgggcctgaccctgctgctgctgctgctgctgggcctggaggaggaagaggaagagacccacaagattggttctctggccgagaacgccttttctgaccctgcagggagtgcaaacccactggagccgtcccaggacgaaaagtcaattccacttatttggggagcagtgttgcttgtagggctgctggtcgcagccgtggtgctgtttgcagtaatggccaagcgtaaacaagggaacagattaggtgtctgtggcagatttctatccagcagagtgagcggcatgaacccaagctctgtggtccatcacgtgtccgattctgggccagcggccgagcttccacttgatgtgccccacatcagactcgatagcccaccttcgttcgataacacaacttatacctctcttcctttggactcaccaagcggcaagcccagcctgcccgcgccatccagcctgccccccctgccccccaaagtgctggtgtgtagtaaaccagttacttatgctacagttatcttccccggcggaaataaaggagggggaacaagttgcggtcctgcacagaaccctcctaacaatcaaaccccaagttcttag

SEQ ID NO: 96468 - DNA, 603 bp, Artificial Sequence
  derived and/or modified sequence
atggggcttacattgctactgttgctcttgctggggctcgaagaggaagaggaagagactcataagattggatccttggctgagaatgctttcagcgaccctgcgggaagtgccaaccctctggagccaagtcaggacgagaaatcaatcccactgatctggggagccgtgctgttggttggattgctggttgccgctgtggtgctgttcgccgtgatggctaagagaaagcagggcaaccggctgggagtgtgcggcagattcctctcttctagggtgagcggcatgaatccaagctctgtcgtccaccacgtgtctgattctgggccagccgctgaactccctctcgatgtgccccacatccgtttggattcgcctccttctttcgataatacaacgtacacgagcttgccgctagacagcccgagcggcaagcctagcctgccagcgccatcaagcttaccaccactgccccctaaagtacttgtttgtagtaagccagtgacttacgccactgtcatatttcctggcggaaataagggagggggaacctcatgtgggccagcgcaaaacccacctaacaaccaaacgccctcttcatag

SEQ ID NO: 96469 - DNA, 911 bp, Artificial Sequence
  derived and/or modified sequence
tgcatcagtgcccaggcaagcccaggagttgacatttctctgcccagccatgggcctcaccctgctcttgctgctgctcctgggactagaagaggaagaagaagagacccataagattggcagtctggctgagaacgcattctcagaccctgcaggcagtgccaaccctttggaacccagccaggatgagaagagcatccccttgatctggggtgctgtgctcctggtaggtctgctggtggcagcggtggtgctgtttgctgtgatggccaagaggaaacaagggaacaggcttggtgtctgtggccgattcctgagcagcagagtttcaggcatgaatccctcctcagtggtccaccacgtcagtgactctggaccggctgctgaattgcctttggatgtaccacacattaggcttgactcaccaccttcatttgacaataccacctacaccagcctacctcttgattccccatcaggaaaaccttcactcccagctccatcctcattgccccctctacctcctaaggtcctggtctgctccaagcctgtgacatatgccacagtaatcttcccgggagggaacaagggtggagggacctcgtgtgggccagcccagaatccacctaacaatcagactccatccagctaagctgctcatcacactttaaactcatgaggaccatccctaggggttctgtgcatccatccagccagctcatgccctaggatccttaggatatctgagcaaccagggactttaagatctaatccaatgtcctaactttactagggaaagtgacgctcagacatgactgagatgtcttggggaagacctccctgcacccaactcccccactggttcttctaccattacacactgggctaaataaaccctaataatgatgtgc

SEQ ID NO: 96470 - protein, 527 aa, Artificial Sequence
  derived and/or modified sequence
MGNWVVNHWFSVLFLVVWLGLNVFLFVDAFLKYEKADKYYYTRKILGFCSRTLRKQLDHNLTFHKLVAYMICLHTAIHIIAHLFNFDCYSRSRQATDGSLASILSSLSHDEKKGGSWLNPIQSRNTTVEYVTFTSIAGLTGVIMTIALILMVTSATEFIRRSYFEVFWYTHHLFIFYILGLGIHGIGGIVRGQTEESMNESHPRKCAESFEMWDDRDSHCRRPKFEGHPPESWKWILAPVILYICERILRFYRSQQKVVITKVVMHPSKVLELQMNKRGFSMEVGQYIFVNCPSISLLEWHPFTLTSAPEEDFFSIHIRAAGDWTENLIRAFEQQYSPIPRIEVDGPFGTASEDVFQYEVAVLVGAGIGVTPFASILKSIWYKFQCADHNLKTKKIYFYWICRETGAFSWFNNLLTSLEQEMEELGKVGFLNYRLFLTGWDSNIVGHAALNFDKATDIVTGLKQKTSFGRPMWDNEFSTIATSHPKSVVGVFLCGPRTLAKSLRKCCHRYSSLDPRKVQFYFNKENF

SEQ ID NO: 96471 - DNA, 540 bp, Artificial Sequence
  derived and/or modified sequence
atgaacaagagaggtttctctatggaagtcggccagtatatcttcgtcaattgcccatccatcagccttctcgagtggcatccattcacccttacatccgcacctgaggaggactttttttctatacatattagggcagcgggggattggaccgagaacttgattcgagcttttgagcagcagtattctccaattcctcgtattgaagtggacgggccctttgggaccgcatcagaggatgtgttccagtatgaggttgccgtattagtaggcgctggcatcggtgtgacccccttcgcctcaatcctgaagtcaatctggtataagttccagtgtgctgaccacaatctgaagaccaagaagatctatttctattggatctgccgagagactggagcatttagctggttcaacaaccttttgacttctctggaacaggagatggaagaactgggaaaatccctgcggaaatgttgccaccgctactcctccctagaccctaggaaggtgcagttttattttaataaggagaacttctag

SEQ ID NO: 96472 - DNA, 1584 bp, Artificial Sequence
  derived and/or modified sequence
atggggaactgggtggtgaaccactggttctcagtgctgtttttggtggtgtggcttggcctgaatgtatttctgttcgtggatgctttcctgaaatacgagaaagcagataaatactattacacaagaaaaatactaggcttctgtagcaggactctgcgcaaacagcttgatcataatcttacattccataagctggtagcatacatgatctgccttcatactgccattcacattattgcccacctgttcaacttcgactgctatagtcggtctaggcaggccactgatggttccctggcctccattttaagctcactaagccacgatgagaagaagggtggctcttggctgaatcctattcagtcccgaaacactaccgttgagtatgttactttcacaagcattgcgggactcactggggtgattatgacgatcgcactgatactcatggtgacctcagctaccgagtttattcggaggagctactttgaagttttttggtatacacatcacctgtttatcttttacatcctgggactgggcatacatggcatcggaggcatagtaagaggtcagacagaagagagcatgaatgagtcccaccccaggaagtgcgctgagagcttcgaaatgtgggacgatagagattcccattgtcggaggcctaaattcgaagggcaccccccagagtcatggaagtggatcctagcgcccgtaatcttatatatatgcgaaaggattctcaggttctacaggagccaacagaaggttgtgatcaccaaggtggtgatgcacccatcaaaagtactcgagctccaaatgaataaacgtggattctcaatggaggtggggcaatacatttttgtaaactgtcctagcatcagtctgctagagtggcatccctttaccttaacatcagctcccgaggaggatttcttcagcatccacatccgggcggccggggactggacagagaatttaattcgggcattcgaacagcagtactcccctatcccacggatagaggttgatgggccgttcgggactgccagcgaggacgtgttccaatatgaagtcgcagtgctcgtcggggccggaattggtgtgaccccgtttgccagtattctgaaaagtatctggtataaatttcaatgcgccgaccacaacctcaagactaagaagatctacttttactggatctgccgagagactggggcctttagctggttcaataacctcttaacttcactagagcaggagatggaggaactgggaaaggtgggattcttgaactatcggctgttcctgaccggatgggatagtaacattgtaggccacgcagccctaaacttcgacaaggcaacagatatagtcactgggctgaaacaaaaaacgtctttcgggagacctatgtgggacaatgagttttcaacaatcgccaccagccacccaaagtcagtcgtgggggtctttctttgtggacctagaaccctcgcaaagtctctgcgaaagtgctgtcacagatattcctctttagaccccagaaaagtgcagttttacttcaataaagaaaatttctag

SEQ ID NO: 96473 - DNA, 528 bp, Artificial Sequence
  derived and/or modified sequence
tagttttcgatggaggtggggcagtatatctttgtgaattgcccaagcataagcctcctcgagtggcaccccttcactctgacatccgctcccgaagaagattttttttcaattcatataagggccgcaggggattggacagaaaatcttatccgggcgtttgaacagcagtactcgcctattccacgtatagaggtggatggcccattcgggactgcttccgaagatgtattccagtacgaggtagccgttctcgtaggagctgggatcggggtgaccccctttgccagcatcctgaaatcgatctggtataaatttcagtgtgccgaccacaacctaaagaccaaaaaaatctatttctattggatctgtcgcgaaactggggcattctcttggttcaataacctgttaacctcactcgaacaagagatggaggagcttgggaagagtcttagaaagtgctgccaccgatacagttccctcgatccacgtaaagtgcaattctatttcaataaggaaaatttctag

SEQ ID NO: 96474 - DNA, 540 bp, Artificial Sequence
  derived and/or modified sequence
atgaacaagaggggcttctccatggaggtgggccagtacatctttgtgaactgccccagcatcagcctgctggagtggcaccccttcaccctgaccagcgcccctgaggaggacttcttcagcatccacatccgggctgctggggactggacagagaacctgatccgggcctttgagcagcagtacagccccatcccccgcatcgaggtggatggccccttcggcacagcctctgaagatgtgttccagtatgaggtggccgtgctggtgggcgccggcatcggcgtgaccccatttgccagcatcctgaagagcatctggtacaagttccagtgtgccgaccacaacctgaagaccaagaagatctacttctactggatctgccgggagactggagccttctcctggttcaacaacctgctgaccagcctggagcaggagatggaggagctgggcaagagcctgaggaagtgctgccaccgctacagcagcctggaccccaggaaggtgcagttctacttcaacaaggagaacttctag

SEQ ID NO: 96475 - DNA, 1584 bp, Artificial Sequence
  derived and/or modified sequence
atgggcaactgggtggtgaaccactggttctctgtgctcttcctggtggtgtggctgggcctgaatgtgttcctgtttgtggatgccttcctgaagtatgagaaggctgacaagtactactacaccaggaagatcctgggcttctgcagcaggaccctgaggaagcagctggaccacaacctgaccttccacaagctggtggcctacatgatctgcctgcacacagccatccacatcatcgcccacctgttcaactttgactgctacagccgcagccggcaggccacagatggcagcctggccagcatcctgagcagcctgagccatgatgagaagaagggcggctcctggctgaaccccatccagagcaggaacaccaccgtggagtatgtgaccttcaccagcattgctggcctgactggagtcatcatgaccatcgccctgatcctgatggtgaccagcgccacagagttcatccgccgcagctactttgaggtgttctggtacacccaccacctgttcatcttctacatcctgggcctgggcatccacggcatcggcggcatcgtgcggggccagacagaggagagcatgaatgaaagccaccccaggaaatgtgccgagagctttgagatgtgggatgaccgggacagccactgcagaagacccaagtttgagggccaccccccagagagctggaagtggatcctggcccctgtgatcctgtacatctgtgagcgcatcctgcgcttctaccgcagccagcagaaggtggtgatcaccaaggtggtgatgcaccccagcaaggtgctggagctgcagatgaacaagaggggcttctccatggaggtgggccagtacatctttgtgaactgccccagcatcagcctgctggagtggcaccccttcaccctgaccagcgcccctgaggaggacttcttcagcatccacatccgggctgctggggactggacagagaacctgatccgggcctttgagcagcagtacagccccatcccccgcatcgaggtggatggccccttcggcacagcctctgaagatgtgttccagtatgaggtggccgtgctggtgggcgccggcatcggcgtgaccccatttgccagcatcctgaagagcatctggtacaagttccagtgtgccgaccacaacctgaagaccaagaagatctacttctactggatctgccgggagactggagccttctcctggttcaacaacctgctgaccagcctggagcaggagatggaggagctgggcaaggtgggcttcctgaactaccgcctcttcctgaccggctgggacagcaacatcgtgggccacgccgccctgaactttgacaaggccacagacatcgtgacaggcctgaagcagaagaccagctttggccggcccatgtgggacaatgagttcagcaccatcgccaccagccaccccaagtctgtggtgggcgtcttcctgtgtggccccaggaccctggccaagagcctgaggaagtgctgccaccgctacagcagcctggaccccaggaaggtgcagttctacttcaacaaggagaacttctag

SEQ ID NO: 96476 - DNA, 528 bp, Artificial Sequence
  derived and/or modified sequence
tgattctccatggaggtgggccagtacatctttgtgaactgccccagcatcagcctgctggagtggcaccccttcaccctgaccagcgcccctgaggaggacttcttcagcatccacatccgggctgctggggactggacagagaacctgatccgggcctttgagcagcagtacagccccatcccccgcatcgaggtggatggccccttcggcacagcctctgaagatgtgttccagtatgaggtggccgtgctggtgggcgccggcatcggcgtgaccccatttgccagcatcctgaagagcatctggtacaagttccagtgtgccgaccacaacctgaagaccaagaagatctacttctactggatctgccgggagactggagccttctcctggttcaacaacctgctgaccagcctggagcaggagatggaggagctgggcaagagcctgaggaagtgctgccaccgctacagcagcctggaccccaggaaggtgcagttctacttcaacaaggagaacttctag

SEQ ID NO: 96477 - DNA, 1584 bp, Artificial Sequence
  derived and/or modified sequence
atgggaaactgggtggttaaccactggttttcagttttgtttctggttgtttggttagggctgaatgttttcctgtttgtggatgccttcctgaaatatgagaaggccgacaaatactactacacaagaaaaatccttgggttttgcagccgcacactgagaaagcaattggatcacaacctcaccttccacaagctggtggcctatatgatctgcctacatacagctattcacatcattgcacacctgtttaactttgactgctatagcagaagccgacaggccacagatggctcccttgcctccattctctccagcctatctcatgatgagaaaaaggggggttcttggctaaatcccatccagtcccgaaacacgacagtggagtatgtgacattcaccagcattgctggtctcactggagtgatcatgacaatagccttgattctcatggtaacttcagctactgagttcatccggaggagttattttgaagtcttctggtatactcaccacctttttatcttctatatccttggcttagggattcacggcattggtggaattgtccggggtcaaacagaggagagcatgaatgagagtcatcctcgcaagtgtgcagagtcttttgagatgtgggatgatcgtgactcccactgtaggcgccctaagtttgaagggcatccccctgagtcttggaagtggatccttgcaccggtcattctttatatctgtgaaaggatcctccggttttaccgctcccagcagaaggttgtgattaccaaggttgttatgcacccatccaaagttttggaattgcagatgaacaagcgtggcttcagcatggaagtggggcagtatatctttgttaattgcccctcaatctctctcctggaatggcatccttttactttgacctctgctccagaggaagatttcttctccattcatatccgagcagcaggggactggacagaaaatctcataagggctttcgaacaacaatattcaccaattcccaggattgaagtggatggtccctttggcacagccagtgaggatgttttccagtatgaagtggctgtgctggttggagcaggaattggggtcaccccctttgcttctatcttgaaatccatctggtacaaattccagtgtgcagaccacaacctcaaaacaaaaaagatctatttctactggatctgcagggagacaggtgccttttcctggttcaacaacctgttgacttccctggaacaggagatggaggaattaggcaaagtgggttttctaaactaccgtctcttcctcaccggatgggacagcaatattgttggtcatgcagcattaaactttgacaaggccactgacatcgtgacaggtctgaaacagaaaacctcctttgggagaccaatgtgggacaatgagttttctacaatagctacctcccaccccaagtctgtagtgggagttttcttatgtggccctcggactttggcaaagagcctgcgcaaatgctgtcaccgatattccagtctggatcctagaaaggttcaattctacttcaacaaagaaaatttttga

SEQ ID NO: 96478 - DNA, 695 bp, Artificial Sequence
  derived and/or modified sequence
cttcagcatggaagtggggcagtatatctttgttaattgcccctcaatctctctcctggaatggcatccttttactttgacctctgctccagaggaagatttcttctccattcatatccgagcagcaggggactggacagaaaatctcataagggctttcgaacaacaatattcaccaattcccaggattgaagtggatggtccctttggcacagccagtgaggatgttttccagtatgaagtggctgtgctggttggagcaggaattggggtcaccccctttgcttctatcttgaaatccatctggtacaaattccagtgtgcagaccacaacctcaaaacaaaaaagatctatttctactggatctgcagggagacaggtgccttttcctggttcaacaacctgttgacttccctggaacaggagatggaggaattaggcaaaagcctgcgcaaatgctgtcaccgatattccagtctggatcctagaaaggttcaattctacttcaacaaagaaaatttttgagttataggaataaggacggtaatctgcattttgtctctttgtatcttcagtaatttacttggtctcgtcaggtttgagcagtcactttaggataagaatgtgcctctcaagccttgactccctggtattctttttttgattgcattcaacttcgttacttgagcttcag

SEQ ID NO: 96479 - DNA, 540 bp, Artificial Sequence
  derived and/or modified sequence
atgaacaagcggggcttcagcatggaggtgggccagtacatcttcgttaattgccctagcattagcctgttagagtggcaccccttcactctaacatctgcaccggaggaggattttttctcaattcacataagggccgccggggactggacagagaacttaatccgggcctttgagcagcagtactcccctatccctagaatagaggttgacggcccatttggtactgccagcgaagatgtcttccagtacgaggtcgccgtcctggtcggtgccggcatcggcgtgaccccgttcgcgtctattttgaagtcaatctggtacaagtttcagtgtgctgatcacaacctgaagacaaaaaaaatttacttttactggatatgtcgcgagactggagcctttagttggtttaataatctcctgacaagcctggagcaggaaatggaggaactgggaaaatccttgcggaagtgttgccatcgctattcaagcttggaccccagaaaagtgcagttctacttcaataaagaaaatttctag

SEQ ID NO: 96480 - DNA, 1584 bp, Artificial Sequence
  derived and/or modified sequence
atgggcaactgggtggtgaaccactggttcagcgtgctgttcctggtggtctggttagggctgaatgtgttcctgttcgtggacgccttcttgaagtatgagaaggccgataaatactactacacccgcaaaatcctggggttttgctctcggactttacggaaacagctagatcacaatctgacgtttcacaagctggtagcctacatgatctgcctgcatactgctatccacatcattgcacacctgttcaacttcgactgctactctcgttcccgccaggccacagacgggagcttggcgtccatcctgtccagcctgagtcacgacgagaaaaagggcggctcttggttgaatcccattcagagccgcaatactacagtagagtatgttaccttcacttctatcgccggcctcaccggtgtcattatgacgattgcactaatcctgatggtgactagcgctactgagttcattagacggtcctactttgaggtgttttggtacacccaccacttattcatcttttacatcttgggtcttggcatccacggcatcgggggaatagtccgggggcagactgaggagagcatgaatgaatcccaccctcgtaagtgcgctgaatcatttgagatgtgggacgatcgcgatagtcactgccgccgcccaaagtttgaaggccaccctccggagtcatggaaatggatcctggcgcccgtgatcttatacatctgcgagcgcattctcagattctatcgcagtcaacaaaaagtggtcatcacaaaggtagtgatgcatccatcaaaagtactggaactgcagatgaacaagcgggggttttctatggaagttggtcaatacatctttgtaaactgtcccagtatctcactgctggaatggcatcctttcacactgacctctgcgcccgaagaagatttttttagcattcatatacgagccgctggcgactggacagaaaatctgattcgggcctttgagcagcagtatagccccattcctaggatcgaagttgacggacccttcggaactgcctcagaggatgtatttcagtacgaagtcgccgtcctagtcggagcaggaattggagtgacaccgttcgcttctattctcaaatcaatttggtataaatttcagtgcgcagatcacaacctgaaaacaaaaaaaatttacttttactggatctgcagggagacaggcgcattcagctggttcaataatttacttaccagtctggaacaggaaatggaagagctgggaaaggtgggcttcttgaactaccggctgttcttaaccggatgggattccaatatcgtggggcatgcagcacttaattttgataaagctacggacattgtcacagggttgaagcagaaaacctcatttggacgaccaatgtgggacaacgaattctctacaatcgcaacatctcaccccaagtccgtggtcggggtgttcctttgcgggcctcgcactctagcaaaaagcctgcggaagtgttgtcacagatacagctctctggatccaaggaaggtccaattttatttcaacaaagaaaacttctag

SEQ ID NO: 96481 - DNA, 528 bp, Artificial Sequence
  derived and/or modified sequence
tgattcagcatggaggtgggccagtacatcttcgtgaactgcccctccatttctctcctggaatggcatccctttactttgacctccgctcctgaagaggactttttcagcatacacattcgcgccgcaggcgactggacagagaatttaatcagagcctttgaacagcaatacagtcctattcctagaattgaagtggatgggccttttggtactgcctctgaagatgtgttccagtatgaagtcgccgtcctggttggggccggtatcggcgtgacccccttcgcatcgatcctgaagagcatctggtacaaattccagtgcgccgatcacaatctgaaaacaaaaaaaatctacttttattggatatgtcgtgagaccggggcctttagttggttcaataatcttttgaccagcctggaacaggaaatggaagaactaggcaaatccctgaggaagtgttgtcataggtattcatcgctggacccaaggaaggtgcagttctacttcaataaagagaatttttag

SEQ ID NO: 96482 - DNA, 540 bp, Artificial Sequence
  derived and/or modified sequence
atgaataagcgcggtttctctatggaggttggccagtacatttttgtgaactgcccctccatctcactgctggagtggcatccattcacgctgaccagtgcccctgaagaggatttttttagtattcatatccgagcagcaggggactggaccgagaacttgatcagggcctttgagcagcagtacagtcccattcctaggatcgaagtggacgggccattcggaacagcatccgaggacgttttccagtatgaggttgctgtactggtgggagccggaatcggcgtgacccctttcgctagtattctgaaaagcatctggtacaaattccagtgcgctgatcataacttgaagactaaaaagatctacttctattggatttgcagggaaaccggcgcattcagctggtttaataatctgctcactagcctggaacaggaaatggaggagttgggcaagtctttacgcaaatgttgtcatcggtatagtagtttagatccaagaaaggtccaattttactttaacaaagagaatttctag

SEQ ID NO: 96483 - DNA, 1584 bp, Artificial Sequence
  derived and/or modified sequence
atgggcaactgggtggtcaatcactggttctcggtcttgttcctcgtcgtttggctaggtctcaatgtcttcctcttcgtggatgcctttctaaagtacgagaaagctgataagtactactacacgcgaaagatccttggtttttgctcccgaaccctgcgaaagcagctcgaccacaatttgacctttcacaagctcgtggcctatatgatatgcctccatacggcgatccacattattgcacacctgttcaactttgactgctacagtcggagcaggcaggccactgatgggagcctggcttccatcctctctagtttgtcacacgacgaaaaaaagggtgggtcttggcttaaccccatacaatctagaaataccaccgtggagtatgtaactttcactagcattgccggactgactggcgtcatcatgacaattgccctaatcctaatggtcactagtgctacggagtttatacgcagaagttacttcgaagtgttctggtatacccatcatctgttcattttctacattctcggcctcggcatccatggcatcggcggtatcgtcagaggtcagactgaggaaagcatgaatgagagccatcctcgcaaatgcgcagagtccttcgaaatgtgggatgatagagactcacattgcagaaggccgaaattcgagggtcacccgcctgagtcatggaaatggattctggctcccgtaattctgtatatttgtgaaagaatcctgcggttctaccggtctcagcagaaggtggtaataactaaggttgtgatgcacccgagtaaagtgctggagctgcagatgaacaaacgcggattctctatggaagtgggtcaatacattttcgtgaactgcccaagcatctccctcttggagtggcacccctttacacttacctcggcccctgaagaggatttcttcagcattcacatacgagccgctggagattggacggagaacctgatccgcgcattcgaacagcagtacagtccaattcctagaattgaagtcgatggtcctttcggcacagcaagtgaagacgtattccagtacgaggtagcagtccttgtgggagcagggattggagtgaccccttttgccagcatccttaaaagcatctggtataaatttcagtgtgctgaccataatctcaaaactaagaagatctatttctactggatatgtcgggaaaccggtgccttttcctggttcaacaatctattgaccagcttagagcaagagatggaagaactgggcaaggtgggattcctgaactatcggttatttctcacaggatgggactctaatatcgtaggccacgcagcattaaactttgacaaggcgaccgatatagtgaccggacttaaacaaaaaacgtccttcggacgtccgatgtgggataacgagttttccacgattgctacaagccaccctaaatccgttgtgggcgtcttcctgtgtggccctcgcacgctggccaaatcgctgaggaaatgttgccaccgctactctagtctggatcctcgaaaggttcaattttactttaacaaggagaatttctag

SEQ ID NO: 96484 - DNA, 528 bp, Artificial Sequence
  derived and/or modified sequence
taattttccatggaagttggacaatatatttttgtgaattgtccgtctatctcgctgcttgaatggcacccatttacactcaccagcgccccagaggaggactttttttccattcacattagagccgcaggagactggacagagaacctcatcagggcatttgagcagcagtactctcccatacctcggatcgaggtggacggtccctttgggacggcatcagaggatgtttttcagtacgaggttgccgtgcttgtgggcgcagggattggtgtaaccccattcgcttctattttaaagagcatctggtataaatttcagtgtgccgatcacaatctcaagaccaaaaagatctacttttattggatttgcagggagacgggtgccttcagttggtttaacaacctgctcacctccttagaacaggagatggaagagctgggcaagagtcttcggaagtgctgtcaccggtattcctctcttgatcctcgtaaagtccagttttactttaacaaagagaacttctag

SEQ ID NO: 96485 - DNA, 540 bp, Artificial Sequence
  derived and/or modified sequence
atgaacaagagaggcttcagcatggaggtgggccagtacatcttcgtgaactgccccagcatcagcctgctggagtggcaccccttcaccctgaccagcgcccccgaggaggacttcttcagcatccacatcagagccgccggcgactggaccgagaacctgatcagagccttcgagcagcagtacagccccatccccagaatcgaggtggacggccccttcggcaccgccagcgaggacgtgttccagtacgaggtggccgtgctggtgggcgccggcatcggcgtgacccccttcgccagcatcctgaagagcatctggtacaagttccagtgcgccgaccacaacctgaagaccaagaagatctacttctactggatctgcagagagaccggcgccttcagctggttcaacaacctgctgaccagcctggagcaggagatggaggagctgggcaagagcctgagaaagtgctgccacagatacagcagcctggaccccagaaaggtgcagttctacttcaacaaggagaacttctag

SEQ ID NO: 96486 - DNA, 1584 bp, Artificial Sequence
  derived and/or modified sequence
atgggcaactgggtggtgaaccactggttcagcgtgctgttcctggtggtgtggctgggcctgaacgtgttcctgttcgtggacgccttcctgaagtacgagaaggccgacaagtactactacaccagaaagatcctgggcttctgcagcagaaccctgagaaagcagctggaccacaacctgaccttccacaagctggtggcctacatgatctgcctgcacaccgccatccacatcatcgcccacctgttcaacttcgactgctacagcagaagcagacaggccaccgacggcagcctggccagcatcctgagcagcctgagccacgacgagaagaagggcggcagctggctgaaccccatccagagcagaaacaccaccgtggagtacgtgaccttcaccagcatcgccggcctgaccggcgtgatcatgaccatcgccctgatcctgatggtgaccagcgccaccgagttcatcagaagaagctacttcgaggtgttctggtacacccaccacctgttcatcttctacatcctgggcctgggcatccacggcatcggcggcatcgtgagaggccagaccgaggagagcatgaacgagagccaccccagaaagtgcgccgagagcttcgagatgtgggacgacagagacagccactgcagaagacccaagttcgagggccacccccccgagagctggaagtggatcctggcccccgtgatcctgtacatctgcgagagaatcctgagattctacagaagccagcagaaggtggtgatcaccaaggtggtgatgcaccccagcaaggtgctggagctgcagatgaacaagagaggcttcagcatggaggtgggccagtacatcttcgtgaactgccccagcatcagcctgctggagtggcaccccttcaccctgaccagcgcccccgaggaggacttcttcagcatccacatcagagccgccggcgactggaccgagaacctgatcagagccttcgagcagcagtacagccccatccccagaatcgaggtggacggccccttcggcaccgccagcgaggacgtgttccagtacgaggtggccgtgctggtgggcgccggcatcggcgtgacccccttcgccagcatcctgaagagcatctggtacaagttccagtgcgccgaccacaacctgaagaccaagaagatctacttctactggatctgcagagagaccggcgccttcagctggttcaacaacctgctgaccagcctggagcaggagatggaggagctgggcaaggtgggcttcctgaactacagactgttcctgaccggctgggacagcaacatcgtgggccacgccgccctgaacttcgacaaggccaccgacatcgtgaccggcctgaagcagaagaccagcttcggcagacccatgtgggacaacgagttcagcaccatcgccaccagccaccccaagagcgtggtgggcgtgttcctgtgcggccccagaaccctggccaagagcctgagaaagtgctgccacagatacagcagcctggaccccagaaaggtgcagttctacttcaacaaggagaacttctag

SEQ ID NO: 96487 - DNA, 528 bp, Artificial Sequence
  derived and/or modified sequence
tgattcagcatggaggtgggccagtacatcttcgtgaactgccccagcatcagcctgctggagtggcaccccttcaccctgaccagcgcccccgaggaggacttcttcagcatccacatcagagccgccggcgactggaccgagaacctgatcagagccttcgagcagcagtacagccccatccccagaatcgaggtggacggccccttcggcaccgccagcgaggacgtgttccagtacgaggtggccgtgctggtgggcgccggcatcggcgtgacccccttcgccagcatcctgaagagcatctggtacaagttccagtgcgccgaccacaacctgaagaccaagaagatctacttctactggatctgcagagagaccggcgccttcagctggttcaacaacctgctgaccagcctggagcaggagatggaggagctgggcaagagcctgagaaagtgctgccacagatacagcagcctggaccccagaaaggtgcagttctacttcaacaaggagaacttctag

SEQ ID NO: 96488 - protein, 166 aa, Artificial Sequence
  derived and/or modified sequence
MEPLRLLILLFVTELSGAHNTTVFQGVAGQSLQVSCPYDSMKHWGRRKAWCRQLGEKGPCQRVVSTHNLWLLSFLRRWNGSTAITDDTLGGTLTITLRNLQPHDAGLYQCQSLHGSEADTLRKVLVEVLADPLDHRDAGDLWFPGESESFEDAHVEHSISRAERHV

SEQ ID NO: 96489 - protein, 219 aa, Artificial Sequence
  derived and/or modified sequence
MEPLRLLILLFVTELSGAHNTTVFQGVAGQSLQVSCPYDSMKHWGRRKAWCRQLGEKGPCQRVVSTHNLWLLSFLRRWNGSTAITDDTLGGTLTITLRNLQPHDAGLYQCQSLHGSEADTLRKVLVEVLADPLDHRDAGDLWFPGESESFEDAHVEHSISRAERHVKEDDGRKSPGEVPPGTSPACILATWPPGLLVLLWQETTLPEHCFSWTLEAGTG

SEQ ID NO: 96490 - DNA, 501 bp, Artificial Sequence
  derived and/or modified sequence
atggagcccctgagactgctgatcctgctgttcgtgaccgagctgagcggcgcccacaacaccaccgtgttccagggcgtggccggccagagcctgcaggtgagctgcccctacgacagcatgaagcactggggcagaagaaaggcctggtgcagacagctgggcgagaagggcccctgccagagagtggtgagcacccacaacctgtggctgctgagcttcctgagaagatggaacggcagcaccgccatcaccgacgacaccctgggcggcaccctgaccatcaccctgagaaacctgcagccccacgacgccggcctgtaccagtgccagagcctgcacggcagcgaggccgacaccctgagaaaggtgctggtggaggtgctggccgaccccctggaccacagagacgccggcgacctgtggttccccggcgagagcgagagcttcgaggacgcccacgtggagcacagcatcagcagagccgagagacacgtgtag

SEQ ID NO: 96491 - DNA, 660 bp, Artificial Sequence
  derived and/or modified sequence
atggagcccctgagactgctgatcctgctgttcgtgaccgagctgagcggcgcccacaacaccaccgtgttccagggcgtggccggccagagcctgcaggtgagctgcccctacgacagcatgaagcactggggcagaagaaaggcctggtgcagacagctgggcgagaagggcccctgccagagagtggtgagcacccacaacctgtggctgctgagcttcctgagaagatggaacggcagcaccgccatcaccgacgacaccctgggcggcaccctgaccatcaccctgagaaacctgcagccccacgacgccggcctgtaccagtgccagagcctgcacggcagcgaggccgacaccctgagaaaggtgctggtggaggtgctggccgaccccctggaccacagagacgccggcgacctgtggttccccggcgagagcgagagcttcgaggacgcccacgtggagcacagcatcagcagagccgagagacacgtgaaggaggacgacggcagaaagagccccggcgaggtgccccccggcaccagccccgcctgcatcctggccacctggccccccggcctgctggtgctgctgtggcaggagaccaccctgcccgagcactgcttcagctggaccctggaggccggcaccggctag

SEQ ID NO: 96492 - DNA, 501 bp, Artificial Sequence
  derived and/or modified sequence
atggagcctttaagactactcatcctcttattcgtaacagagttaagcggggcgcacaacaccactgtctttcaaggggtggctggccaatctctgcaggtgagctgtccatatgattctatgaagcactggggcagaagaaaggcctggtgcaggcagctgggggagaaaggcccgtgccaacgtgtagtgtctactcacaacctgtggctgctgtcctttttgcgccggtggaacggctcaacggctatcacggacgacactctcggcggcaccctgacaatcacgctacgcaacttgcagcctcacgacgcaggcctgtaccagtgccaatctctgcatggaagcgaagctgatacactccgcaaggtgctggtagaagtcctggcagatcccctggaccacagagacgcaggagatctgtggttccctggggaatccgaaagtttcgaagatgctcacgtggagcattcaatcagtcgggcagagaggcacgtttag

SEQ ID NO: 96493 - DNA, 660 bp, Artificial Sequence
  derived and/or modified sequence
atggagcctttaagactccttatacttctcttcgtgacagaactgtccggggcccataacaccacagttttccagggagtagcaggccagagtctccaggtgagctgtccttacgattcgatgaaacactggggccggagaaaagcctggtgcaggcagctcggggagaaaggaccttgccagcgggtcgtctcaacccacaatctgtggcttttatcgttcttacgtcgttggaacggctcaaccgcaatcaccgatgatacgctggggggtactctcaccatcacattacgcaacctccaacctcatgatgcaggcctctaccagtgtcagtctctgcacggaagtgaggctgacacgttacgcaaagtcttggtggaggtacttgctgatccgctcgaccatcgcgacgccggagatttatggttccccggagaatctgagtcctttgaggacgcccacgtggagcatagtatcagccgagccgaaaggcacgtcaaggaagatgatggcaggaaaagccccggggaagttcccccaggaacaagcccagcatgcatactggcgacctggccaccaggccttctcgttctgctttggcaagagaccacgttaccggagcactgtttttcttggacacttgaggctggcaccgggtag

SEQ ID NO: 96494 - DNA, 501 bp, Artificial Sequence
  derived and/or modified sequence
atggagcccctgcggctgctgatcctgctgtttgtgacagagctgagcggggcccacaacaccaccgtcttccagggcgtggccggccagagcctgcaggtgtcctgcccctatgacagcatgaagcactggggccgcaggaaggcctggtgccggcagctgggggagaagggcccctgccagagggtggtgtccacccacaacctgtggctgctgtccttcctgcggcgctggaatggcagcacagccatcacagatgacaccctgggcggcaccctgaccatcaccctgaggaacctgcagccccatgatgctggcctgtaccagtgccagagcctgcacggcagcgaggccgacaccctgaggaaggtgctggtggaggtgctggccgaccccctggaccacagagatgctggggacctgtggttccctggagagagcgagagctttgaagatgcccacgtggagcacagcatcagcagagctgagagacatgtgtag

SEQ ID NO: 96495 - DNA, 660 bp, Artificial Sequence
  derived and/or modified sequence
atggagcccctgcggctgctgatcctgctgtttgtgacagagctgagcggggcccacaacaccaccgtcttccagggcgtggccggccagagcctgcaggtgtcctgcccctatgacagcatgaagcactggggccgcaggaaggcctggtgccggcagctgggggagaagggcccctgccagagggtggtgtccacccacaacctgtggctgctgtccttcctgcggcgctggaatggcagcacagccatcacagatgacaccctgggcggcaccctgaccatcaccctgaggaacctgcagccccatgatgctggcctgtaccagtgccagagcctgcacggcagcgaggccgacaccctgaggaaggtgctggtggaggtgctggccgaccccctggaccacagagatgctggggacctgtggttccctggagagagcgagagctttgaagatgcccacgtggagcacagcatcagcagagctgagagacatgtgaaggaggatgatggcaggaagagccctggagaggtgcccccaggcaccagccctgcctgcatcctggccacctggcccccaggcctgctggtgctgctgtggcaggagaccaccctgcctgagcactgcttctcctggaccctggaggccggcaccggctag

SEQ ID NO: 96496 - DNA, 501 bp, Artificial Sequence
  derived and/or modified sequence
atggagcccctgcggctgctgatcctgctgttcgtgaccgagctgagcggggcccataatacaactgtgtttcagggcgtggccggccagtccctgcaggtgtcttgcccgtacgacagcatgaaacattggggcaggagaaaggcatggtgcagacaactgggcgaaaaaggaccttgtcaacgggtggtttctacacacaatctatggctgctaagtttcctacgaagatggaatggctccacagcaattacagatgacactcttggaggaaccctcaccatcactctccggaatctgcaaccccacgatgccgggctttatcagtgccagtcgctgcatggtagcgaagcagatacactccgaaaggtcttagtcgaggtattagcagacccgcttgaccatcgggacgcgggcgatctgtggttccccggggagtctgaatcttttgaagatgcccacgtcgagcacagcatctcaagggcagagcgacacgtttag

SEQ ID NO: 96497 - DNA, 660 bp, Artificial Sequence
  derived and/or modified sequence
atggagcccctgcggctgctgatcctgctgttcgtgaccgagctgagcggagctcataacactactgtgttccagggagtcgccggacagtctttgcaggtgagttgtccatatgactccatgaagcattgggggaggcgcaaagcttggtgcaggcagctcggagaaaaaggaccctgtcaacgggttgtgtccacacataatctctggttactttcttttctgagaaggtggaacgggagtactgctatcactgatgacacattgggtggtaccttaacaatcactctgcggaatctgcagcctcatgatgccggtctgtaccagtgccagagcctgcacggctccgaggcggatacactgcggaaagtgttagtggaagttctggccgaccccttagatcatagggacgccggtgatctgtggtttcctggcgaatctgagtccttcgaggatgcccatgttgagcattcgattagtagggccgaaaggcatgtcaaagaggacgatggacgcaagagccccggagaggtgcctcccggaacctcccctgcctgtatactcgccacttggccacctggtctcctggtcctgctgtggcaggaaaccacactccctgaacattgtttctcctggaccctggaagccggtacagggtag

SEQ ID NO: 96498 - DNA, 501 bp, Artificial Sequence
  derived and/or modified sequence
atggagccgctgaggctactgattctgctatttgtgacagaactttctggagcccacaatactaccgtttttcaaggcgtagccggtcagtcgctgcaagtgtcctgcccatatgacagcatgaaacactggggcaggaggaaggcctggtgtcggcagctcggcgaaaaaggaccatgtcagagagtggtatctacgcataacctgtggctactgagcttcctgcgtaggtggaacggttccacagctatcactgacgatactctgggcggtacacttacgatcactctgcgcaacttacagccacatgacgctggcctctaccagtgccagtcgctgcatggctccgaagccgatacactcagaaaggtccttgtggaagtcctagccgacccactggaccacagggatgcgggagacctgtggtttccaggcgaaagtgagagcttcgaggacgcacacgtcgagcatagtatttctagagctgaaagacacgtgtag

SEQ ID NO: 96499 - DNA, 660 bp, Artificial Sequence
  derived and/or modified sequence
atggaacctttaagactgctgatcttattattcgtcacggagttgagcggagcacacaacaccaccgtgtttcagggtgtggctggccagagccttcaagtgtcctgtccttacgactccatgaagcattgggggagaaggaaagcctggtgcaggcaactcggcgaaaaagggccttgtcagagagtggtgtcgacgcataatctttggttactttctttcctacggagatggaacgggtctacagccatcactgacgacactttgggcggtaccctgacaatcacactccggaaccttcaaccacatgacgcgggtctgtatcagtgtcagtctctgcatgggtccgaggccgataccttaagaaaagttctggttgaagtgcttgccgatcctctcgaccatcgagacgcaggtgatctgtggtttcctggcgaatcagagagctttgaagatgcccacgtcgagcattcaattagcagagccgagcgtcatgtaaaggaggacgatggcagaaaaagtcccggtgaagtacccccaggaacgtcaccagcttgcattctggctacgtggccaccaggactgctcgtgctgctttggcaggaaaccacactgcccgagcactgtttcagctggacacttgaagccggaaccggctag

SEQ ID NO: 96500 - DNA, 860 bp, Artificial Sequence
  derived and/or modified sequence
gggcagcgcctgacatgcctgatcctctcttttctgcagttcaagggaaagacgagatcttgcacaaggcactctgcttctgcccttggctggggaagggtggcatggagcctctccggctgctcatcttactctttgtcacagagctgtccggagcccacaacaccacagtgttccagggcgtggcgggccagtccctgcaggtgtcttgcccctatgactccatgaagcactgggggaggcgcaaggcctggtgccgccagctgggagagaagggcccatgccagcgtgtggtcagcacgcacaacttgtggctgctgtccttcctgaggaggtggaatgggagcacagccatcacagacgataccctgggtggcactctcaccattacgctgcggaatctacaaccccatgatgcgggtctctaccagtgccagagcctccatggcagtgaggctgacaccctcaggaaggtcctggtggaggtgctggcagaccccctggatcaccgggatgctggagatctctggttccccggggagtctgagagcttcgaggatgcccatgtggagcacagcatctccagggctgagagacacgtgaaggaagatgatgggaggaaaagcccaggagaagtcccaccagggaccagcccagcctgcatacttgccacttggccaccaggactccttgttctgctctggcaagagactactctgcctgaacactgcttctcctggaccctggaagcagggactggttgagggagtggggaggtggtaagaacacctgacaacttctgaatattggacattttaaacacttacaaataaatccaagactgtcatatttagctggat

SEQ ID NO: 96501 - DNA, 856 bp, Artificial Sequence
  derived and/or modified sequence
gcagcgcctgacatgcctgatcctctcttttctgcagttcaagggaaagacgagatcttgcacaaggcactctgcttctgcccttggctggggaagggtggcatggagcctctccggctgctcatcttactctttgtcacagagctgtccggagcccacaacaccacagtgttccagggcgtggcgggccagtccctgcaggtgtcttgcccctatgactccatgaagcactgggggaggcgcaaggcctggtgccgccagctgggagagaagggcccatgccagcgtgtggtcagcacgcacaacttgtggctgctgtccttcctgaggaggtggaatgggagcacagccatcacagacgataccctgggtggcactctcaccattacgctgcggaatctacaaccccatgatgcgggtctctaccagtgccagagcctccatggcagtgaggctgacaccctcaggaaggtcctggtggaggtgctggcagaccccctggatcaccgggatgctggagatctctggttccccggggagtctgagagcttcgaggatgcccatgtggagcacagcatctccagggctgagagacacgtgaaggaagatgatgggaggaaaagcccaggagaagtcccaccagggaccagcccagcctgcatacttgccacttggccaccaggactccttgttctgctctggcaagagactactctgcctgaacactgcttctcctggaccctggaagcagggactggttgagggagtggggaggtggtaagaacacctgacaacttctgaatattggacattttaaacacttacaaataaatccaagactgtcatatttagctgg

SEQ ID NO: 96502 - DNA, 1604 bp, Artificial Sequence
  derived and/or modified sequence
gcactccccagtggatggccgtgtatcaggagccggcccttttctggaaacaggccagcattcagtctccacagaggcaccataaacacgctggtggggccctgtactgtggtcaaagtcaaggcctccgggcaggactcgcggcccctccggctggcgggtggggttgacccgcacgtcccgccccgcctctcccttcgcgctccggacgggcgacggtagctcgagacccgggactccgcccgcctccccgcgagtatttgaggtccggggcggctccggcgcctctgcccgccgttctgctcgctcgctccccgctctggagtctgccatcatggatgttctcgcagaagcaaatggcacctttgccttaaaccttttgaaaacgctgggtaaagacaactcgaagaatgtgtttttctcacccatgagcatgtcctgtgccctggccatggtctacatgggggcaaagggaaacaccgctgcacagatggcccagatactttctttcaataaaagtggcggtggtggagacatccaccagggcttccagtctcttctcaccgaagtgaacaagactggcacgcagtacttgcttaggatggccaacaggctctttggggaaaagtcttgtgatttcctctcatcttttagagattcctgccaaaaattctaccaagcagagatggaggagcttgactttatcagcgccgtagagaagtccagaaaacacataaacacctgggtagctgaaaagacagaaggtaaaattgcggagttgctctctccgggctcagtggatccattgacaaggctggttctggtgaatgctgtctatttcagaggaaactgggatgaacagtttgacaaggagaacaccgaggagagactgtttaaagtcagcaagaatgaggagaaacctgtgcaaatgatgtttaagcaatctacttttaagaagacctatataggagaaatatttacccaaatcttggtgcttccatatgttggcaaggaactgaatatgatcatcatgcttccggacgagaccactgacttgagaacggtggagaaagaactcacttacgagaagttcgtagaatggacgaggctggacatgatggatgaagaggaggtggaagtgtccctcccgcggtttaaactagaggaaagctacgacatggagagtgtcctgcgcaacctgggcatgactgatgccttcgagctgggcaaggcagacttctctggaatgtcccagacagacctgtctctgtccaaggtcgtgcacaagtcttttgtggaggtcaatgaggaaggcacggaggctgcagccgccacagctgccatcatgatgatgcggtgtgccagattcgtcccccgcttctgcgccgaccaccccttccttttcttcatccagcacagcaagaccaacgggattctcttctgcggccgcttttcctctccgtgaggacagggcagtcttggtgtgcagcccctctcctctctgtcccctgacactccacagtgtgcctgcaacccaagtggccttatccgtgcagtggtggcagttcagaaataaagggcccatttgtgggatgccgcattca

SEQ ID NO: 96503 - DNA, 1370 bp, Artificial Sequence
  derived and/or modified sequence
gacccgaggaccccgggcgcccaggcccagcgcccacggaagaggcggccggcgcgggatgggggcggcgcagagcctcccgggccacaggtctgccatcatggatgttctcgcagaagcaaatggcacctttgccttaaaccttttgaaaacgctgggtaaagacaactcgaagaatgtgtttttctcacccatgagcatgtcctgtgccctggccatggtctacatgggggcaaagggaaacaccgctgcacagatggcccagatactttctttcaataaaagtggcggtggtggagacatccaccagggcttccagtctcttctcaccgaagtgaacaagactggcacgcagtacttgcttaggatggccaacaggctctttggggaaaagtcttgtgatttcctctcatcttttagagattcctgccaaaaattctaccaagcagagatggaggagcttgactttatcagcgccgtagagaagtccagaaaacacataaacacctgggtagctgaaaagacagaaggtaaaattgcggagttgctctctccgggctcagtggatccattgacaaggctggttctggtgaatgctgtctatttcagaggaaactgggatgaacagtttgacaaggagaacaccgaggagagactgtttaaagtcagcaagaatgaggagaaacctgtgcaaatgatgtttaagcaatctacttttaagaagacctatataggagaaatatttacccaaatcttggtgcttccatatgttggcaaggaactgaatatgatcatcatgcttccggacgagaccactgacttgagaacggtggagaaagaactcacttacgagaagttcgtagaatggacgaggctggacatgatggatgaagaggaggtggaagtgtccctcccgcggtttaaactagaggaaagctacgacatggagagtgtcctgcgcaacctgggcatgactgatgccttcgagctgggcaaggcagacttctctggaatgtcccagacagacctgtctctgtccaaggtcgtgcacaagtcttttgtggaggtcaatgaggaaggcacggaggctgcagccgccacagctgccatcatgatgatgcggtgtgccagattcgtcccccgcttctgcgccgaccaccccttccttttcttcatccagcacagcaagaccaacgggattctcttctgcggccgcttttcctctccgtgaggacagggcagtcttggtgtgcagcccctctcctctctgtcccctgacactccacagtgtgcctgcaacccaagtggccttatccgtgcagtggtggcagttcagaaataaagggcccatttgtgggatgccgcattca

SEQ ID NO: 96504 - protein, 376 aa, Artificial Sequence
  derived and/or modified sequence
MDVLAEANGTFALNLLKTLGKDNSKNVFFSPMSMSCALAMVYMGAKGNTAAQMAQILSFNKSGGGGDIHQGFQSLLTEVNKTGTQYLLRMANRLFGEKSCDFLSSFRDSCQKFYQAEMEELDFISAVEKSRKHINTWVAEKTEGKIAELLSPGSVDPLTRLVLVNAVYFRGNWDEQFDKENTEERLFKVSKNEEKPVQMMFKQSTFKKTYIGEIFTQILVLPYVGKELNMIIMLPDETTDLRTVEKELTYEKFVEWTRLDMMDEEEVEVSLPRFKLEESYDMESVLRNLGMTDAFELGKADFSGMSQTDLSLSKVVHKSFVEVNEEGTEAAAATAAIMMMRCARFVPRFCADHPFLFFIQHSKTNGILFCGRFSSP

SEQ ID NO: 96505 - DNA, 3265 bp, Artificial Sequence
  derived and/or modified sequence
tattagaaattagtaatcttaaaatatgtttggaaaggcttggcaagccaggagtgcccagtgccccaagtattctgtgtaatgaataaagaagagtttgaaaacaaaatatttaaacaagcacagcaaacaagctttatcaggtgtatgagttattgtcttggtttcccgtggctgctgtaacaaatgaccatggattcgtggctaaactgcacatgtttattttctcagagttctgaggttggaggttggaaatgggttccgcagggccaggctcctccagaggatcctccttgcctttccagctactgcagctgtggtccttgcgtttcttggcttgaggcccttcatcttcaaggccagtggagtggcattttgctttattctttgcattgctttttcccgtgagatctccccctccctccctcttagaaggatacctgtgattacatttagggtcaactggaacaatccaggataatctcccatctcaagagcctgaatctaatcgtgctgcacagtcccttttgccatgtaaggggcattcacaggtcccagggattatgacccaggtatctttggagcacttgctcagccaaccccagctccaaatgtaaaggcatgcacagtggagagccgcttaattcagcatctcctcacagggcctccagtaggcacctccttccctctcccatctgctccaggaaatgtctgctccagcttctccccttccttgttccgtgggttcccactcactgctcaagtgagtcactgggactgtcttagaatgctggcattctctgactgggacatattcatttggtaaacatctgagaactgtgtcagagcaggcaggccccgcatccctgcattcctgcatcccctccttcccagcctgactgcctgtggggcccttagctgccccttgtcctctcacctgattctgcagattcttcttcttgagcagcagctcagaaagcgcatccgccctgcgtttcaagcccagctacttcttagcttcacttccgtcaacttcaccttccctgtagtgcagtggggcattgatggtaggtctctctaagggcttggtggactttaacatgtgattctgtgattccgacttgcctgaagataccccagctcccccctcccgactatccagctgcattcctgctctggaccctgctggggctgccacacccactgcacggcagggctagagagatgtgcagcctgaccctacccctgagcctgtctgtgaaggtggagatgggcatgcacccacagcccatgaggcaaggtggtgtcctgagtgtgctgtgagttcaggcgcaggaaggcctggcttgttgcagcaggatgtccccaagcgtggtccaaaattggggctttgccacctgcagggatttcctagaaggagatccaagggtcaggaggcatttgaaaggctttcacgcatctttgtatgtggcttgattgatccttttttaaggctcttgctacccagaaatgggattctctctctcattataaaaacatttggccatcttttcttgtgtaactgtcagtgaatgtatcattttgaatatttttcaaattaaaacagtacatttaagcccgcaaaacacaccaaagaatacaaacatagaagcaaaagccagtgccccttctgtaattccaccccaaggaagagactccaggaaagggtgcctccttcccactttctccacgtgcgggcaggcgtgcagggaggagtcctcacaaaacagggcggcgtttcacatagaactctttcattttccacacttaacattagaaacacacaaaataatgtggagggtcctaaaaagaaacagccagagttctgtgtgtgtttctgcttgcccactgaaccacagcatcggcggtgactgtcggtaaggcgcgtgagatgcagtcgcgtggaagctgtgcttaagtgatactgattttaaatcttgttccaggtctgccatcatggatgttctcgcagaagcaaatggcacctttgccttaaaccttttgaaaacgctgggtaaagacaactcgaagaatgtgtttttctcacccatgagcatgtcctgtgccctggccatggtctacatgggggcaaagggaaacaccgctgcacagatggcccagatactttctttcaataaaagtggcggtggtggagacatccaccagggcttccagtctcttctcaccgaagtgaacaagactggcacgcagtacttgcttaggatggccaacaggctctttggggaaaagtcttgtgatttcctctcatcttttagagattcctgccaaaaattctaccaagcagagatggaggagcttgactttatcagcgccgtagagaagtccagaaaacacataaacacctgggtagctgaaaagacagaaggtaaaattgcggagttgctctctccgggctcagtggatccattgacaaggctggttctggtgaatgctgtctatttcagaggaaactgggatgaacagtttgacaaggagaacaccgaggagagactgtttaaagtcagcaagaatgaggagaaacctgtgcaaatgatgtttaagcaatctacttttaagaagacctatataggagaaatatttacccaaatcttggtgcttccatatgttggcaaggaactgaatatgatcatcatgcttccggacgagaccactgacttgagaacggtggagaaagaactcacttacgagaagttcgtagaatggacgaggctggacatgatggatgaagaggaggtggaagtgtccctcccgcggtttaaactagaggaaagctacgacatggagagtgtcctgcgcaacctgggcatgactgatgccttcgagctgggcaaggcagacttctctggaatgtcccagacagacctgtctctgtccaaggtcgtgcacaagtcttttgtggaggtcaatgaggaaggcacggaggctgcagccgccacagctgccatcatgatgatgcggtgtgccagattcgtcccccgcttctgcgccgaccaccccttccttttcttcatccagcacagcaagaccaacgggattctcttctgcggccgcttttcctctccgtgaggacagggcagtcttggtgtgcagcccctctcctctctgtcccctgacactccacagtgtgcctgcaacccaagtggccttatccgtgcagtggtggcagttcagaaataaagggcccatttgtgggatgccgcattca

SEQ ID NO: 96506 - DNA, 885 bp, Artificial Sequence
  derived and/or modified sequence
atggctgaaggcgagaggcaacctcctccagatagctcagaagaggctccaccagctacacaaaacttcataatcccaaaaaaggaaatacacacagtgcctgatatgggcaagtggaagagatcacaggcaattgaaaaactagttgcactcctgaacactttagaccggtggatcgacgagactccaccagtcgatcagccctcacgttttggcaacaaagcatatagaacgtggtatgccaaattagatgaggaggcagagaacctggttgctactgtagtccccacccatcttgccgcagccgtgccggaagtcgccgtatacctgaaagaaagtgttgggaactctacacgaatcgactacgggacagggcacgaagcagccttcgcggcttttctctgctgcctgtgcaagattggggtgcttcgcgtcgacgatcagatcgcaatagtctttaaagtgttcaatcgttatcttgaggtgatgcggaagcttcagaaaacttataggatggaacctgctggatctcagggcgtgtgggggctggacgattttcagttcttgccattcatttggggctctagccagcttatcgaccacccgtatctcgagccgcggcacttcgtcgacgaaaaagctgtgaatgagaaccacaaagattatatgtttctagaatgcatactgttcattaccgagatgaagaccggcccttttgcagaacacagcaatcagctttggaatataagtgccgtgccctcttggagtaaagttaaccagggactgatcagaatgtataaggccgagtgcctggagaagttcccagtcatccaacatttcaaatttggtagcctgctacctatccaccctgtgacttccggctag

SEQ ID NO: 96507 - DNA, 885 bp, Artificial Sequence
  derived and/or modified sequence
atggccgagggggagcggcagcccccaccagacagcagcgaggaggcccccccagccacccagaacttcatcatccccaagaaggagatccacacagtgcctgacatgggcaagtggaagaggagccaggccatcgagaagctggtggccctgctgaacaccctggaccgctggattgatgagaccccacctgtggaccagcccagcagatttggaaacaaggcctaccgcacctggtacgccaagctggatgaggaggccgagaacctggtggccaccgtggtgcccacccacctggccgctgctgtgcctgaggtggccgtgtacctgaaggagagcgtgggcaacagcaccagaattgattatggcaccggccacgaggccgcctttgctgccttcctgtgctgcctgtgcaagattggagtgctgcgggtggatgaccagatcgccatcgtgttcaaggtgttcaaccgctacctggaggtgatgaggaagctgcagaagacctacaggatggagcctgctggcagccagggcgtgtggggcctggatgacttccagttcctgcccttcatctggggcagcagccagctgattgaccacccctacctggagcccaggcactttgtggatgagaaggctgtgaatgaaaaccacaaggactacatgttcctggagtgcatcctcttcatcacagagatgaagacaggcccctttgctgagcacagcaaccagctgtggaacatctctgctgtgcccagctggagcaaggtgaaccagggcctcatccgcatgtacaaggcagaatgtctggagaagtttcctgtgatccagcacttcaagtttggcagcctgctgcccatccaccctgtgaccagcggctag

SEQ ID NO: 96508 - DNA, 885 bp, Artificial Sequence
  derived and/or modified sequence
atggccgagggcgagcggcagcccccccccgacagcagcgaggaggctcctccagccacccagaatttcattatacctaagaaagagattcacactgtgcccgacatgggaaagtggaagcggtctcaagctatcgaaaaacttgtcgctctgttgaatacgttggataggtggatagacgagaccccacccgtggatcagcctagtcggttcggcaataaagcttataggacatggtatgccaagttagatgaagaagccgagaatttagtcgccaccgttgtccctacccatctcgccgccgccgtgcccgaggtcgcggtgtacctgaaagagagcgtgggaaattctactaggattgactacggcaccgggcatgaagctgccttcgccgccttcctctgttgcttatgcaaaattggcgtcttgagggttgatgaccagattgcgattgtgttcaaggttttcaacaggtacctggaagtgatgcgaaaactgcagaaaacctacaggatggaaccagcaggtagccaaggcgtgtgggggttagatgacttccagtttctgccctttatctggggttcctctcaattgatagatcacccctatttagagccccggcacttcgtagatgagaaggcagtgaacgaaaatcacaaagattacatgtttctggaatgcatcctctttatcaccgagatgaagacaggtccatttgccgagcactcgaatcaactctggaacatatctgctgtgccttcatggagtaaggtaaaccagggcctgatcaggatgtataaggccgaatgtctggaaaagtttccagtgattcagcacttcaagtttggtagcctgttgcctatccacccagtaacatctgggtag

SEQ ID NO: 96509 - DNA, 885 bp, Artificial Sequence
  derived and/or modified sequence
atggctgagggtgagaggcaaccacccccagacagtagcgaggaagcccctcccgcaacccagaactttattataccaaaaaaagagattcacaccgtgccggatatgggtaaatggaagaggtcccaggctattgagaagctggtagccctgcttaacactctagacaggtggatcgacgagacccctccagtggatcaaccctcacgctttggcaacaaagcttacaggacgtggtacgcgaagctcgatgaggaggccgaaaatctagttgctacagtggtccccactcacctggctgcagccgtgcccgaagttgcggtgtacctgaaggagagtgtgggaaatagcaccaggattgattacggcacaggacatgaggccgctttcgcggcttttctgtgttgcttgtgcaaaatcggtgtcctccgggtagacgatcaaattgccatcgtcttcaaagtctttaatagatatctcgaggtcatgcggaagctgcagaaaacataccgaatggaaccagctggctcacaaggcgtttggggcctggacgactttcaatttttacccttcatttggggttcaagccagctcattgaccatccctatctggagcctcgccatttcgttgacgagaaggctgtaaatgagaaccacaaggattacatgtttctggaatgtatcctcttcattacggagatgaagaccggcccttttgccgagcacagtaaccaactctggaatatatccgctgtgcctagctggtcaaaggtgaaccagggtctgattcgaatgtacaaggccgagtgcctggaaaagtttcccgtgatccagcacttcaagtttgggtctttactgcccattcacccagttacttctgggtag

SEQ ID NO: 96510 - DNA, 885 bp, Artificial Sequence
  derived and/or modified sequence
atggccgagggcgagagacagcccccccccgacagcagcgaggaggccccccccgccacccagaacttcatcatccccaagaaggagatccacaccgtgcccgacatgggcaagtggaagagaagccaggccatcgagaagctggtggccctgctgaacaccctggacagatggatcgacgagaccccccccgtggaccagcccagcagattcggcaacaaggcctacagaacctggtacgccaagctggacgaggaggccgagaacctggtggccaccgtggtgcccacccacctggccgccgccgtgcccgaggtggccgtgtacctgaaggagagcgtgggcaacagcaccagaatcgactacggcaccggccacgaggccgccttcgccgccttcctgtgctgcctgtgcaagatcggcgtgctgagagtggacgaccagatcgccatcgtgttcaaggtgttcaacagatacctggaggtgatgagaaagctgcagaagacctacagaatggagcccgccggcagccagggcgtgtggggcctggacgacttccagttcctgcccttcatctggggcagcagccagctgatcgaccacccctacctggagcccagacacttcgtggacgagaaggccgtgaacgagaaccacaaggactacatgttcctggagtgcatcctgttcatcaccgagatgaagaccggccccttcgccgagcacagcaaccagctgtggaacatcagcgccgtgcccagctggagcaaggtgaaccagggcctgatcagaatgtacaaggccgagtgcctggagaagttccccgtgatccagcacttcaagttcggcagcctgctgcccatccaccccgtgaccagcggctag

SEQ ID NO: 96511 - protein, 276 aa, Artificial Sequence
  derived and/or modified sequence
MGRRSSDTEEESRSKRKKKHRRRSSSSSSSDSRTYSRKKGGRKSRSKSRSWSRDLQPRSHSYDRRRRHRSSSSSSYGSRRKRSRSRSRGRGKSYRVQRSRSKSRTRRESGNIKAGLEHLPPAEQAKARLQLVLEAAAKADEALKAKERNEEEAKRRKEEDQATLVEQVKRVKEIEAIESDSFVQQTFRSSKEVKKSVEPSEVKQATSTSGPASAVADPPSTEKEIDPTSIPTAIKYQDDNSLAHPNLFIEKADAEEKWFKRLIALRQERLMGSPVA

SEQ ID NO: 96512 - DNA, 831 bp, Artificial Sequence
  derived and/or modified sequence
atgggaagaagatcttccgacacagaagaggagtcccgctcaaagcggaaaaaaaaacaccgacggaggagctcaagcagctcatctagtgactcacgaacatactcaaggaaaaagggcggacggaaaagtcgctccaagtctaggtcctggagcagagacctgcagcctaggtctcactcttacgacaggcgtcggaggcacagatcgagttcttccagcagttatggctctcgaagaaaacgctctcgaagtcgcagcagaggacgcggcaaaagttatcgcgtccaacgcagccggagcaagagccggacgcgcagagaatccgggaacatcaaggccgggctggagcacctgccccctgcagaacaggctaaggctaggctgcagcttgtgcttgaagcagcagccaaagcagatgaggcattaaaggcgaaggaacgaaacgaggaggaggccaaacgtagaaaagaagaggatcaggcaaccctggtcgaacaggtaaagcgcgttaaagagattgaagccatcgagtcagactcctttgtgcagcaaacctttagatcttcgaaagaagtgaagaaatccgttgagccatctgaagttaagcaagccacttctacctcaggtccagcttccgcagtcgccgaccctcccagcacagagaaagagattgacccaacttctatccctacagcaataaaatatcaggatgataacagcctagcccatccaaacctgttcattgagaaagccgatgctgaggagaagtggttcaagagactgatcgcattgagacaagagagactgatgggcagtccagtcgcctag

SEQ ID NO: 96513 - DNA, 831 bp, Artificial Sequence
  derived and/or modified sequence
atggggaggcggagcagtgacaccgaggaagaatcacggtctaaacgaaagaaaaaacacagacggcggagctcttcttcatcctcctcagattcccgaacttatagcaggaagaaaggaggccgcaaatctaggtctaagtctcgcagctggagccgcgatctgcagccccgtagtcactcctacgaccggcggcggaggcaccggtcttccagtagttctagttacggcagtcggagaaaacgatctcgcagcaggtcccgagggagagggaagagttatagggtccaacgatcccggagtaaatcacgcacacggcgggagagtggaaatattaaagcaggtttagagcacttacctcccgcagagcaggccaaggctcgcttgcagctggtgctggaagccgctgccaaggctgacgaagctctcaaggcaaaagagaggaatgaggaagaagccaagcgtcgtaaggaggaagaccaggccactctggtagaacaagtgaagcgggtgaaggagattgaggccatcgagagtgatagctttgtgcagcagacattccgcagctccaaggaggtgaagaagagcgtagaacccagcgaagtgaagcaggctacctccaccagcggtcctgcttctgccgtagccgatcccccctccacagaaaaagaaattgatccaaccagtattccaaccgctataaagtaccaggacgacaacagtctggctcatccaaatttgttcattgaaaaagcagacgctgaggagaaatggtttaaacgcctgatcgcactgaggcaggaaaggcttatggggtcccccgtggcctag

SEQ ID NO: 96514 - DNA, 831 bp, Artificial Sequence
  derived and/or modified sequence
atgggcagaagaagcagtgacacagaggaggagagccgcagcaagaggaagaagaagcacagaagaagaagcagcagcagcagcagcagtgacagcaggacctacagcaggaagaagggcggcaggaagagccgcagcaagagccgctcctggagccgggacctgcagcccaggagccacagctatgacagaagaagaagacacaggagcagcagcagcagcagctatggcagcaggaggaagaggagccgcagccgcagccggggccggggcaagagctacagagtgcagaggagccgcagcaagagcaggacccggcgggagagcggcaacatcaaggccggcctggagcacctgcccccagctgagcaggccaaggcccggctgcagctggtgctggaggccgccgccaaggcagatgaggccctgaaggccaaggagagaaatgaggaggaggccaagaggaggaaggaggaggaccaggccaccctggtggagcaggtgaagagggtgaaggagattgaggccattgaaagtgacagctttgtgcagcagaccttccgcagcagcaaggaggtgaagaagtctgtggagcccagcgaggtgaagcaggccaccagcaccagcggccctgccagcgctgtggccgacccccccagcacagagaaggagattgaccccaccagcatccccacagccatcaagtaccaggatgacaacagcctggcccaccccaacctcttcatcgagaaggcagatgctgaggagaagtggttcaagaggctgattgccctgcggcaggagcggctgatgggcagccctgtggcctag

SEQ ID NO: 96515 - DNA, 831 bp, Artificial Sequence
  derived and/or modified sequence
atgggccggcggagcagcgacaccgaggaggagagccggagcaagagaaagaagaagcacaggcggagaagctcatcctcttcttctagcgattcccggacatactcaagaaagaagggtgggcgaaaatctcgttccaagagccggtcatggtcaagggatctgcagcccagaagtcacagttatgataggcgtcgccgacatagatcatcttcaagtagttcatacgggagtagaaggaagagaagtcggagccgcagtcgcggtcgcggaaagtcttaccgcgttcagcgctcaaggtctaaatctagaacccgtagagaaagcggcaatatcaaggcaggcctcgagcatttgccacccgccgaacaggccaaagctaggctgcagctcgtgctggaagccgctgctaaggccgacgaggcattgaaagccaaagagcgcaacgaggaggaagccaagcggcggaaggaagaagatcaagccaccttggtggaacaggtgaagagggtaaaggaaatcgaagctatcgaaagcgatagctttgtgcagcagacattcaggtcttctaaagaagtcaagaagagcgtggagccaagcgaagttaagcaggcaacttcgacctcaggaccagcgtccgcggtggcagatccgccgagtaccgagaaggagattgatcccactagcattccaacagccatcaagtaccaggatgacaattctttggctcatcccaacctgttcatcgaaaaggccgacgccgaggaaaagtggttcaagaggcttatcgcgctgcggcaggagcgcctgatgggttcacctgtggcttag

SEQ ID NO: 96516 - DNA, 831 bp, Artificial Sequence
  derived and/or modified sequence
atgggccggcggagcagcgacaccgaggaggagagccggagcaagcggaaaaaaaagcatcggagacggagctcatctagttctagcagcgacagtcgcacttatagccgaaagaagggaggccgtaagagccgtagcaagtcgagatcctggagccgggacctgcagccacggtctcattcatacgatagaaggaggcgccaccggtcttcgtcttcctcctcctacggcagccgccggaaacgctctagatctcgcagcaggggcagaggaaagtcataccgcgtccagcgttcacggtccaagtcacgaacacgccgagaatctggaaatatcaaggcaggcctcgagcatctgccccccgcggagcaggctaaagcccggctacagctggttctagaagccgccgcgaaagctgatgaagccttgaaagctaaagagcggaacgaggaggaggccaagcgaagaaaggaggaagatcaggctacccttgttgaacaagtcaagagagtcaaagaaattgaggccatcgaaagtgactcctttgttcagcagacatttagaagcagtaaagaggtaaagaaatctgtcgaaccctcggaagttaagcaggcaaccagcacaagtggacctgcatcggcagttgccgatccccccagcacggagaaagagatcgaccctacatccattcccaccgctattaagtaccaggacgacaattcactggcacatcccaatctcttcatcgaaaaagccgatgctgaggagaagtggtttaagcgcctcatcgccttgagacaggagcgccttatgggtagcccggtggcatag

SEQ ID NO: 96517 - DNA, 831 bp, Artificial Sequence
  derived and/or modified sequence
atgggtagacgctcaagtgacacggaagaggagagccgaagcaagcgaaaaaagaagcatcgcaggcgctccagctctagctcaagtagcgattctcgcacttacagccggaaaaaaggcggaagaaaatcccgctcaaaatcccggtcatggtcccgggatttgcagcccaggtctcacagctacgatcgccgtagacgacaccgatcgtcctctagttcttcatatggttcccgacgaaagcgaagcagatcacgcagtaggggacgcggaaagagttatcgggtgcagcgaagccgaagtaaatcacgtacgcggagagagagcggaaatatcaaggcgggtctcgaacatctgcctcccgctgagcaagccaaagcccgactgcagctcgtcctcgaggccgctgctaaggcagacgaagccctcaaagctaaagaaaggaatgaggaggaggcaaaacggcgaaaagaagaggaccaggccacgttggttgaacaggtgaaaagggttaaagagatcgaggcaattgagtctgacagcttcgtgcagcaaacatttcggtcaagtaaggaagtcaaaaagtcagttgaacctagcgaggtaaagcaggcaacctcgactagcggacctgcatccgctgtagccgatcccccaagtaccgaaaaggagattgatcctacctctatccctacagccatcaaatatcaggatgacaattccttagcccatcccaatctgttcattgaaaaagcagacgctgaagaaaagtggtttaagcgcttgatcgcccttcggcaggaacgcctcatgggtagtcctgtagcctag

SEQ ID NO: 96518 - DNA, 831 bp, Artificial Sequence
  derived and/or modified sequence
atgggtcggcgatcctccgataccgaagaggaatctcgctccaagaggaaaaaaaaacataggagacgatcctcgtctagcagctctagtgattcgagaacctactccaggaaaaaaggaggcaggaagtcccggagtaaaagcaggtcctggagtcgggatctgcagccgcgtagccattcctacgaccgtagacggaggcacaggagcagttctagcagcagctatgggtcaaggcggaaaaggagtagatcacggagcagggggcgtggtaagtcataccgggtgcagaggtccaggtcaaagagcaggactcggagagagtcaggaaatattaaagcaggactcgaacatctaccacctgccgaacaggccaaagcacggttacagcttgttctggaagctgcggctaaagccgatgaagccctcaaagccaaagaacgcaacgaggaagaggccaagcgtagaaaagaagaagatcaggcaactctagtagaacaggtgaagagggtgaaggagattgaagcaatagaaagcgattcatttgtacagcaaacatttagatcttcgaaagaagtgaaaaagagcgtcgaaccctctgaagtaaaacaggcgacaagcacctcaggaccagcgagcgctgtggccgacccgcctagcaccgagaaggagattgaccctacatctatacccaccgccataaagtaccaagacgataactcgctggctcacccaaacctcttcatcgaaaaggccgatgccgaggagaaatggttcaaaagactgatcgcccttcggcaagagaggctgatgggcagccccgtggcatag

SEQ ID NO: 96519 - DNA, 1443 bp, Artificial Sequence
  derived and/or modified sequence
gagcttaaactgaagcaagttcggtggacgccggcggcgccctgatctaaagaaacgactcagggactgcggcgcttgcacgtcaacgggagaaatgggacgtcggtcatcagatactgaagaagaaagcagaagcaagagaaaaaagaaacaccgtagacggtcctcctcgagcagttcttcagatagtagaacatacagccgaaagaaaggaggaaggaaatcaagatcaaagtcaagatcttggtccagagatcttcagcctcgttcacattcttatgatagaagacgcaggcatcgatcaagcagtagctcttcttatggctccagaaggaaacgaagtcgaagtcgttcaaggggtcgagggaaatcctatagagttcagaggtctaggtcaaaaagcagaacaagaagggaatctggaaacatcaaagctggattagaacatctgccaccagctgaacaggccaaagccagactacagctggttcttgaagctgctgcaaaagctgatgaagcattgaaagccaaagaaagaaatgaggaagaagcaaagagaagaaaggaggaagaccaagccaccctggtagaacaagtaaaaagagtaaaagaaattgaagctattgaaagtgattcttttgttcagcagacattcagatcaagtaaagaagtcaaaaagtcagtggaacctagtgaagtgaaacaagcaacttcaacatcaggaccagcatcagcagttgctgatccacccagtactgaaaaagaaatagatcctaccagcatccctactgctatcaagtaccaagatgacaattccctggcccatccaaatttatttatcgagaaagctgatgctgaggaaaaatggttcaagagattaattgctctccgacaagaaagactaatgggcagtcctgtggcctaagtaatatacatatagttggattggattgtcagcagtaacattggaaatttaggtttttaaatcccaatattaactttttactcttaaaaagaattttgctgattatatataaaggtagtctcatttcatttgtctctcatgtaggcttgaatatttgttaatttgaattaaatcaaacattgtaaaaattaaaacaaaatttaagattgcatgaaaatgttatactgttaataaagctaaacataaataagtctgttaaaatgaatggtagacactagtgtttcttagtgcaattcaaaaaatgtcaagatgtcatttaaagacacaattttgattaattatgcatacatgagaattgaattacatgctataaatatgagatttcatcttccgtatggtattcaaccatttttaaatattttatttcaccatattgcaaatttttaggcacaataaaaagcaccctaaacaatgtaagcagaatgtgcatgttaaagaacatatttatggaaaaaaaa

SEQ ID NO: 96520 - DNA, 2411 bp, Artificial Sequence
  derived and/or modified sequence
agaaccaggaaggcgctgagcttaaactgaagcaagttcggtggacgccggcggcgccctgatctaaagaaacgactcagggactgcggcgcttgcacgtcaacgggaggtgtgagcccaaagaaatgggacgtcggtcatcagatactgaagaagaaagcagaagcaagagaaaaaagaaacaccgtagacggtcctcctcgagcagttcttcagatagtagaacatacagccgaaagaaaggaggaaggaaatcaagatcaaagtcaagatcttggtccagagatcttcagcctcgttcacattcttatgatagaagacgcaggcatcgatcaagcagtagctcttcttatggctccagaaggaaacgaagtcgaagtcgttcaaggggtcgagggaaatcctatagagttcagaggtctaggtcaaaaagcagaacaagaagggaatctggaaacatcaaagctggattagaacatctgccaccagctgaacaggccaaagccagactacagctggttcttgaagctgctgcaaaagctgatgaagcattgaaagccaaagaaagaaatgaggaagaagcaaagagaagaaaggaggaagaccaagccaccctggtagaacaagtaaaaagagtaaaagaaattgaagctattgaaagtgattcttttgttcagcagacattcagatcaagtaaagaagtcaaaaagtcagtggaacctagtgaagtgaaacaagcaacttcaacatcaggaccagcatcagcagttgctgatccacccagtactgaaaaagaaatagatcctaccagcatccctactgctatcaagtaccaagatgacaattccctggcccatccaaatttatttatcgagaaagctgatgctgaggaaaaatggttcaagagattaattgctctccgacaagaaagactaatgggcagtcctgtggcctaagtaatatacatatagttggattggattgtcagcagtaacattggaaatttaggtttttaaatcccaatattaactttttactcttaaaaagaattttgctgattatatataaaggtagtctcatttcatttgtctctcatgtaggcttgaatatttgttaatttgaattaaatcaaacattgtaaaaattaaaacaaaatttaagattgcatgaaaatgttatactgttaataaagctaaacataaataagtctgttaaaatgaatggtagacactagtgtttcttagtgcaattcaaaaaatgtcaagatgtcatttaaagacacaattttgattaattatgcatacatgagaattgaattacatgctataaatatgagatttcatcttccgtatggtattcaaccatttttaaatattttatttcaccatattgcaaatttttaggcacaataaaaagcaccctaaacaatgtaagcagaatgtgcatgttaaagaacatatttatggaaaaaaaatttttgaaacttaaataaattggtgattttgcttagagatcagcttctactagatgctcctttacaacatgttagcagatctcagctcattgttttagaaatcacatgttcatgctagacctaaccagttggccaaatacctatgatggagaaatcatttctgagaaaactgataagagctctcacttcagtcttacttaccccactgctattccctgtggagaaagccggctaattgttttgataaggctatctgccattgtagaatacctttctctagtagctgaatgacaatcaactatacgttccatactaaacatgccagagataggacttttaggccttgctttacaaaactggtttttaacagctgacatgaatatttcccgtttctattttcttttttttttttttttttttttttttgagacggagtctcgctctatcccccatgctggagtgcagtggcgcgatctcagctcactgcaagctccgcctcccaggttcacgccattttcttgcctcagcctcccgagtagctgggactacaggcacccgctaacatgcccagctaattttttgtgtttttagtagagatggggtttcaccattttagccaggatggtctattttcttctgttgtccagtcactaatttagtctctgcgaagactgtagctcagaacaaaagataagcaaaaaaagtcttcagggtaggactgccaacatataggacattttaatgccatcttctttatatttctgggacattaaaattcaaatctctgttgaaaatgaaaaatgtaaaacttagttgcaaacagtatagaaaataagtgatgatgaaatatttgttttcatacaaacatgctttcccattctaaatagatgctagttttcttttttccttggctgtaaataaaagtgccccaaatgaa

SEQ ID NO: 96521 - DNA, 831 bp, Artificial Sequence
  derived and/or modified sequence
atgggcagaagaagcagcgacaccgaggaggagagcagaagcaagagaaagaagaagcacagaagaagaagcagcagcagcagcagcagcgacagcagaacctacagcagaaagaagggcggcagaaagagcagaagcaagagcagaagctggagcagagacctgcagcccagaagccacagctacgacagaagaagaagacacagaagcagcagcagcagcagctacggcagcagaagaaagagaagcagaagcagaagcagaggcagaggcaagagctacagagtgcagagaagcagaagcaagagcagaaccagaagagagagcggcaacatcaaggccggcctggagcacctgccccccgccgagcaggccaaggccagactgcagctggtgctggaggccgccgccaaggccgacgaggccctgaaggccaaggagagaaacgaggaggaggccaagagaagaaaggaggaggaccaggccaccctggtggagcaggtgaagagagtgaaggagatcgaggccatcgagagcgacagcttcgtgcagcagaccttcagaagcagcaaggaggtgaagaagagcgtggagcccagcgaggtgaagcaggccaccagcaccagcggccccgccagcgccgtggccgacccccccagcaccgagaaggagatcgaccccaccagcatccccaccgccatcaagtaccaggacgacaacagcctggcccaccccaacctgttcatcgagaaggccgacgccgaggagaagtggttcaagagactgatcgccctgagacaggagagactgatgggcagccccgtggcctag

SEQ ID NO: 96522 - DNA, 1218 bp, Artificial Sequence
  derived and/or modified sequence
atgaaggtggcccccgacaagacctgcatgcagttcagcatcagaagacccaagctgcccagcagcgagacccaccccgaggagagcatgtacaagagactgggcgtgagcgcctggctgaaccacctgaacgagctgggccaggtggaggaggagtacaagctgagaaaggccatcttcttcggcggcatcgacgtgagcatcagaggcgaggtgtggcccttcctgctgagatactacagccacgagagcaccagcgaggagagagaggccctgagactgcagaagagaaaggagtacagcgagatccagcagaagagactgagcatgacccccgaggagcacagagccttctggagaaacgtgcagttcaccgtggacaaggacgtggtgagaaccgacagaaacaaccagttcttcagaggcgaggacaaccccaacgtggagagcatgagaagaatcctgctgaactacgccgtgtacaaccccgccgtgggctacagccagggcatgagcgacctggtggcccccatcctggccgaggtgctggacgagagcgacaccttctggtgcttcgtgggcctgatgcagaacaccatcttcgtgagcagccccagagacgaggacatggagaagcagctgctgtacctgagagagctgctgagactgacccacgtgagattctaccagcacctggtgagcctgggcgaggacggcctgcagatgctgttctgccacagatggctgctgctgtgcttcaagagagagttccccgaggccgaggccctgagaatctgggaggcctgctgggcccactaccagaccgactacttccacctgttcatctgcgtggccatcgtggccatctacggcgacgacgtgatcgagcagcagctggccaccgaccagatgctgctgcacttcggcaacctggccatgcacatgaacggcgagctggtgctgagaaaggccagaagcctgctgtaccagttcagactgctgcccagaatcccctgcagcctgcacgacctgtgcaagctgtgcggcagcggcatgtgggacagcggcagcatgcccgccgtggagtgcaccggccaccaccccggcagcgagagctgcccctacggcggcaccgtggagatgcccagccccaagagcctgagagagggcaagaagggccccaagaccccccaggacggcttcggcttcagaagatag

SEQ ID NO: 96523 - DNA, 1218 bp, Artificial Sequence
  derived and/or modified sequence
atgaaggtggccccggataaaacttgcatgcagttctccatcagacggccaaaactgccaagttccgaaacccatccggaggagtcgatgtacaaacggctgggggtgagcgcatggttgaatcacttgaacgagctggggcaggtggaggaagagtacaaacttcgcaaagcaattttctttgggggaatcgatgtatccatccgcggggaagtgtggccgttcctgctacgatattatagccacgagtctacttcagaagaacgagaggcgctgaggctgcagaaacgcaaggaatatagtgagattcagcaaaaaagactgtctatgaccccagaagagcatagagcattttggaggaacgtgcagttcacagtcgacaaagatgtcgtgagaacagatagaaataatcagttttttcgaggggaggacaaccccaatgtggagagcatgagacgaatcctgttaaactacgctgtgtataacccagccgtgggctactcccagggaatgtccgatctggtggctccaattctggcagaggtactggacgaatcggacacattctggtgtttcgttggactgatgcagaataccatcttcgtgagttccccacgagacgaggatatggaaaagcagctgctctacttgcgggaactcctgcggctcactcatgtcaggttctaccagcaccttgttagtctcggagaggacggcttacagatgctgttttgtcacagatggcttctgctttgctttaagcgggagtttcccgaggccgaagctcttaggatctgggaggcatgttgggcccattatcagactgattacttccacctctttatttgtgtcgcaattgtggcaatctacggggacgacgtgatagagcagcaattagcgacggatcagatgctgttacattttggcaacttagccatgcatatgaacggagagctggtccttcggaaggccagatctcttctgtaccaatttcggctcctaccccgtattccatgctctctgcacgacctgtgcaaattgtgcggctctggaatgtgggactctggatccatgccagccgtcgagtgcaccggccaccatccaggttccgagagctgtccatatgggggcactgtcgagatgccttccccaaaaagcttaagagaaggaaagaaagggcccaagacacctcaggatggattcggattcagacgctag

SEQ ID NO: 96524 - DNA, 1218 bp, Artificial Sequence
  derived and/or modified sequence
atgaaggtggccccagacaagacctgcatgcagttcagcatcagaagacccaagctgcccagcagcgagacccaccctgaggagagcatgtacaagaggctgggcgtgtctgcctggctgaaccacctgaatgagctgggccaggtggaggaggagtacaagctgaggaaggccatcttctttggaggcattgatgtgtccatccggggggaggtgtggcccttcctgctgcgctactacagccatgagagcaccagcgaggagcgggaggccctgcggctgcagaagaggaaggagtacagcgagatccagcagaagaggctgtccatgaccccagaggagcaccgggccttctggagaaatgtgcagttcaccgtggacaaggatgtggtgaggacagacaggaacaaccagttcttcagaggagaggacaaccccaacgtggagagcatgaggcgcatcctgctgaactatgctgtgtacaacccagctgtgggctacagccagggcatgtctgacctggtggcccccatcctggccgaggtgctggatgaaagtgacaccttctggtgctttgtgggcctgatgcagaacaccatctttgtgagcagccccagagatgaggacatggagaagcagctgctgtacctgcgggagctgctgcggctgacccacgtgcgcttctaccagcacctggtgtccctgggagaagatggcctgcagatgctgttctgccaccgctggctgctgctgtgcttcaagcgggagttccctgaggccgaggccctgcgcatctgggaggcctgctgggcccactaccagacagactacttccacctgttcatctgtgtggccatcgtggccatctatggagatgatgtgattgagcagcagctggccacagaccagatgctgctgcacttcggcaacctggccatgcacatgaatggagagctggtgctgaggaaggcccggagcctgctgtaccagttccggctgctgccccgcatcccctgcagcctgcatgacctgtgcaagctgtgtggcagcggcatgtgggacagcggctccatgcctgctgtggagtgcaccggccaccaccctggcagcgagagctgcccctatggaggcaccgtggagatgcccagccccaagagcctgcgggagggcaagaagggccccaagaccccccaggacggcttcggcttcagaagatag

SEQ ID NO: 96525 - DNA, 1218 bp, Artificial Sequence
  derived and/or modified sequence
atgaaggtggcccccgacaagacctgcatgcagttcagcatccggaggcccaaattaccttcctctgagacacatcctgaagagtcaatgtataagcgcctgggagtttctgcttggttgaaccatttaaatgaactcggacaggttgaggaagagtataaactgcgcaaagctatattctttggcggaatagatgtatctataaggggggaggtgtggccttttcttcttcgatattactctcatgaatcaacctccgaagaacgcgaggccctgcgtctgcaaaaaagaaaggagtactcggagatccaacaaaagaggttatctatgacccccgaagagcatcgggcgttttggagaaatgttcagttcactgtggacaaggatgtggtacgcacagatcggaataatcaattctttcggggggaggataaccctaacgtcgagtccatgcggcgaatcctcctgaactacgcagtgtataaccccgcggttgggtactctcagggcatgtccgacttggttgccccgatcctcgctgaagttttagatgaatcagacaccttctggtgtttcgttggacttatgcagaatacgatcttcgtctcctcgcctcgcgatgaggatatggagaagcagctgctgtacttgcgggagctccttaggctgacacacgtcagattctaccagcacctggtgtctctcggagaggatggcctgcagatgctgttctgtcataggtggctcctcctgtgttttaagcgagagttcccggaggccgaggcactccgcatctgggaagcctgctgggcgcattatcagacggattatttccatctcttcatctgcgttgcgatcgtagccatctacggcgatgacgttattgaacagcagctggcaactgaccagatgctcttgcatttcggaaatctcgccatgcacatgaatggcgagttagtgctgagaaaagcccgctccctcctgtaccagtttcggctgcttccaagaatcccctgttctctgcatgatctctgcaaactgtgtgggtctggtatgtgggatagtggtagcatgcccgccgtagagtgcactggccaccatcccggatccgaatcctgtccgtacggaggcacagttgaaatgccatccccaaagagcctgcgcgagggaaagaaaggtcctaagaccccccaggatggtttcggtttccggcggtag

SEQ ID NO: 96526 - DNA, 1218 bp, Artificial Sequence
  derived and/or modified sequence
atgaaggtggcacccgacaagacatgtatgcaattcagcattcgtcgcccaaaactgccatcgagcgaaacgcatcctgaggaatcaatgtataagcgacttggcgtgtccgcctggctcaaccacttaaatgaactcgggcaggtcgaggaggaatacaagctgaggaaggctatttttttcggcggaatagatgtttctatccggggagaagtctggccattccttctaagatattattctcatgagtctacaagcgaggagagagaagccctgcgtctgcagaagcggaaagagtatagtgaaattcagcaaaagcgcctgtcaatgacacctgaagagcacagggcattctggcgcaacgtccagttcaccgtcgacaaggacgttgtccggaccgaccgcaataatcagttttttcggggagaggacaacccaaacgtcgaaagtatgagaagaatcctgctgaactatgctgtttacaacccggctgtcggttactcacaggggatgtccgacctggtggctcctatcctggctgaggtgttggacgaatcagacactttttggtgcttcgtcggattaatgcaaaacactatctttgttagctcgcccagagacgaggatatggaaaaacaacttttatatttgagagaattgttacgcttgacacatgttcgcttctatcagcacttggtttccttgggcgaagacggactgcaaatgctattctgtcataggtggctattgctgtgcttcaagagagaattcccagaagccgaggccttgaggatttgggaggcatgctgggcacattatcagaccgactactttcacctttttatctgtgtagctatcgtggctatctatggagatgatgtcattgaacagcagttagcaacggaccaaatgttactgcacttcggaaatcttgcaatgcacatgaacggggaactcgtactgagaaaggctagatctctgctttaccagtttcgtctgctgcctaggataccttgttcactgcacgatttatgcaaactctgcggctcggggatgtgggattctggcagcatgccggcagtcgagtgcactggtcaccatcccggaagcgaatcttgcccatatggaggcaccgtagagatgccatcgcctaaaagcttacgcgaggggaaaaaaggacccaagacccctcaggatggcttcggattccgacgctag

SEQ ID NO: 96527 - DNA, 4245 bp, Artificial Sequence
  derived and/or modified sequence
ctggggttggagagagtggggggcggcggcacagtgggccggggaggagagagccgcagagggaaaccgattttaagatgaaggtcgcccccgataagacatgcatgcagttctccatccgccgccccaagctgccgtcctccgagacgcaccccgaggagagcatgtacaagaggctcggcgtctccgcctggctcaaccacctgaatgagctgggccaggtggaggaggagtacaagctgcggaaggccattttctttggcggtattgatgtgtcaatccgcggggaggtctggcccttcctgctgcgctattacagccacgagtccacgtcggaggagcgggaggcgctgcggctgcagaagcgaaaggagtactctgagatccagcagaaaaggctctccatgactcccgaggagcacagagcgttctggcgtaatgtgcagttcactgtggacaaagacgtggtccggacagatcggaacaaccagttcttccggggggaagacaatcccaatgtggagagcatgaggaggatcctgctgaactacgccgtgtacaaccctgccgtcggctattcccaagggatgtcggacctggtggcgcccatcttggccgaggtcctggatgagtcagacaccttctggtgctttgtgggtttgatgcagaacacgatcttcgtcagctcaccccgggacgaggacatggagaaacaactgctgtacctgcgcgagctgctgcggctgacgcacgtgcgcttctaccagcacctggtctcgctgggcgaggacggcctgcagatgctcttctgccaccgctggctccttctgtgcttcaagcgggagttccccgaggccgaagcgctgcggatctgggaggcctgctgggcccactaccagacggactacttccaccttttcatctgcgtggccatcgtggccatctacggggatgacgtcatcgagcagcagctggccacggaccagatgctcctgcacttcggaaacctggccatgcacatgaacggggagctcgttctccggaaggcgaggagtttgctgtaccagttccgcctcctgccccggatcccctgcagcctgcacgatctgtgtaagctgtgcgggtcaggcatgtgggacagcggctccatgcccgcggtggagtgcaccggccaccatcccggctcggagagctgtccctacgggggcacggtggagatgccttcccccaagtccctgagggaaggcaagaagggcccaaagacgccgcaggacggcttcggcttccgcagataggtcgggcccccgacaccggacaggggttgaggggacctcctcagaggccctgggcacgggagggggtggggctgggcgtgaaggggacaggggacggtagaaacctaaggaaaatgcttttgggcaacatgagaggaaccttttcatattaatgacaaaattagagtctggaagtgacagaagtcagatctacagccacccagaggaaagtcagctcctgaaacgctgcagtggaacgcgcagccaccgcacctgagacgcaggctggctgggctctcctgctggctgccctggaggatttcaacatgtcccaggatttgctccaccctcgagggcagccagacagcgtcgccaggcaatgaggaaagcagagacaggagaggaaggcctcactcacccactgcgtcgagggctgcagaacacagcggggtcctgtccaggcccagggacatctttgcaagccagacacacttcctcttgagacctcgttctctcggagtgagccaaacacacttcccaaaacgtccccagccacagctgggatgccgatggaaaggcatctgccataaaagaaaagcaaaagataaaaagcccaaccgatgtggggatagagaggcggaagagcagtcaggcttgaggagctggcgcttgtaatgtttatccgtttaaacatttcgtcctcctggtacacgaagggaactgtctgcccaggagcctgagcctcaggctgttggagaagcatctgatgcctttttctttgctgggggtcttctacgtgaggttccttggcgttgtttaaggtcaactccaccaaatacagcaaccagctggggcttgaatgggtcgatgtgtgcgtgtgtccctgcgtgcatgcatgcatgcacacgtgcgtgcgtgtttgtgtttgcaagatcctctgacaatgatctgctttgtcccagggacgtggtagtgtattagctgaccaaccaagacaaggacacctggaaatagttagactcttccacttcccttcaggacctgtgaactcagatatgtaagtcagcttctcaggtggtcggacgtgagagcgaccacagtgaaggagccagcactcagggctctctgccttctatgtgggaatgaggtcttcccaacagactctccctcttccaaaagattgtgtatcagttgctccttctgggatttagagatggacagaaaagggtgtgcgatctatgctgtgagaactcccagccagcttagaagtgtcgagccatttgcacagaaagccactccttgagcgaggagaccaaatccctcctgaaatcctccatcgcgtccttctggggagaaaaacccttgatgtgctgagaaccatcatggggaccaggatagaaggcttcttcccactcaaagcttttctccctggagggtgggcactgctgggccatgccacttcaaagcagtgttcctcagcaggaaagcggaggtcaccacttaccggcctcctccaccttctcggcttctcttttctccatgaacccaggtcgtccagcaggtacttccaagttcccaggtctgtctgcctaagagccttttgaggagaccgtcctggagccccatcagtgcccagatcctggggtaccgaccattgctgtctagcagtgggggatcctgtggtgggaatggggtgggcttctcatccatgttgcttctgggaagagagggttgcctttctgggctagggaggtggctggagcttctgccctgaccctccgctagaaaccagttatatccattgccacagcaatactgtgtaacaaatccgccaacactcggtggcctgcaacagtcagcactgatctagggcaggagtcagcagtctgggcagggtgattcttctggtctaggctgggcttgtttgtttagggccagtgggttgttaagtcccaggggatgctcatggtgcagaggtcggacctggccctgctctgtggtctcttgcatccctcctgcaggccagccatggcacagccaaaggcacggagggagagacagcaagtgcctttccaagccttggtggacaccacacctgcagctctccccttggccacagcaagtcacgtggctgggctcagcattaaggggtgggggacaggcctgccactttattgtccgctctgcacagtcgggtggcagtaggctgagaatttggagggctaaacaactgggactctggagagtctgtgtcctaataatgcctgctttggagcactccttccccacccgcctgctccaggggaatagcgtccctggtcctagcatttcactagatacctcgtgcctttgaaccgctgtgtttgggagggaggaagaggatagacaggtccagggctcccctcacttgggaaggtcctagtagaaggcattccttctgagtctcctggccctacagcttctcacccctgctgctccccaagacctgacccggaccaatcagctgcatctctgcaccaagtgccacccccaccgtgcactgctcgcacctcacgctccccatgggctggcccggaccccagtgaggtctgcacctctcggaccagccaggacctcggaagccatgagctgggtgttcagggcttggcggaggagacgctgctccgcgggggatggagaagccccgcccctccacaactcccttaatctggatgcaattagaggaaaccagccaaaaaccccgcggcagctgttgccccgggattattcccagccagcgagaggcattagggcgataattcagtcattagacttctagccttcccaccgccagaacgtgcaaataggggataatcagccctgcacggccatcctcagcaatgctgcttatttaacccattttttaaaatgacacttaatgttattggctggcgtacgtgtgtgcgcatacttaaaagttgatgcgtggtgc

SEQ ID NO: 96528 - protein, 470 aa, Artificial Sequence
  derived and/or modified sequence
MPAPLLLISRTLGNFMVLWSTCRTTVFKSVTNRFIKNLACSGICASLVCVPFDIILSTSPHCCWWIYTMLFCKVVKFLHKVFCSVTILSFPAIALDRYYSVLYPLERKISDAKSRELVMYIWAHAVVASVPVFAVTNVADIYATSTCTEVWSNSLGHLVYVLVYNITTVIVPVVVVFLFLILIRRALSASQKKKVIIAALRTPQNTISIPYASQREAELHATLLSMVMVFILCSVPYATLVVYQTVLNVPDTSVFLLLTAVWLPKVSLLANPVLFLTVNKSVRKCLIGTLVQLHHRYSRRNVVSTGSGMAEASLEPSIRSGSQLLEMFHIGQQQIFKPTEDEEESEAKYIGSADFQAKEIFSTCLEGEQGPQFAPSAPPLSTVDSVSQVAPAAPVEPETFPDKYSLQFGFGPFELPPQWLSETRNSKKRLLPPLGNTPEELIQTKVPKVGRVERKMSRNNKVSIFPKVDS

SEQ ID NO: 96529 - DNA, 1755 bp, Artificial Sequence
  derived and/or modified sequence
cattctgatgcccgagtccaagtggcttttccagcgacacatctttggtctttgttctcagtgttgggggttgcgttgtgaggtgttgtctcttcatgagaaggcagtgtgacgtagtgatcacatcccaggctctggagttcaactgcttctgtctgaatgccagctccactgcttcttatttctagaactttgggaaacttcatggtgttatggtcaacttgccgcacaaccgtgttcaaatctgtcaccaacaggttcattaaaaacctggcctgctcggggatttgtgccagcctggtctgtgtgcccttcgacatcatcctcagcaccagtcctcactgttgctggtggatctacaccatgctcttctgcaaggtcgtcaaatttttgcacaaagtattctgctctgtgaccatcctcagcttccctgctattgctttggacaggtactactcagtcctctatccactggagaggaaaatatctgatgccaagtcccgtgaactggtgatgtacatctgggcccatgcagtggtggccagtgtccctgtgtttgcagtaaccaatgtggctgacatctatgccacgtccacctgcacggaagtctggagcaactccttgggccacctggtgtacgttctggtgtataacatcaccacggtcattgtgcctgtggtggtggtgttcctcttcttgatactgatccgacgggccctgagtgccagccagaagaagaaggtcatcatagcagcgctccggaccccacagaacaccatctctattccctatgcctcccagcgggaggccgagctgcacgccaccctgctctccatggtgatggtcttcatcttgtgtagcgtgccctatgccaccctggtcgtctaccagactgtgctcaatgtccctgacacttccgtcttcttgctgctcactgctgtttggctgcccaaagtctccctgctggcaaaccctgttctctttcttactgtgaacaaatctgtccgcaagtgcttgatagggaccctggtgcaactacaccaccggtacagtcgccgtaatgtggtcagtacagggagtggcatggctgaggccagcctggaacccagcatacgctcgggtagccagctcctggagatgttccacattgggcagcagcagatctttaagcccacagaggatgaggaagagagtgaggccaagtacattggctcagctgacttccaggccaaggagatatttagcacctgcctggagggagagcaggggccacagtttgcgccctctgccccacccctgagcacagtggactctgtatcccaggtggcaccggcagcccctgtggaacctgaaacattccctgataagtattccctgcagtttggctttgggccttttgagttgcctcctcagtggctctcagagacccgaaacagcaagaagcggctgcttccccccttgggcaacaccccagaagagctgatccagacaaaggtgcccaaggtaggcagggtggagcggaagatgagcagaaacaataaagtgagcatttttccaaaggtggattcctagcaaggattgtaaattcttggaagcaacggggagcttccatattcccaccagagtgtgggaatgctgtggccatgtgattgtatgatctccttgcaactcagtgtgagttgattcctccaatatgggccagatgcttttgaatgatagggaaatctacataaaatccagtgtcctctttattga

SEQ ID NO: 96530 - DNA, 1413 bp, Artificial Sequence
  derived and/or modified sequence
atgcctgctccactgctgttgatcagcaggactctgggaaacttcatggtcctctggagtacatgcagaaccacggtttttaaaagtgtgacaaatcggtttattaagaatcttgcctgttctgggatttgcgcctctcttgtgtgtgtgccgtttgacatcattctgtccacatctccccattgctgctggtggatctacacaatgcttttctgtaaagtggttaagtttctgcataaggttttttgcagtgtaaccattttgagcttcccggctattgcccttgaccgatattattctgttctgtaccccttggaacgcaaaataagtgatgcaaaatccagggagctggtcatgtacatctgggctcacgccgtggtggcttccgtccctgtattcgccgttactaatgttgctgacatctacgccacatcaacttgtactgaagtctggtcgaatagtctgggacatctggtgtatgttttggtttacaacattacgacagttatcgtgcccgtagtcgtggttttcctgtttctgattctcattcgaagggcgctcagcgcctcgcagaagaagaaagtaatcatagccgcactgagaaccccacagaacactatcagcatcccctatgcctcccaacgcgaagctgaactgcatgccacactgctgagcatggtgatggtcttcatcctctgttccgtcccttacgctacactggtggtttaccagacggtgctgaacgtccccgatacaagtgtcttccttctgctcactgctgtgtggctgcccaaagtctctctactcgcaaacccggtactgttcttaacagtaaacaaatccgtccgcaaatgcctgatcgggactctcgtgcagctccaccacagatatagcagaaggaacgtagtgagtacggggagtggcatggccgaagcgagtctagagcctagcattcgctctggatcccagctcctggaaatgtttcatatcggtcagcagcagatcttcaagcctaccgaggatgaagaggagtctgaggctaaatacatcgggtcagccgactttcaggccaaggagattttctccacttgcctagaaggcgagcaaggtcctcaattcgccccctcggcacctccactgtctactgtggatagtgtgagtcaagtggcaccagccgcccccgtggaacccgagacattcccggacaagtattcactgcagttcggatttggaccatttgagctgccaccgcagtggcttagcgaaactaggaacagtaagaagagactcctcccaccacttggcaatacaccggaggaactgatacagaccaaggtgcccaaggtgggaagagtggagcgtaaaatgtcacggaataataaagtgtctatctttcctaaggtggactcttag

SEQ ID NO: 96531 - DNA, 1413 bp, Artificial Sequence
  derived and/or modified sequence
atgcctgcccccctgctgctgatcagcaggaccctgggcaacttcatggtgctgtggagcacctgcaggaccaccgtcttcaagtctgtgaccaaccgcttcatcaagaacctggcctgcagcggcatctgtgccagcctggtgtgtgtgccctttgacatcatcctgagcaccagcccccactgctgctggtggatctacaccatgctgttctgcaaggtggtgaagttcctgcacaaggtgttctgcagcgtgaccatcctgtccttccctgccatcgccctggaccgctactacagcgtgctgtaccccctggagaggaagatcagtgatgccaagagccgggagctggtgatgtacatctgggcccatgctgtggtggcctctgtgcctgtgtttgctgtgaccaacgtggccgacatctatgccaccagcacctgcacagaggtgtggagcaacagcctgggccacctggtgtatgtgctggtgtacaacatcaccaccgtcatcgtgcctgtggtggtggtgttcctgttcctgatcctgatccggcgggccctgagcgccagccagaagaagaaggtgatcatcgccgccctgcggaccccccagaacaccatcagcatcccctatgccagccagcgggaggccgagctgcacgccaccctgctgtccatggtgatggtgttcatcctgtgcagcgtgccctatgccaccctggtggtgtaccagacagtgctgaatgtgcctgacacctctgtgttcctgctgctgacagctgtgtggctgcccaaggtgtccctgctggccaaccctgtgctcttcctgactgtgaacaagtctgtgaggaagtgcctgattggcaccctggtgcagctgcaccaccgctacagcagaagaaatgtggtgtccactggaagtggcatggccgaggccagcctggagcccagcatccgcagcggcagccagctgctggagatgttccacatcggccagcagcagatcttcaagcccacagaagatgaggaggagagcgaggccaagtacatcggcagcgctgacttccaggccaaggagatcttcagcacctgcctggagggggagcagggcccccagtttgcccccagcgccccacccctgagcacagtggacagcgtgtcccaggtggccccagctgcccctgtggagcctgagaccttcccagacaagtacagcctgcagtttggcttcggcccctttgagctgcccccccagtggctgtctgagaccaggaacagcaagaagaggctgctgccccccctgggcaacaccccagaggagctgatccagaccaaggtgcccaaggtgggccgggtggagaggaagatgagcaggaacaacaaggtgtccatcttccccaaggtggacagctag

SEQ ID NO: 96532 - DNA, 1413 bp, Artificial Sequence
  derived and/or modified sequence
atgcccgcccccctgctgctgatcagccggaccctgggcaacttcatggtgctgtggagtacatgccgcacaactgttttcaaatcggttactaatcgcttcattaagaatctggcctgcagcggcatttgcgccagcctggtgtgtgtgcctttcgatattatcctgtccactagccctcactgctgttggtggatctacaccatgttattctgcaaggtcgtgaaattcctgcacaaagttttctgtagcgtaacaattctgtccttccccgctatcgccctcgaccgctattacagcgtgctctatcccctggagcggaaaatctctgatgccaagtcccgggagctggttatgtacatctgggcccacgccgtggtggcaagcgtgccagtttttgcagtcaccaacgtggcggacatttacgccactagcacatgcaccgaggtctggtctaattccctgggacacctcgtgtatgtgttagtctataacatcaccacagtgatcgtgcctgtggtggtggtctttctgtttctgattctgataaggagagcgctgtctgcctcacaaaaaaaaaaggtaattatagccgcactgcggaccccccagaacacaatttcaatcccgtatgcaagtcagcgggaggccgagctgcatgcaacacttctttccatggtaatggtatttatcctgtgtagcgtcccctacgccaccctggtggtgtaccaaaccgtcctgaatgtccccgatacctctgttttcttgttgcttactgcggtttggctgcctaaggtcagtctgctggctaatcctgttctgtttttgaccgttaacaaatcagttcgcaagtgcttgataggtacactggttcagctacaccacagatattctaggcggaatgtggtgagcaccgggagcggcatggcagaagcaagcctggagccttccataaggtccggttctcagctgcttgaaatgttccatatcggtcagcagcaaatcttcaagcccactgaggacgaggaagaaagcgaggccaaatatatcgggagcgcagatttccaggccaaagagattttttcgacttgtttggagggtgagcaaggacctcagttcgccccttcagcaccacccctgtctacggtggattctgtgagtcaggtcgcaccggctgcgccagtggaacctgaaacttttcccgacaagtatagcctccagttcggattcgggccctttgagctgccgccccagtggcttagtgagacccgtaacagtaaaaagcggctcctacccccattaggcaatacccccgaggagctgatccagaccaaggtccctaaggttgggagggtcgagcgtaaaatgtctaggaacaacaaagtgtcaatcttccccaaggtcgacagctag

SEQ ID NO: 96533 - DNA, 1413 bp, Artificial Sequence
  derived and/or modified sequence
atgcctgcgcctctcctgttaataagtcggactctagggaactttatggtgctgtggagtacctgtaggaccactgtgtttaaaagcgttactaaccggtttatcaaaaacctggcgtgctccggaatttgcgcctcactggtgtgtgttccttttgatatcatcctgagcacatccccacattgctgttggtggatttataccatgttgttttgtaaagtggtcaagttcttgcacaaagtgttctgttccgtcaccatactgagttttcctgcgatagccttggacagatactactcagttttgtatcccctggagcgcaagatttccgacgctaaatctcgggagctcgtgatgtatatctgggcgcacgccgtcgtcgcttctgtgcccgtcttcgcagtgaccaatgtggccgatatctacgccacatcaacctgtaccgaggtgtggtcaaattctctgggtcatctggtctacgttctggtgtataatataactacagtcatcgtaccagtcgtggtggttttcctcttcctcatcctgatacgtcgcgctctcagtgcctcgcaaaagaagaaagtgattatcgctgcattgcgtacaccgcagaacaccatttctatcccctacgcgtcccagcgcgaagctgaattgcacgccactcttctcagcatggtgatggtgtttatcctttgctctgtgccatacgccacacttgtagtgtaccagactgtgctcaatgtacctgatacgagcgtattcttgttgctgaccgctgtctggctgcccaaggtctctttactagcaaacccggtgctgttcttgacagttaataaaagtgtgaggaagtgtctgattggcacgctggttcagctacatcatcgatattcaagaaggaacgtggtatcgacggggtcggggatggcggaggcttctctagagccatccattcggagcgggagccagttgctggagatgtttcacatcggccagcagcaaatatttaagccgactgaggatgaagaggagtctgaggccaagtatatcggtagtgccgactttcaagctaaagagatattctctacttgcctcgaaggcgagcaggggccacagtttgctccctctgccccaccgctatcgaccgtagactccgtgtcacaggtagcaccagccgctcctgtcgaaccggagacgttcccagataaatacagcctgcaatttggcttcggaccttttgagctgccccctcagtggctgagtgaaacccggaatagcaagaagagactcctgccaccccttggcaatacccccgaagaattaatccaaacaaaagtgccaaaagtgggacgggtcgaacgcaagatgtccagaaacaataaggtaagcatcttccccaaggtggacagctag

SEQ ID NO: 96534 - DNA, 1413 bp, Artificial Sequence
  derived and/or modified sequence
atgcccgcccccctgctgctgatcagcagaaccctgggcaacttcatggtgctgtggagcacctgcagaaccaccgtgttcaagagcgtgaccaacagattcatcaagaacctggcctgcagcggcatctgcgccagcctggtgtgcgtgcccttcgacatcatcctgagcaccagcccccactgctgctggtggatctacaccatgctgttctgcaaggtggtgaagttcctgcacaaggtgttctgcagcgtgaccatcctgagcttccccgccatcgccctggacagatactacagcgtgctgtaccccctggagagaaagatcagcgacgccaagagcagagagctggtgatgtacatctgggcccacgccgtggtggccagcgtgcccgtgttcgccgtgaccaacgtggccgacatctacgccaccagcacctgcaccgaggtgtggagcaacagcctgggccacctggtgtacgtgctggtgtacaacatcaccaccgtgatcgtgcccgtggtggtggtgttcctgttcctgatcctgatcagaagagccctgagcgccagccagaagaagaaggtgatcatcgccgccctgagaaccccccagaacaccatcagcatcccctacgccagccagagagaggccgagctgcacgccaccctgctgagcatggtgatggtgttcatcctgtgcagcgtgccctacgccaccctggtggtgtaccagaccgtgctgaacgtgcccgacaccagcgtgttcctgctgctgaccgccgtgtggctgcccaaggtgagcctgctggccaaccccgtgctgttcctgaccgtgaacaagagcgtgagaaagtgcctgatcggcaccctggtgcagctgcaccacagatacagcagaagaaacgtggtgagcaccggcagcggcatggccgaggccagcctggagcccagcatcagaagcggcagccagctgctggagatgttccacatcggccagcagcagatcttcaagcccaccgaggacgaggaggagagcgaggccaagtacatcggcagcgccgacttccaggccaaggagatcttcagcacctgcctggagggcgagcagggcccccagttcgcccccagcgccccccccctgagcaccgtggacagcgtgagccaggtggcccccgccgcccccgtggagcccgagaccttccccgacaagtacagcctgcagttcggcttcggccccttcgagctgcccccccagtggctgagcgagaccagaaacagcaagaagagactgctgccccccctgggcaacacccccgaggagctgatccagaccaaggtgcccaaggtgggcagagtggagagaaagatgagcagaaacaacaaggtgagcatcttccccaaggtggacagctag

SEQ ID NO: 96535 - protein, 252 aa, Artificial Sequence
  derived and/or modified sequence
MTLLPSKGGDTIASVNGLNVEGIRHREIVDIIKASGNVLRLETLYGTSIRKAELEARLQYLKQTLYEKWGEYRSLMVQEQRLVHGLVVKDPSIYDTLESVRSCLYGAGLLPGSLPFGPLLAVPGRPRGGARRARGDADDAVYHTCFFGDSEPPALPPPPPPARAFGPGPAETPAVGPGPGPRAALSRSASVRCAGPGGGGGGGAPGALWTEAREQALCGPGLRKTKYRSFRRRLLKFIPGLNRSLEEEESQL

SEQ ID NO: 96536 - DNA, 759 bp, Artificial Sequence
  derived and/or modified sequence
atgacactgttaccctctaagggtggcgataccatagcctccgtgaacggactaaacgtggagggcatacgccatagagaaattgtggacattatcaaagcaagcggtaatgtgctcaggctggaaaccctttacggtacttccatcagaaaagcagaactcgaagctcgcttgcaatatcttaaacagacactttacgagaaatggggagagtacagatccctgatggttcaggaacaacgtttagtgcacggactggtcgtgaaggaccctagcatctacgacactctggagagcgtgagatcttgtctgtacggtgctggattacttcccgggtctcttccttttgggcctctattagccgtgccaggacggcctaggggaggagctaggcgagcccggggggatgctgacgatgcagtctaccacacgtgtttctttggcgatagcgagccaccagcgctccctcctcccccacccccagctcgcgcattcggcccaggaccggcggagacgcctgcggttggaccagggcctggtccccgcgcagccttgtccagaagcgctagcgtgcgatgcgccgggcccggaggcggtggcggtggcggagcccccggagccttgtggacggaagctcgggagcaagcactctgtggacctgggcttaggaagacgaagtaccgctcttttaggcgcaggctcttgaagtttattccaggccttaataggagcttggaggaagaggaatcccaactatag

SEQ ID NO: 96537 - DNA, 759 bp, Artificial Sequence
  derived and/or modified sequence
atgacactcctcccatcaaagggcggagatacaatcgcgtcagtaaatggattgaatgtggagggaatccggcaccgcgaaatagtggacattataaaggcttcgggaaacgtactgaggctggagactctttacggaacgtcgataagaaaagcagaattggaggccagactacaatatctgaagcagaccctttatgagaaatggggagagtatagatcattgatggtgcaggagcagagacttgtccacggcttggtagtgaaggacccaagcatctacgacacattagaatcagtccgtagttgtctgtacggagccggccttctgcccggctctctgccgttcgggccactccttgctgtaccaggccggccaagaggcggcgccaggagggcacggggtgatgctgacgacgcagtgtaccatacttgcttctttggagactccgagccacccgctctccctccacccccaccgcctgcacgcgcttttggacctggtcctgccgagacgccagcagtcggtcccggtccaggaccccgcgccgctctttcgcgaagtgcctccgtcagatgcgccggacccgggggcgggggcggcggtggtgctcccggcgcactgtggaccgaggccagagagcaggcgctatgcgggccggggttacggaagaccaaataccgcagtttccgtagacggttgctcaagtttattccaggcttgaatcggtctttggaggaggaagagtcccagctgtag

SEQ ID NO: 96538 - DNA, 1424 bp, Artificial Sequence
  derived and/or modified sequence
atgaccttactcccaagcaaagggggggacaccatcgccagcgtcaatggcctgaatgtggaaggcatccggcatcgagagattgtggacatcattaaggcgtcaggcaatgttctcagactggaaactctatatgggacatcaattcggaaggcagaactggaggctcgtctgcagtacctgaagcaaaccctgtatgagaagtggggagagtacaggtccctaatggtgcaggagcagcggctggtgcatggcctggtggtgaaggaccccagcatctacgacacgctggagtcggtgcgctcctgcctctacggcgcgggcctgctcccgggctcgctgcccttcgggcctctgctcgccgtgcccgggcgtccccgcggaggcgcccgacgggccaggggcgacgccgacgacgccgtctaccacacgtgcttcttcggggactccgagccgccggcgctgccgcccccgccgcccccggcccgcgccttcggcccgggccccgccgagacccctgccgtggggccgggccctgggccgcgggccgcgctgagccgcagcgccagtgtgcggtgcgcgggccctggcgggggcggaggcgggggcgcgccgggcgcgctctggactgaggctcgcgagcaggccctatgcggccccggcctgcgcaaaaccaagtaccgcagcttccgccggcggctgctcaagttcatccccggactcaaccgctccctggaggaggaggagagccagctgtaggggcgggggcgggcagggaggtatttatttatttattcgcaacagccagcgctaaaagagggggaggccgagccaagaggaccccaggagcccagagcagcgggagagggtccttcctagcctcggcccgccgggtcggttcctggctggtgtctgctgagggagtggggggcccagccccttctcttctcccccgccaaaccacagtgggagctggggcagggggagagccaggcaatcgggggccaaagatgggggtgctcgcctacagtctgcatctgtagtgccttgtggggtatccaggaacaccctcccagcaggggatgggaaccctgtcccatgaagccctctcctcagctttacttgctcccccgcccttagccttggggagaaatggcccgtggtgggctgaccccccaccctccacacacacagttccatgacccagcgggcccccaggggcatcaggtgctggtcctcctccctcctggcctcgacccctaagggcttcgcccctcccaggggcctgtaactaagtcgggtcctgccaggcagggggcctgtgttctgtgccccttgggagacaggaactggcgagttcaggtggggtggggacagcacagactgttccaccgttgtgcatattgttgcttctgaaccacaaa

SEQ ID NO: 96539 - DNA, 759 bp, Artificial Sequence
  derived and/or modified sequence
atgaccctgctgcccagcaaaggaggagacaccatcgcctctgtgaatggcctgaatgtggagggcatccgccaccgggagatcgtggacatcatcaaggccagcggaaatgtgctgcggctggagaccctgtatggcaccagcatcaggaaggccgagctggaggcccggctgcagtacctgaagcagaccctgtatgagaagtggggcgagtaccgcagcctgatggtgcaggagcagaggctggtgcacggcctggtggtgaaggaccccagcatctatgacaccctggagagcgtgcgcagctgcctgtatggagctggcctgctgcccggcagcctgcccttcggccccctgctggccgtgcccggccggccccggggcggggcccggcgggcccggggagatgctgatgatgctgtgtaccacacctgcttctttggagacagcgagcccccagccctgcccccacctcctcctccagcccgggcctttggacctggccctgctgagaccccagctgtgggccctggccctggccccagggctgccctgagccgcagcgcctctgtgcgctgtgccggccctgggggcggcggcggcggcggggcccctggggccctgtggacagaggcccgggagcaggccctgtgtggccctggcctgaggaagaccaagtaccgctccttcagaagaaggctgctgaagttcatccctggcctgaacagaagcctggaggaggaggagagccagctgtag

SEQ ID NO: 96540 - DNA, 759 bp, Artificial Sequence
  derived and/or modified sequence
atgaccctgctgcccagcaagggcggcgacaccatcgccagcgtgaacggcctgaacgtggagggcataagacacagggagatagtagatatcattaaagctagcggaaatgttctgaggcttgaaaccctgtatgggacatccatccggaaggccgagctggaggccaggctacagtatcttaaacagaccctgtacgagaaatggggggaatacagatctctgatggtacaggagcagcgcctggtccacggcctcgtcgttaaagatccgtccatttatgatactcttgaatctgtccgctcctgcctgtacggagcagggcttctacccggttcactaccttttggtcctctgttagcagtgcccggccgcccccggggcggggctcgccgcgcccgaggtgatgcggatgacgctgtctatcatacttgcttctttggcgattcagaacctcccgctctcccaccccccccacctccagctagggcttttggaccaggtcctgccgaaacccctgccgtgggtccaggccctggcccacgcgcagccctatctcggtcggccagtgtaagatgcgctggccccggtgggggtgggggagggggcgctccaggagcactttggactgaagctcgcgaacaagctctgtgcggccctggtctacgcaagacgaagtatcggagttttcgccgcaggctgctgaaatttattcccggcctgaacagatcactagaagaagaggagtctcaactctag

SEQ ID NO: 96541 - DNA, 759 bp, Artificial Sequence
  derived and/or modified sequence
atgaccctgctgcccagcaagggcggcgacaccatcgccagcgtgaatggtctgaatgtggaagggattcgtcaccgcgaaatcgttgacatcatcaaggccagcggcaacgtgttgaggttggaaactctgtacggaacttccattaggaaggctgagttggaggctagactgcaatatttgaaacaaactttgtatgagaaatggggagaatatcgctctctcatggtacaggagcagaggctcgtccacgggctggtcgttaaggacccaagtatctatgataccctcgagtcagtccgcagctgcttatatggagccgggcttctccctgggtcactccccttcggccccctgctggctgtgcccggtcgacctagaggcggcgccagacgagccagaggcgacgccgacgatgcggtttatcacacatgcttttttggagattctgaaccccccgcactgcctccacctcctccaccggcgagagcatttggtcctggtcctgccgaaacccccgccgtcggcccggggcccgggcccagggctgccctatctcgctccgccagcgtgaggtgcgccggccccggtgggggtggagggggaggggcaccgggggccctgtggacagaggcccgcgaacaggctctgtgtggacctggtttacgcaagacaaagtatcgttccttccgacggcgcctgctgaagttcataccaggtctcaatcgtagtctggaagaggaggaatcacagctctag

SEQ ID NO: 96542 - DNA, 759 bp, Artificial Sequence
  derived and/or modified sequence
atgaccttgctgcctagcaaaggcggagatacaatcgcctctgttaacggcctgaatgtcgagggaatccggcaccgggagatcgttgatatcattaaagcgtcagggaatgtcctgaggctggaaaccctgtacggcacttcaatcagaaaggccgaacttgaagccagacttcagtatctcaaacagaccttgtatgaaaagtggggagaatatcggtccctcatggtgcaggagcagagactggtgcatggcctagttgtgaaagatccaagcatctatgacactctagaatctgtgagatcatgcttatacggggctggcttgctccctggaagtctgcctttcgggccactgctggcggtccccggacggccacgcggaggagctcggagggcccgaggagatgcagacgacgcagtgtatcatacatgcttttttggggacagcgaacctcccgctctcccccctccccctcctccagccagggccttcggccctgggcctgctgagaccccggcagtagggccaggtccagggcctagagcggctttgagcagatccgctagcgtgaggtgtgccggtccaggcggagggggaggaggaggggcacctggggcattatggacagaggcacgagaacaagctctgtgtggcccaggcttgaggaagacgaagtaccgttctttcaggagaagattgctgaagttcatacctggactcaaccggagtttggaagaagaggagtcccagctgtag

SEQ ID NO: 96543 - DNA, 759 bp, Artificial Sequence
  derived and/or modified sequence
atgacactgttgccatcgaagggaggggatactatcgccagcgtcaatggtctgaacgtggagggaatcagacatagggagatcgtcgatataatcaaggcaagcggcaacgtactgagactggaaaccctgtatgggacttcgatccgaaaagctgagctcgaagccaggttgcagtaccttaaacagacgctctacgagaagtggggggagtaccgtagtcttatggtacaggagcaacggctggtccacggactggtggtgaaggatcccagcatatatgacacactcgaaagcgtccggagctgcctctacggcgctggactcctgcccggatctctaccttttggtcccctgctcgctgtccctggcaggccccgtggaggcgcacggagggcacgaggggacgccgatgacgccgtctaccatacctgtttctttggcgacagtgaaccacccgcactcccgcctccgccaccacccgctcgcgcttttggacccggtccagctgaaactcctgccgttgggccaggtcccggaccaagggcggctctcagccgctccgcttcagttcgttgcgccggacctggaggcggaggcggtggcggagcacccggtgctctttggacagaggctcgcgaacaagcgctctgtggacccggtcttcgcaagaccaagtatcggtctttccgacgcagacttctgaagttcatccctggtcttaacaggagcctggaggaggaggagagtcagctgtag

SEQ ID NO: 96544 - DNA, 759 bp, Artificial Sequence
  derived and/or modified sequence
atgaccctgctgcccagcaagggcggcgacaccatcgccagcgtgaacggcctgaacgtggagggcatcagacacagagagatcgtggacatcatcaaggccagcggcaacgtgctgagactggagaccctgtacggcaccagcatcagaaaggccgagctggaggccagactgcagtacctgaagcagaccctgtacgagaagtggggcgagtacagaagcctgatggtgcaggagcagagactggtgcacggcctggtggtgaaggaccccagcatctacgacaccctggagagcgtgagaagctgcctgtacggcgccggcctgctgcccggcagcctgcccttcggccccctgctggccgtgcccggcagacccagaggcggcgccagaagagccagaggcgacgccgacgacgccgtgtaccacacctgcttcttcggcgacagcgagccccccgccctgccccccccccccccccccgccagagccttcggccccggccccgccgagacccccgccgtgggccccggccccggccccagagccgccctgagcagaagcgccagcgtgagatgcgccggccccggcggcggcggcggcggcggcgcccccggcgccctgtggaccgaggccagagagcaggccctgtgcggccccggcctgagaaagaccaagtacagaagcttcagaagaagactgctgaagttcatccccggcctgaacagaagcctggaggaggaggagagccagctgtag

SEQ ID NO: 96545 - DNA, 1921 bp, Artificial Sequence
  derived and/or modified sequence
acgtgatagcgctgggcgactccgcggagctgcacggccatggacgtgggcgccgacgagttcgaggagagcctccctctgctgcaggagctcgtccaggaggccgacttcgtggaggtgagcgcgggtgccttggccgcctgcagatctacagtgtgaggagtgctggcgatgttctgcacccgaggactgctattttttgccttcctggcaggtctggacatagagttcacgggccttcgttctaacctgtctgggccccagcagatcagtctttttgatttgccatcggagtggtatctaaagacccgtcagagtgttcagcaatttacagtctgtcagattggattgtctgtgttttccgctattgaaggagaggcaaacaagtatatagcccattcttgtaacttctatctcttccctacaacgtttgggattttggactcagaattctccttccaggcttccagtgttcagtttttgaatcagtatggcttcaactataacaagtttctcaaaaacggaatcccatatatgaatgaagaacaggagaagaaaattagacacgatatcctgactgggaactggagagttcgcagctctccggataaagaccaaatcaaggtggtgattgacgaagtgacgcggtggctggagctggccaaggaaggcgactggatgactcttcctgggatcactggcttccaggcctttgaggtccaactggtgctgaggcaggccctccccaacatctggacggtgctgaaagatgagggggtggtagtgaagaaagtgagtaaacaacatcgttggtatcttcagaacacctcttgtgaccgagagagctgttggaaggaaaatattcttctctcagcaaggggtttttctgtctttttccaaatgctggtgaaagcccagaagcccttagtgggacataatatgatgatggacctgctgcacctccatgagaagttcttcagacccctcccagaaagctacgatcaatttaagcagaatatccacagcctatttcctgttctcattgataccaagagtgtaacaaaggatatctggaaggagatgaatttcccgagggtgtcgaatctttcggaagtctatgaagtcctgaacagtgacttgaatcccaccaagaattctggaccagagattgttcacgcgagcaggtgtgagaaatatgttgagacaaagtgcccccacgaagccgcgtatgatgccttcctctgtgggtcagttcttttgaaagtggcacacttgcttctacagaagatataccacatcgaccccgtgcccgagtcatcctttcctcagtaccttgacgtgctggctccttacgtgaaccaagtgaacctcatccgagcgggggtcccaaagatcaatttttctggtccagattatcccagtatccgacctcccatcctcatcctcagcgtcaaaaggtggcctggggtcagcgagcagcaagtctaccataagtttcagaatctctgcaagtttgatgtcaggcgactcacaagaagccagttcttactcctgaccaataagtttaaggatgcgcggaacatcctgaaggagtaccgggaccacccgaccctgtgcatctccctgtaccgctactggaggcactccccaaacgtcaactgcctgctccaagtctgtggcatagtgactgcctgggcccttctcgcgttcatccttggaagatctggtacctgagtgcagcgaggcctcctgcggccaccctcgggtccccatgctctctgggaggtgtgctgggtgtgttcgtgtaaatcagattctgtttgcagatggatctgtttggtcttttctagaaattctgttatgtcctgaacgtgaaattctgtcaacactctcaatgataaatcagtccttagatatcgta

SEQ ID NO: 96546 - DNA, 777 bp, Artificial Sequence
  derived and/or modified sequence
atgaatcggtccaacaagttggcagttattgcttcccatatccaggaatccaggtttctgtatccgggtaagaatgggcggctcggcgattttttcggtgatccggggaatccacccgaatttaacccttccggctctaaagacggcaaatacgaactgctgacatctgctaacgaagtcattgttgaggagattaaagatctaatgacaaaatccgatatcaaaggccagcacaccgagactctactcgcaggctcccttgcaaaggcactgtgttatattcaccgcatgaacaaagaggtgaaagacaatcaggagatgaagtctcggattctggtcatcaaggccgccgaggattcggcgttgcaatacatgaactttatgaatgtcatcttcgcagcccagaagcagaatatattaatcgatgcttgtgtcctcgattctgattctggcctccttcaacaagcttgtgacatcacaggcgggttgtacttaaaagtaccccagatgccctcactcctccagtatctgttgtgggtgtttctgcctgaccaagaccagcgatctcaactgatcctgccgcccccagtgcatgtagattaccgcgctgcctgtttctgtcatagaaacctcattgaaatcggttatgtatgctccgtgtgtctctcaatcttctgcaacttctcaccgatatgcactacttgtgagaccgctttcaagattagcctcccccctgtgcttaaagcgaagaaaaagaagctgaaggttagcgcctag

SEQ ID NO: 96547 - DNA, 777 bp, Artificial Sequence
  derived and/or modified sequence
atgaacagaagcaacaagctggccgtcatcgccagccacatccaggagagccgcttcctgtacccaggcaagaatggccgcctgggggacttcttcggggaccccggcaaccccccagagttcaaccccagcggcagcaaggatggcaagtatgagctgctgaccagcgccaatgaggtgattgtggaggagatcaaggacctgatgaccaagagtgacatcaagggccagcacacagagaccctgctggccggcagcctggccaaggccctgtgctacatccacaggatgaacaaggaggtgaaggacaaccaggagatgaagagccgcatcctggtgatcaaggctgctgaggacagcgccctgcagtacatgaacttcatgaatgtcatctttgctgcccagaagcagaacatcctgattgatgcctgtgtgctggacagcgacagcggcctgctgcagcaggcctgtgacatcaccggcggcctgtacctgaaggtgccccagatgcccagcctgctgcagtacctgctgtgggtgttcctgcctgaccaggaccagaggagccagctgatcctgcccccacctgtgcacgtggactacagagctgcctgcttctgccacaggaacctgattgagatcggctacgtgtgcagcgtgtgcctgagcatcttctgcaacttcagccccatctgcaccacctgtgaaacagccttcaagatcagcctgccccctgtgctgaaggccaagaagaagaagctgaaggtgtctgcctag

SEQ ID NO: 96548 - DNA, 777 bp, Artificial Sequence
  derived and/or modified sequence
atgaaccggagcaacaagctggccgtgatcgccagccacatccaggagtccaggtttctgtacccgggaaaaaacggccggttgggggacttcttcggggatcccgggaaccccccagagttcaatccttcagggtctaaggatgggaagtacgaactgcttacttcagccaacgaggtcattgtggaagaaattaaagacttaatgaccaaatctgacatcaaggggcagcatacagaaacgctactcgctggaagcctggctaaagccctgtgctatatccatcgcatgaacaaagaggttaaagataaccaagagatgaagtcaagaattctggtgataaaggccgcggaggactctgcgctacagtacatgaatttcatgaatgtgatctttgcggcacagaaacaaaatatcctgattgacgcctgtgtcctagactcggacagtggactactgcagcaggcctgtgacatcactgggggcctgtatcttaaagttccacagatgcccagcctgctgcagtacttgctgtgggtctttctgcccgaccaagaccaaaggtcgcaattgatcttaccgccgccagtgcatgtggattatcgggccgcctgtttttgccatcgaaacttgatcgagatcggatatgtctgctccgtttgcctgtcgatcttttgtaacttcagtcccatttgcaccacatgcgaaaccgccttcaagataagtctgcctcctgtgcttaaagctaaaaaaaaaaagttaaaagtttcagcctag

SEQ ID NO: 96549 - DNA, 777 bp, Artificial Sequence
  derived and/or modified sequence
atgaatcggagcaacaagttggctgtgatcgccagccacattcaggagtcgcggttcctgtatcccggtaaaaatggacgcctcggtgatttctttggcgatccaggcaacccgccagaatttaaccctagcgggtcaaaagacggaaagtacgaattgctcacatccgcaaatgaggtaattgtagaggagattaaagatttgatgaccaaatctgatatcaaaggacagcataccgagactctcctcgcgggatcgcttgcgaaggccctttgttatattcacaggatgaataaagaggtcaaagataaccaggagatgaaatcacggattctggtgatcaaagctgccgaagactcggctctgcagtatatgaacttcatgaatgtgatcttcgccgcacagaaacagaacatcttgatagacgcatgtgttctggacagtgactccggtctgctccagcaggcctgcgatattacaggagggctctatctaaaggttcctcagatgccgtctctgcttcaatacctgttatgggtattcctgcccgaccaggaccaaagatctcagttgatactgcctcccccagtacacgtcgattacagggccgcttgcttctgccatagaaacttgatagagatcggctacgtgtgtagcgtctgcctctcaattttttgcaacttcagcccaatatgcaccacctgtgagacggcctttaagatctccttgccgccagtacttaaggccaaaaaaaagaagcttaaggtgtctgcgtag

SEQ ID NO: 96550 - DNA, 777 bp, Artificial Sequence
  derived and/or modified sequence
atgaacagaagcaacaagctggccgtgatcgccagccacatccaggagagcagattcctgtaccccggcaagaacggcagactgggcgacttcttcggcgaccccggcaacccccccgagttcaaccccagcggcagcaaggacggcaagtacgagctgctgaccagcgccaacgaggtgatcgtggaggagatcaaggacctgatgaccaagagcgacatcaagggccagcacaccgagaccctgctggccggcagcctggccaaggccctgtgctacatccacagaatgaacaaggaggtgaaggacaaccaggagatgaagagcagaatcctggtgatcaaggccgccgaggacagcgccctgcagtacatgaacttcatgaacgtgatcttcgccgcccagaagcagaacatcctgatcgacgcctgcgtgctggacagcgacagcggcctgctgcagcaggcctgcgacatcaccggcggcctgtacctgaaggtgccccagatgcccagcctgctgcagtacctgctgtgggtgttcctgcccgaccaggaccagagaagccagctgatcctgcccccccccgtgcacgtggactacagagccgcctgcttctgccacagaaacctgatcgagatcggctacgtgtgcagcgtgtgcctgagcatcttctgcaacttcagccccatctgcaccacctgcgagaccgccttcaagatcagcctgccccccgtgctgaaggccaagaagaagaagctgaaggtgagcgcctag

SEQ ID NO: 96551 - DNA, 804 bp, Artificial Sequence
  derived and/or modified sequence
atggtgctgggcaacagccacctgttcatgaacagaagcaacaagctggccgtgatcgccagccacatccaggagagcagattcctgtaccccggcaagaacggcagactgggcgacttcttcggcgaccccggcaacccccccgagttcaaccccagcggcagcaaggacggcaagtacgagctgctgaccagcgccaacgaggtgatcgtggaggagatcaaggacctgatgaccaagagcgacatcaagggccagcacaccgagaccctgctggccggcagcctggccaaggccctgtgctacatccacagaatgaacaaggaggtgaaggacaaccaggagatgaagagcagaatcctggtgatcaaggccgccgaggacagcgccctgcagtacatgaacttcatgaacgtgatcttcgccgcccagaagcagaacatcctgatcgacgcctgcgtgctggacagcgacagcggcctgctgcagcaggcctgcgacatcaccggcggcctgtacctgaaggtgccccagatgcccagcctgctgcagtacctgctgtgggtgttcctgcccgaccaggaccagagaagccagctgatcctgcccccccccgtgcacgtggactacagagccgcctgcttctgccacagaaacctgatcgagatcggctacgtgtgcagcgtgtgcctgagcatcttctgcaacttcagccccatctgcaccacctgcgagaccgccttcaagatcagcctgccccccgtgctgaaggccaagaagaagaagctgaaggtgagcgcctag

SEQ ID NO: 96552 - DNA, 804 bp, Artificial Sequence
  derived and/or modified sequence
atggtgctcgggaactctcatttgtttatgaaccgttccaataagctggcggtcattgccagccatattcaagagagtagattcctctaccccggaaaaaatggtagattgggcgattttttcggggaccccgggaaccctcctgagtttaacccatccggatcgaaggacggtaagtatgagctactgacctccgcgaacgaagttattgtcgaggagattaaagatctgatgaccaagagtgacatcaaggggcaacacactgagaccctgttggcaggctctctcgcgaaagctctgtgttacattcaccgcatgaacaaagaggtaaaggacaaccaggagatgaagtccaggatcctagtcattaaggccgccgaagattcagccctacagtatatgaactttatgaatgtaatcttcgctgcgcaaaaacagaatatacttattgatgcatgcgttctggacagcgatagtggactgctgcagcaggcatgcgacatcacgggcgggctatacttgaaggtgccccagatgccatccctgctgcaatacttgctgtgggtattccttcctgaccaagaccaaaggtcccagctgattttacctccccccgtccacgtggactacagggctgcctgtttctgtcataggaacttgatagagatcggttacgtgtgcagcgtatgcctaagtattttctgcaacttcagtcctatttgtactacttgcgagaccgcatttaaaatctccctgcctcccgtcttgaaagccaagaaaaagaaactaaaggtgagcgcttag

SEQ ID NO: 96553 - DNA, 804 bp, Artificial Sequence
  derived and/or modified sequence
atggtgctgggcaacagccacctgttcatgaacagaagcaacaagctggccgtgattgccagccacatccaggagagccgcttcctgtacccaggcaagaatggccgcctgggggacttctttggagaccccggcaaccccccagagttcaaccccagcggcagcaaggatggcaagtatgagctgctgaccagcgccaatgaagtcatcgtggaggagatcaaggacctgatgaccaagagtgacatcaagggccagcacacagagaccctgctggccggcagcctggccaaggccctgtgctacatccacaggatgaacaaggaggtgaaggacaaccaggagatgaagagccgcatcctggtgatcaaggccgcagaagattctgccctgcagtacatgaacttcatgaatgtcatctttgctgcccagaagcagaacatcctgattgatgcctgtgtgctggacagcgacagcggcctgctgcagcaggcctgtgacatcactggaggcctgtacctgaaggtgccccagatgcccagcctgctgcagtacctgctgtgggtgttcctgcctgaccaggaccagaggagccagctgatcctgcccccacctgtgcacgtggactaccgggccgcctgcttctgccacaggaacctgattgaaattggctacgtgtgcagcgtgtgcctgagcatcttctgcaacttcagccccatctgcaccacctgtgaaacagccttcaagatcagcctgccccctgtgctgaaggccaagaagaagaagctgaaggtgtctgcctag

SEQ ID NO: 96554 - DNA, 804 bp, Artificial Sequence
  derived and/or modified sequence
atggtgctgggcaacagccacctgttcatgaaccggagcaacaagttggcagtaatagcatcccatatacaggagtcccggttcctctacccgggaaagaacgggcgactgggcgatttcttcggggaccctggaaatcccccagagtttaacccaagtggctccaaggatggtaaatatgagctcctcactagcgccaacgaggtgatcgtcgaggagattaaggacctgatgaccaaatccgatattaagggtcagcatacggaaaccttactcgccgggtcattggcaaaggccctttgctacattcaccgaatgaataaagaagtaaaagacaatcaggagatgaagagcaggatcctcgtcataaaggctgctgaggactctgcacttcaatacatgaacttcatgaacgtgatcttcgctgcccagaaacagaatattctgatcgacgcttgcgtcctggactccgactcaggactacttcagcaagcttgcgatattacaggaggattgtacctgaaagtgccgcagatgccatcgttactgcagtacttgctgtgggtgttcctgcctgaccaagaccagcgctctcagttaatcctgcccccgcctgtccatgtcgattatcgggctgcgtgcttctgccatcgaaatctgatcgagatcggatatgtctgctccgtttgcttgagcattttttgtaacttttccccaatttgtactacctgcgagacagccttcaagatttctcttcctcccgtactcaaagcgaagaagaaaaaacttaaggtttctgcatag

SEQ ID NO: 96555 - DNA, 804 bp, Artificial Sequence
  derived and/or modified sequence
atggtgctcgggaactcccaccttttcatgaaccgatcaaacaagctggcggtcatcgcctcccatatacaggagagccggttcctgtacccaggtaagaatggacgcctgggtgatttttttggagatcctgggaacccacctgaattcaacccgtcagggtctaaggacggaaagtacgaattgctcacctcagccaacgaggtcatcgtcgaggaaattaaggatctgatgaccaaatctgacataaaggggcagcacaccgagactctgctggcaggctctctcgctaaggcactgtgctacatacatcgtatgaacaaagaggtaaaagacaatcaagaaatgaaatcacgaatcctggtaataaaagccgcagaggattctgcattacaatatatgaacttcatgaacgttatattcgccgctcagaagcagaacatactgatcgatgcctgcgtgttggattccgatagtggactgctccaacaggcctgtgacataaccggcggtctctaccttaaggtgccacagatgcctagcctcttacagtacctgctttgggtctttctgccggaccaggatcagagaagtcaattaatcctgcccccacctgtgcacgtcgattaccgcgcagcatgtttttgtcataggaacctgatcgagattggctacgtctgttccgtttgcctttctatcttttgtaacttttccccaatttgcactacctgcgagacagcattcaagatctccctgccacccgttctaaaagctaagaagaagaaactgaaagtcagcgcttag

SEQ ID NO: 96556 - protein, 439 aa, Artificial Sequence
  derived and/or modified sequence
MDIKNSPSSLNSPSSYNCSQSILPLEHGSIYIPSSYVDSHHEYPAMTFYSPAVMNYSIPSNVTNLEGGPGRQTTSPNVLWPTPGHLSPLVVHRQLSHLYAEPQKSPWCEARSLEHTLPVNRETLKRKVSGNRCASPVTGPGSKRDAHFCAVCSDYASGYHYGVWSCEGCKAFFKRSIQGHNDYICPATNQCTIDKNRRKSCQACRLRKCYEVGMVKCGSRRERCGYRLVRRQRSADEQLHCAGKAKRSGGHAPRVRELLLDALSPEQLVLTLLEAEPPHVLISRPSAPFTEASMMMSLTKLADKELVHMISWAKKIPGMYPLVTATQDADSSRKLAHLLNAVTDALVWVIAKSGISSQQQSMRLANLLMLLSHVRHASNKGMEHLLNMKCKNVVPVYDLLLEMLNAHVLRGCKSSITGSECSPAEDSKSKEGSQNPQSQ

SEQ ID NO: 96557 - DNA, 1320 bp, Artificial Sequence
  derived and/or modified sequence
atggacatcaagaacagccccagcagcctgaacagccccagcagctacaactgcagccagagcatcctgcccctggagcacggcagcatctacatccccagcagctacgtggacagccaccacgagtaccccgccatgaccttctacagccccgccgtgatgaactacagcatccccagcaacgtgaccaacctggagggcggccccggcagacagaccaccagccccaacgtgctgtggcccacccccggccacctgagccccctggtggtgcacagacagctgagccacctgtacgccgagccccagaagagcccctggtgcgaggccagaagcctggagcacaccctgcccgtgaacagagagaccctgaagagaaaggtgagcggcaacagatgcgccagccccgtgaccggccccggcagcaagagagacgcccacttctgcgccgtgtgcagcgactacgccagcggctaccactacggcgtgtggagctgcgagggctgcaaggccttcttcaagagaagcatccagggccacaacgactacatctgccccgccaccaaccagtgcaccatcgacaagaacagaagaaagagctgccaggcctgcagactgagaaagtgctacgaggtgggcatggtgaagtgcggcagcagaagagagagatgcggctacagactggtgagaagacagagaagcgccgacgagcagctgcactgcgccggcaaggccaagagaagcggcggccacgcccccagagtgagagagctgctgctggacgccctgagccccgagcagctggtgctgaccctgctggaggccgagcccccccacgtgctgatcagcagacccagcgcccccttcaccgaggccagcatgatgatgagcctgaccaagctggccgacaaggagctggtgcacatgatcagctgggccaagaagatccccggcatgtaccccctggtgaccgccacccaggacgccgacagcagcagaaagctggcccacctgctgaacgccgtgaccgacgccctggtgtgggtgatcgccaagagcggcatcagcagccagcagcagagcatgagactggccaacctgctgatgctgctgagccacgtgagacacgccagcaacaagggcatggagcacctgctgaacatgaagtgcaagaacgtggtgcccgtgtacgacctgctgctggagatgctgaacgcccacgtgctgagaggctgcaagagcagcatcaccggcagcgagtgcagccccgccgaggacagcaagagcaaggagggcagccagaacccccagagccagtag

SEQ ID NO: 96558 - DNA, 1320 bp, Artificial Sequence
  derived and/or modified sequence
atggatattaagaattctccaagtagtctgaacagcccttcttcttacaactgtagccagagtattttacccctagagcacggctctatctatattcctagctcatatgtcgattctcaccacgaatatcctgctatgactttttactctccagccgtgatgaactattcaatcccgtccaatgtgaccaatctcgaaggcggtcctggccggcagaccacgagcccaaacgtactgtggccaactcctggacacttgtcacctcttgtggtgcaccgccagttgtcacacctgtacgccgaaccccagaaatctccgtggtgcgaggcccggagcctggaacacaccctgcccgtcaaccgggaaaccttaaagcgaaaggtttcgggcaaccggtgtgcgagcccagtgacagggccgggcagcaaacgcgacgcccatttctgtgccgtgtgctcggattacgccagcgggtatcattatggggtgtggtcctgcgagggatgcaaggcgtttttcaagcggtcaatccagggccacaatgactacatctgccccgcaactaatcagtgcaccattgataaaaatcgaaggaagtcttgccaggcatgtcgccttagaaagtgctatgaagtcggaatggtgaagtgcggctcgcgccgcgagcgttgtggataccggctggtccgcaggcagaggagcgctgatgagcaattgcactgtgccgggaaagccaagcgttcgggggggcatgccccgcgagtccgagaacttctgttggacgccctgtcccctgagcagcttgttctcactctgctagaagctgaaccacctcatgtgctgatctctcgtcctagcgccccttttactgaggcttcaatgatgatgagcctgacaaagctcgcagacaaggagctggtgcacatgatttcatgggccaagaagatccctggaatgtaccccctggttacagctacccaggatgctgacagctcacgaaaattggcccacctgctcaatgctgtcacagacgcactagtgtgggttatagcgaaatctgggatctcatcacagcaacaaagtatgcggcttgccaacctgctcatgctgttatctcatgtccgccatgcctccaataaagggatggaacacctacttaacatgaaatgcaagaacgtagtcccagtctacgatctcctactcgagatgttaaacgcacatgttctgcggggttgcaaatcttcaattactggatctgagtgttcaccagctgaggactcgaagtcaaaggaggggtctcagaatccccaatcacagtag

SEQ ID NO: 96559 - DNA, 1788 bp, Artificial Sequence
  derived and/or modified sequence
ctcggtctttaaaaggaagaaggggcttatcgttaagtcgcttgtgatcttttcagtttctccagctgctggctttttggacacccactcccccgccaggaggcagttgcaagcgcggaggctgcgagaaataactgcctcttgaaacttgcagggcgaagagcaggcggcgagcgctgggccggggagggaccacccgagctgcgacgggctctggggctgcggggcagggctggcgcccggagcctgagctgcaggaggtgcgctcgctttcctcaacaggtggcggcggggcgcgcgccgggagaccccccctaatgcgggaaaagcacgtgtccgcattttagagaaggcaaggccggtgtgtttatctgcaagccattatacttgcccacgaatctttgagaacattataatgacctttgtgcctcttcttgcaaggtgttttctcagctgttatctcaagacatggatataaaaaactcaccatctagccttaattctccttcctcctacaactgcagtcaatccatcttacccctggagcacggctccatatacataccttcctcctatgtagacagccaccatgaatatccagccatgacattctatagccctgctgtgatgaattacagcattcccagcaatgtcactaacttggaaggtgggcctggtcggcagaccacaagcccaaatgtgttgtggccaacacctgggcacctttctcctttagtggtccatcgccagttatcacatctgtatgcggaacctcaaaagagtccctggtgtgaagcaagatcgctagaacacaccttacctgtaaacagagagacactgaaaaggaaggttagtgggaaccgttgcgccagccctgttactggtccaggttcaaagagggatgctcacttctgcgctgtctgcagcgattacgcatcgggatatcactatggagtctggtcgtgtgaaggatgtaaggccttttttaaaagaagcattcaaggacataatgattatatttgtccagctacaaatcagtgtacaatcgataaaaaccggcgcaagagctgccaggcctgccgacttcggaagtgttacgaagtgggaatggtgaagtgtggctcccggagagagagatgtgggtaccgccttgtgcggagacagagaagtgccgacgagcagctgcactgtgccggcaaggccaagagaagtggcggccacgcgccccgagtgcgggagctgctgctggacgccctgagccccgagcagctagtgctcaccctcctggaggctgagccgccccatgtgctgatcagccgccccagtgcgcccttcaccgaggcctccatgatgatgtccctgaccaagttggccgacaaggagttggtacacatgatcagctgggccaagaagattcccggtatgtaccctctggtcacagcgacccaggatgctgacagcagccggaagctggctcacttgctgaacgccgtgaccgatgctttggtttgggtgattgccaagagcggcatctcctcccagcagcaatccatgcgcctggctaacctcctgatgctcctgtcccacgtcaggcatgcgagtaacaagggcatggaacatctgctcaacatgaagtgcaaaaatgtggtcccagtgtatgacctgctgctggagatgctgaatgcccacgtgcttcgcgggtgcaagtcctccatcacggggtccgagtgcagcccggcagaggacagtaaaagcaaagagggctcccagaacccacagtctcagtga

SEQ ID NO: 96560 - DNA, 1320 bp, Artificial Sequence
  derived and/or modified sequence
atggacatcaagaacagccccagcagcctgaacagccccagcagctacaactgcagccagagcatcctgcccctggagcacggcagcatctacatccccagcagctatgtggacagccaccacgagtacccagccatgaccttctacagccctgctgtgatgaactacagcatccccagcaatgtgaccaacctggagggcggccctggccggcagaccaccagccccaacgtgctgtggcccaccccaggccacctgagccccctggtggtgcaccggcagctgagccacctgtatgcagagccccagaagagcccctggtgtgaggcccggagcctggagcacaccctgcctgtgaaccgggagaccctgaagaggaaggtgtctggcaacagatgtgccagccctgtgacaggccctggcagcaagagagatgcccacttctgtgctgtgtgcagcgactatgccagcggctaccactatggagtgtggagctgtgagggctgcaaggccttcttcaagaggagcatccagggccacaatgactacatctgcccagccaccaaccagtgcaccatcgacaagaacagaaggaagagctgccaggcctgccgcctgaggaagtgctatgaggtgggcatggtgaagtgtggcagccggcgggagcgctgtggctaccgcctggtgcggcggcagaggtctgcagatgagcagctgcactgtgccggcaaggccaagaggtctgggggccacgccccccgggtgcgggagctgctgctggatgccctgagccctgagcagctggtgctgaccctgctggaggccgagccccctcatgtgctgatcagccggcccagcgcccccttcacagaggcctccatgatgatgagcctgaccaagctggccgacaaggagctggtgcacatgatctcctgggccaagaagatccctggcatgtaccccctggtgacagccacccaggatgctgacagcagcaggaagctggcccacctgctgaatgctgtgacagatgccctggtgtgggtgattgccaagagcggcatcagcagccagcagcagagcatgaggctggccaacctgctgatgctgctgagccacgtgagacatgccagcaacaagggcatggagcacctgctgaacatgaagtgcaagaatgtggtgcctgtgtatgacctgctgctggagatgctgaatgcccacgtgctgcggggctgcaagagcagcatcactggaagtgagtgcagccctgctgaggacagcaagagcaaggagggcagccagaacccccagagccagtag

SEQ ID NO: 96561 - DNA, 1320 bp, Artificial Sequence
  derived and/or modified sequence
atggacatcaagaacagccccagcagcctgaacagccccagcagctacaattgttcccagagcatcctgccccttgaacacggatcaatttacatcccgtccagctacgtggatagtcaccatgagtatcctgccatgacattttatagtccagcagtcatgaactatagcatcccgtctaatgttaccaacctggagggtggaccgggccgtcagaccacctcccctaatgtgctgtggccaaccccaggacacctgagtcccctcgtggtgcatcgtcaactttcccacctctacgcggagccccagaaatctccgtggtgtgaggctagatctctggaacataccttgccggttaaccgggaaactctgaagcggaaagtgtctggaaataggtgcgctagccctgttaccggcccagggagcaagcgcgatgcccatttttgcgccgtatgctctgattacgcatctggctaccactacggggtctggagctgcgagggttgcaaagccttcttcaagcgatccattcagggacacaacgattatatttgccctgcaactaatcaatgcaccatcgataagaataggaggaaaagttgtcaagcatgtcgattgcgtaagtgctatgaggtgggcatggtcaagtgcgggtcacgtagagagcgctgtggctaccggctcgtacgccgccaaagaagtgccgacgagcagttacattgtgctggcaaagcaaagcgaagtggagggcatgccccacgggtccgcgaactcctgctcgacgccctgagccctgagcagctagtgttgacacttctggaggccgagccaccccacgtcctgatcagcagaccttcagcaccctttacagaagcttcaatgatgatgtccctcaccaagctagccgacaaagaactcgtgcatatgatcagctgggccaagaagatacccgggatgtacccacttgtgaccgccacccaggatgcagacagcagtagaaagctggcccatctgctcaacgccgtcacggacgccctggtgtgggtgatagctaaatcaggcatatcgtcccagcaacagtcaatgcggcttgctaacctgctgatgctgctgagccatgtaaggcacgcctctaacaaagggatggagcatctgctcaatatgaagtgtaagaatgtggtgccagtgtacgacctgctcttagaaatgctcaacgcacatgttctaagaggatgcaaaagttctattactggttctgagtgcagccccgcagaggattccaagtctaaagaaggctcacagaatccacaatcacagtag

SEQ ID NO: 96562 - DNA, 1320 bp, Artificial Sequence
  derived and/or modified sequence
atggatatcaagaattcaccatcttctttaaacagtccctctagttataactgttcacagagcatccttccactggagcatggatcaatctacatcccatcaagttatgtggactcccatcacgaataccccgcaatgacattctactcccccgcagtgatgaactatagcatcccgtcaaacgtcaccaacttagagggcggacccggtcgacagacgaccagcccgaatgtcctctggccaactcctggccacctgagtcccttagtggtgcaccgtcagcttagtcacctctacgctgaaccgcagaaaagtccctggtgtgaggccagatccttggagcacaccctccccgtcaacagagagaccctgaagcgcaaagtaagtggcaacagatgcgcgtccccggttactggtccaggaagtaagagggacgcgcacttctgcgcagtgtgtagtgattacgcctccggctaccactacggagtgtggtcctgtgagggctgtaaggctttttttaaacgctccattcagggccacaacgactacatctgccccgctacgaaccagtgcaccatagacaagaacaggcgcaagagttgccaggcgtgcaggctgagaaagtgctacgaggtaggaatggttaaatgcggaagtcgaagggagagatgtggttatcgactggtgcgccgacagcggtcggccgatgagcagctccactgcgctgggaaggctaaacgctcgggcggacatgccccacgtgtgcgcgagctgctgctggacgccctgagcccggaacagctggtgctgacattactcgaagctgagccccctcatgtgcttatttctcgaccgtcggccccttttacagaagccagcatgatgatgtctttgaccaaacttgccgacaaggaactggtgcatatgatttcttgggcgaaaaaaatacccggaatgtatcctctcgtgacagcaacgcaggatgcagattcctctcgcaagctggcacacctcttgaatgcggtcaccgatgctctggtttgggtgattgcaaagtcaggtatcagctcacagcagcagagtatgagattggcgaatcttctgatgcttctgtcccacgtgcgccacgctagtaataagggtatggaacatttattaaacatgaagtgcaagaatgtcgtgcctgtttatgatctgctgctcgagatgctgaatgcccacgtccttaggggctgcaaaagttcaatcaccgggtcagagtgtagccctgctgaggactctaagtcaaaagaggggtctcagaacccacagtctcaatag

SEQ ID NO: 96563 - protein, 160 aa, Artificial Sequence
  derived and/or modified sequence
MEEGSSSPVSPVDSLGTSEEELERQPKRFGRKRRYSKKSSEDGSPTPGKRGKKGSPSAQSFEELQSQRILANVRERQRTQSLNEAFAALRKIIPTLPSDKLSKIQTLKLAARYIDFLYQVLQSDEMDNKMTSCSYVAHERLSYAFSVWRMEGAWSMSASH

SEQ ID NO: 96564 - DNA, 483 bp, Artificial Sequence
  derived and/or modified sequence
atggaggagggcagcagcagccccgtgagccccgtggacagcctgggcaccagcgaggaggagctggagagacagcccaagagattcggcagaaagagaagatacagcaagaagagcagcgaggacggcagccccacccccggcaagagaggcaagaagggcagccccagcgcccagagcttcgaggagctgcagagccagagaatcctggccaacgtgagagagagacagagaacccagagcctgaacgaggccttcgccgccctgagaaagatcatccccaccctgcccagcgacaagctgagcaagatccagaccctgaagctggccgccagatacatcgacttcctgtaccaggtgctgcagagcgacgagatggacaacaagatgaccagctgcagctacgtggcccacgagagactgagctacgccttcagcgtgtggagaatggagggcgcctggagcatgagcgccagccactag

SEQ ID NO: 96565 - DNA, 483 bp, Artificial Sequence
  derived and/or modified sequence
atggaggagggatcaagttcccctgtgagccccgttgactctcttggcacgagtgaagaggagttggaaagacagcctaagaggtttggacgcaagaggcgatacagcaaaaagtcttcggaggacgggagcccaacccctggcaaacgcggcaagaaggggtctccatcggctcagagtttcgaggaactgcaatcacagaggatcttagcgaatgtgagagagagacaacggacccagtctctgaatgaggccttcgcagccctccgtaagatcatcccaaccttgcctagtgataaactaagcaagatccagacgttaaaactggcagccagatacatagatttcctgtatcaggtgttgcagtccgacgaaatggacaacaagatgacctcatgctcgtacgtggctcatgagcggttgagctacgctttcagcgtctggaggatggaaggagcatggtccatgtctgccagccattag

SEQ ID NO: 96566 - DNA, 483 bp, Artificial Sequence
  derived and/or modified sequence
atggaggagggcagcagcagccctgtgtcccctgtggacagcctgggcaccagcgaggaggagctggagcggcagcccaagagatttggaaggaagaggcgctacagcaagaagagcagtgaagatggcagccccaccccaggcaagaggggcaagaagggcagccccagcgcccagagctttgaggagctgcagagccagaggatcctggccaacgtgcgggagcggcagaggacccagagcctgaatgaggcctttgctgccctgaggaagatcatccccaccctgcccagcgacaagctgagcaagatccagaccctgaagctggccgcccgctacatcgacttcctgtaccaggtgctgcagagtgatgagatggacaacaagatgaccagctgcagctatgtggcccacgagcggctgtcctatgccttctctgtgtggaggatggagggcgcctggagcatgtctgccagccactag

SEQ ID NO: 96567 - DNA, 483 bp, Artificial Sequence
  derived and/or modified sequence
atggaggagggcagcagcagccccgtgagccccgtggacagcctgggcacttcagaggaagaactcgaaagacagccaaagcgcttcggccgaaagaggaggtattccaaaaagtccagtgaagacggcagccctacccccgggaaacggggcaaaaaagggtccccaagtgctcagtcatttgaggagctacagtctcagcggattctggccaacgtgcgagaaagacaaaggacccagtccctgaatgaagcattcgctgcgctccggaaaatcatcccaacacttccatccgataagctttcaaaaatccaaaccctgaagttagcagcccggtacatagatttcctgtaccaagtgctccaatcagacgagatggataacaagatgacatcctgcagctatgttgcacatgaaaggctcagttacgcatttagcgtatggagaatggaaggtgcctggtccatgtctgcctcccactag

SEQ ID NO: 96568 - DNA, 483 bp, Artificial Sequence
  derived and/or modified sequence
atggaagagggttcgagctctcctgtttccccagtagattctttgggaacgtctgaagaggaattggagcgacagccaaagcgattcggacggaagcggaggtacagcaagaagagcagcgaagacggaagccctacaccagggaagcgagggaagaaaggtagtccctccgctcaatccttcgaggaactgcagagccagcggattctggccaacgtccgagagcggcagagaacacagtctttgaacgaggccttcgcagctctccgcaaaataattcccacattgccgtctgacaaactgtccaagatccagaccctcaagttggccgctcgctacatcgattttttataccaggtcttgcagagcgatgagatggataataagatgacttcatgcagttacgtggcccacgaacggctatcctatgcctttagtgtgtggaggatggaaggcgcatggtccatgtccgcgtcgcactag

SEQ ID NO: 96569 - DNA, 1176 bp, Artificial Sequence
  derived and/or modified sequence
ctagagtttccaaaaaagttagaataacttcctctcccggagacctcggttttgcacaagccggccttgaaatcagagcctttccagcaactccgagagcgtgtgctcggcgaccgcgggcttggccagcggcgcgcgctcggcgccccggcgcccccagccccacgcgcgccgggcgggcgccatggaggagggctccagctcgcccgtgtcccccgtggacagcctgggcaccagcgaggaggagctcgagaggcagcccaagcgcttcggccggaagcggcgctacagcaagaagtcgagcgaagatggcagcccgaccccgggcaagcgcggcaagaagggcagccccagcgcgcagtccttcgaggagctgcagagccagcgcatcctggccaacgtgcgcgagcgccagcgcacccagtcgctcaacgaggccttcgcggcgctgcgcaagatcatccccacgctgccctctgacaagctgagcaagatccagacgctcaagctggccgccaggtacatagacttcctctaccaggtcctgcagagcgacgagatggacaataagatgaccagctgcagctacgtggcccacgagcgcctcagctacgccttctccgtgtggcgcatggagggcgcgtggtccatgtccgcctcccactagcgccgcgccacccacctccggaccggcgcgccaggaggagattctgaatgatgctgccattgccagaccttctgctaccaaacagagcgaagaggaagagggggcagtgtttggtcaagacagcccacgaaacgttggcgggagtgagcacattagcaatggctaagaacatgcttgaatcatttgtaacaacccaggacagagatgccacaagaggactttggggaaaggcgaatccactcatacatcttggagttgttttttcaagttcagaaaatgaaccttcaccaaggtcttggaacatgaagcagagactctggtgctgactctatcatttgagctcctaagggtactcatgcccagtggagcatgcacaccagcaacactgccaacaccatctcggtgtcccaccccttagaggaggaagaggacacagaggggcgcccggtaataaccctcatttcctctcttccaccccaccacatcatcttaataaaacatgaaggtaa

SEQ ID NO: 96570 - protein, 449 aa, Artificial Sequence
  derived and/or modified sequence
MIPGIGTLTQDTLWCFSQVKGTIEIGTTEADIISTVEFNHTGELLATGDKGGRVVIFQREQESKNQVHRRGEYNVYSTFQSHEPEFDYLKSLEIEEKINKIRWLPQQNAAYFLLSTNDKTVKLWKVSERDKRPEGYNLKDEEGRLRDPATITTLRVPVLRPMDLMVEATPRRVFANAHTYHINSISVNSDYETYMSADDLRINLWNFEITNQSFNIVDIKPANMEELTEVITAAEFHPHHCNTFVYSSSKGTIRLCDMRASALCDRHTKFFEEPEDPSNRSFFSEIISSISDVKFSHSGRYIMTRDYLTVKVWDLNMENRPIETYQVHDYLRSKLCSLYENDCIFDKFECVWNGSDSVIMTGSYNNFFRMFDRNTKRDVTLEASRENSKPRAILKPRKVCVGGKRRKDEISVDSLDFSKKILHTAWHPSENIIAVAATNNLYIFQDKVN

SEQ ID NO: 96571 - DNA, 1350 bp, Artificial Sequence
  derived and/or modified sequence
atgattcccgggatcgggaccctcactcaggatacactctggtgtttcagccaggtgaaggggactatcgagatcggaacgaccgaagcagacatcatttcaacagtagagtttaaccacacaggtgaacttctcgcgacgggcgataaggggggtcgcgtggtgatttttcagcgggaacaggaaagcaagaatcaagtgcacagaagaggcgagtacaatgtttactccaccttccagtcgcacgaacccgaatttgattacctgaagtcactggagattgaggaaaaaataaataagatacgctggttgccccaacaaaatgccgcctacttcctcctgtcaacaaacgataaaacagtgaaactgtggaaggttagcgagagggacaagcgaccggaaggatacaatctgaaagacgaggagggaagacttcgtgatcctgccacgataacgaccctgagagtgccggtgcttcgtccaatggatcttatggtcgaggcaactcctcgtcgcgtctttgctaatgcccacacctatcacataaattctatttctgtcaatagcgattacgagacttacatgtctgctgatgatctccgaattaatttgtggaacttcgagatcacgaatcagtccttcaacatcgtcgacataaaacccgccaatatggaggaattaacagaagtgatcacagccgccgaatttcacccccatcattgtaatacctttgtgtatagctcgtcaaaaggaaccatccggctctgcgacatgagggcttctgctttgtgtgacagacacactaagttcttcgaagaacctgaggacccatccaacaggtcctttttcagcgagataataagcagcatctcagatgtgaagttttctcattccggcagatacatcatgacacgagattacctcacagtcaaagtctgggatcttaatatggagaaccgacccatcgaaacgtaccaggtgcacgactacctccgctcgaagttgtgctccttgtatgagaatgactgcatcttcgacaagttcgagtgcgtgtggaacggctcagattctgtgatcatgactggctcctataacaacttcttcaggatgttcgacagaaatacaaagcgagacgttacgctggaggcgtccagggagaatagtaaaccgagagccatccttaagccccggaaagtgtgtgtgggtggaaaacgccgaaaggacgagatatccgtggattcattggactttagcaaaaagatcctccataccgcatggcacccctctgaaaacattattgccgttgcagcaaccaataacctctacattttccaagataaggtgaattag

SEQ ID NO: 96572 - DNA, 1350 bp, Artificial Sequence
  derived and/or modified sequence
atgatccctggcatcggcaccctgacccaggacaccctgtggtgcttcagccaggtgaagggcaccattgaaattggcaccacagaggccgacatcatcagcacagtggagttcaaccacactggagagctgctggccactggagacaagggcggccgggtggtgatcttccagcgggagcaggagagcaagaaccaggtgcacagaagaggagagtacaacgtgtacagcaccttccagagccatgagcctgagtttgactacctgaagagcctggagattgaggagaagatcaacaagatccgctggctgccccagcagaatgctgcctacttcctgctgagcaccaatgacaagacagtgaagctgtggaaggtgtctgagcgggacaagaggcctgagggctacaacctgaaggatgaggagggccgcctgcgggaccctgccaccatcaccaccctgcgggtgcctgtgctgcggcccatggacctgatggtggaggccaccccaagaagagtgtttgccaatgcccacacctaccacatcaacagcatctctgtgaacagcgactatgagacctacatgtctgcagatgacctgcgcatcaacctgtggaactttgagatcaccaaccagagcttcaacatcgtggacatcaagccagccaacatggaggagctgacagaggtgatcacagctgctgagttccacccccaccactgcaacacctttgtgtacagcagcagcaagggcaccatccggctgtgtgacatgagggccagcgccctgtgtgacagacacaccaagttctttgaggagcctgaggaccccagcaacagaagcttcttcagcgagatcatcagcagcatcagtgatgtgaagttcagccacagcggccgctacatcatgacccgggactacctgactgtgaaggtgtgggacctgaacatggagaaccggcccatcgagacctaccaggtgcatgactacctgcggagcaagctgtgcagcctgtatgaaaatgactgcatctttgacaagtttgaatgtgtgtggaatggaagtgacagcgtcatcatgacaggcagctacaacaacttcttcaggatgtttgacaggaacaccaagagagatgtgaccctggaggccagccgggagaacagcaagccccgggccatcctgaagcccaggaaggtgtgtgtgggcggcaagaggaggaaggatgagatctctgtggacagcctggacttcagcaagaagatcctgcacacagcctggcaccccagcgagaacatcatcgctgtggccgccaccaacaacctgtacatcttccaggacaaggtgaactag

SEQ ID NO: 96573 - DNA, 1350 bp, Artificial Sequence
  derived and/or modified sequence
atgatccccggcatcggcaccctgacccaggacaccctgtggtgcttctctcaagtgaagggtactatcgagatcggcaccactgaagccgacataatcagcactgtggagttcaatcacacaggtgaacttctggctacaggagacaaggggggtagggtggtgatcttccaaagggagcaagagtccaagaatcaggtccaccgccgcggggagtacaacgtttactcaacgttccaaagccatgagccggaattcgactatttaaaatccttagagattgaagagaagatcaataaaattcggtggttgcctcaacagaacgccgcttattttcttctcagcaccaacgacaaaacagttaagctttggaaagtgtcagagcgagacaagcggcctgagggatacaacctcaaagatgaggaaggcaggttgagagaccccgccacaattactactttacgagtgcccgttctgcgtcccatggacctgatggtcgaggctactccccgcagagttttcgccaatgcccatacatatcacataaactctatttctgtcaatagtgattatgagacttacatgtccgcggacgatctgagaatcaacctttggaattttgaaatcacaaatcagagtttcaacatcgttgacatcaagcctgcaaatatggaggagctcacagaagtcattaccgccgccgaattccacccccaccactgtaacacgtttgtttatagcagctccaagggcaccatcagattgtgcgacatgagagcatcggccctgtgtgatcgacacactaagtttttcgaggaaccagaggacccctccaatcggagttttttcagtgaaataatctcatccatctcagacgtcaagttttcccacagcggacgctatatcatgactcgggattacctcaccgtaaaagtgtgggaccttaatatggagaaccggccgattgagacatatcaggtccacgattatctgcgaagcaaattgtgtagcttatacgaaaacgattgcatcttcgataagtttgagtgtgtgtggaatggttcagactcagtcataatgacagggtcatacaacaactttttccgcatgttcgaccggaacactaagagagacgtgacactggaggcaagtcgagagaactccaagccccgggcaatcctcaagcccagaaaagtctgcgtagggggcaagagacgcaaagacgaaatcagcgtggatagcctggatttctctaaaaagatcctccacacagcctggcatcccagcgaaaatataattgccgtcgccgccaccaacaacctctacatctttcaggacaaggtaaattag

SEQ ID NO: 96574 - DNA, 1350 bp, Artificial Sequence
  derived and/or modified sequence
atgattccgggaataggcacactgactcaagacaccttgtggtgctttagccaagtgaagggcaccatcgaaattggcactaccgaggccgacatcatcagcactgtggaattcaatcatactggcgagctgctggcgacaggcgacaagggtggacgtgttgtgatcttccagagagagcaagagtcaaagaaccaggtgcacagaaggggagagtacaacgtctactcaacttttcagtcccacgagcctgaattcgattacttgaaaagcttggagatagaggagaagatcaacaaaattcgatggctcccccaacagaatgctgcctattttctgctgtcaaccaacgacaaaaccgtcaagctgtggaaagtgtccgagagggataagcgacctgagggctacaatctcaaggatgaggaaggcagactgagagatcctgctaccatcaccacccttcgtgtgcccgtgttgagacccatggatcttatggtcgaggctacgcctcgcagggtgttcgccaatgcacatacataccatattaatagcatcagcgtgaacagtgactacgagacttacatgtctgcagacgatctgaggataaacttgtggaattttgaaatcacaaatcagtcttttaatattgtcgacattaaaccagctaacatggaggaactgaccgaggtgattacagctgcggagtttcacccacatcactgtaatactttcgtctattctagtagcaaggggacaatcagactctgtgatatgagagctagcgccctttgcgatcgtcatacaaagttctttgaggaacccgaggaccccagcaatcgctccttcttttccgaaattatctcttcgatctccgacgtaaagtttagccatagtggaaggtacataatgaccagggactatctaactgtaaaagtttgggacttgaacatggagaacaggcctattgagacctaccaggtgcacgattacctgaggtctaaactgtgtagcctttatgaaaacgactgcatctttgacaagttcgaatgcgtgtggaacggctccgactccgtgatcatgactggaagctacaacaatttcttccgtatgttcgacaggaacactaagagagacgtgacccttgaagccagtagagaaaacagtaaaccgagagcaatcctcaagccacggaaagtatgcgtggggggtaagcgccgaaaagacgagatttctgtcgacagccttgacttcagtaaaaaaattttgcatacggcctggcatccctccgaaaacataattgcagtggcggcaacaaataatttgtatatttttcaggacaaagtgaactag

SEQ ID NO: 96575 - DNA, 2011 bp, Artificial Sequence
  derived and/or modified sequence
agtattcccgtgaaaagggccagtcacacaggggatgactgcaagtccttcgtaaccactccaggacgctgccagggcctgagaagggacaaactccaattgctccagttcaaactggtcctggcctggtcaaacggaggagacagagcagtgattcacagcaggacgtggtacttgcagactgaccgtcctctcaggactcactagggtctcttctctgacgagatgatacctggaattgggacactcacccaggacacactatggtgcttcagccaagtgaaaggcactatcgagattggaaccacagaagctgacattatctctacggtagaattcaaccacacgggagaattactagcgacaggggacaaggggggtcgggttgtaatatttcaacgagagcaggagagtaaaaatcaggttcatcgtaggggtgaatacaatgtttacagcacattccagagccatgaacccgagttcgattacctgaagagtttagaaatagaagaaaaaatcaataaaataagatggctcccccagcagaatgcagcttactttcttctgtctactaatgataaaactgtgaagctgtggaaagtcagcgagcgtgataagaggccagaaggctacaatctgaaagatgaggagggccggctccgggatcctgccaccatcacaaccctgcgggtgcctgtcctgagacccatggacctgatggtggaggccaccccacgaagagtatttgccaacgcacacacatatcacatcaactccatatctgtcaacagcgactatgaaacctacatgtccgctgatgacctgaggattaacctatggaactttgaaataaccaatcaaagttttaatattgtggacattaagccagccaacatggaggagctcacggaggtgatcacagcagccgagttccacccccatcattgcaacaccttcgtgtacagcagcagcaaagggacaatccggctgtgtgacatgcgggcatctgccctgtgtgacaggcacaccaaattttttgaagagccggaagatccaagcaacagatcatttttctctgaaattatctcttcgatttcggatgtgaagttcagccacagtgggaggtatatcatgaccagggactacttgaccgtcaaagtctgggatctcaacatggaaaaccgccccatcgagacttaccaggttcatgactacctccgcagcaagctgtgttccctctatgaaaatgactgcatttttgataaatttgagtgtgtgtggaatgggtcagacagtgtcatcatgacaggctcctacaacaacttcttcaggatgttcgacagaaacaccaagcgtgatgtgacccttgaggcttcgagggaaaacagcaagccccgggctatcctcaaaccccgaaaagtgtgtgtggggggcaagcggagaaaagacgagatcagtgtcgacagtctggactttagcaaaaagatcttgcatacagcttggcatccttcagaaaatattatagcagtggcggctacaaataacctatatatattccaggacaaggttaactaggtggacaagttattacttaataatctcacatactgaatactagtcaaacaagtttttaaatgtttctttgggtcttcatttgatgcattgactttaatttccctatacaggaaatgattggaatagaattaaaaggagtccaacattcccagctccccagttctaagaaacttttgtcaaacccaataggtttgggacacttctgtttagaattgaaagctgccagctaacagtaattcttccatagttgacttgaacttctgatgcttttattgcccagttttctctggtgggtccagtgttttgttcctaggtgtctgctgcgataaaatgaggttgtctgtagtatttaaggagaaaagagataagttttttttaattaagcaattccatttgattgaaaaaaatcaacaaaaaataaacaccgtttactctt

SEQ ID NO: 96576 - DNA, 1350 bp, Artificial Sequence
  derived and/or modified sequence
atgatccccggcatcggcaccctgacccaggacaccctgtggtgcttcagccaggtgaagggcaccatcgagatcggcaccaccgaggccgacatcatcagcaccgtggagttcaaccacaccggcgagctgctggccaccggcgacaagggcggcagagtggtgatcttccagagagagcaggagagcaagaaccaggtgcacagaagaggcgagtacaacgtgtacagcaccttccagagccacgagcccgagttcgactacctgaagagcctggagatcgaggagaagatcaacaagatcagatggctgccccagcagaacgccgcctacttcctgctgagcaccaacgacaagaccgtgaagctgtggaaggtgagcgagagagacaagagacccgagggctacaacctgaaggacgaggagggcagactgagagaccccgccaccatcaccaccctgagagtgcccgtgctgagacccatggacctgatggtggaggccacccccagaagagtgttcgccaacgcccacacctaccacatcaacagcatcagcgtgaacagcgactacgagacctacatgagcgccgacgacctgagaatcaacctgtggaacttcgagatcaccaaccagagcttcaacatcgtggacatcaagcccgccaacatggaggagctgaccgaggtgatcaccgccgccgagttccacccccaccactgcaacaccttcgtgtacagcagcagcaagggcaccatcagactgtgcgacatgagagccagcgccctgtgcgacagacacaccaagttcttcgaggagcccgaggaccccagcaacagaagcttcttcagcgagatcatcagcagcatcagcgacgtgaagttcagccacagcggcagatacatcatgaccagagactacctgaccgtgaaggtgtgggacctgaacatggagaacagacccatcgagacctaccaggtgcacgactacctgagaagcaagctgtgcagcctgtacgagaacgactgcatcttcgacaagttcgagtgcgtgtggaacggcagcgacagcgtgatcatgaccggcagctacaacaacttcttcagaatgttcgacagaaacaccaagagagacgtgaccctggaggccagcagagagaacagcaagcccagagccatcctgaagcccagaaaggtgtgcgtgggcggcaagagaagaaaggacgagatcagcgtggacagcctggacttcagcaagaagatcctgcacaccgcctggcaccccagcgagaacatcatcgccgtggccgccaccaacaacctgtacatcttccaggacaaggtgaactag

SEQ ID NO: 96577 - protein, 501 aa, Artificial Sequence
  derived and/or modified sequence
MVLQPSERHYRDWNHRRLGPWCSPTGSPAPLSCETGCGEGSWILVCRLLVPTQVSLLSMEEDIDTRKINNSFLRDHSYATEADIISTVEFNHTGELLATGDKGGRVVIFQREQESKNQVHRRGEYNVYSTFQSHEPEFDYLKSLEIEEKINKIRWLPQQNAAYFLLSTNDKTVKLWKVSERDKRPEGYNLKDEEGRLRDPATITTLRVPVLRPMDLMVEATPRRVFANAHTYHINSISVNSDYETYMSADDLRINLWNFEITNQSFNIVDIKPANMEELTEVITAAEFHPHHCNTFVYSSSKGTIRLCDMRASALCDRHTKFFEEPEDPSNRSFFSEIISSISDVKFSHSGRYIMTRDYLTVKVWDLNMENRPIETYQVHDYLRSKLCSLYENDCIFDKFECVWNGSDSVIMTGSYNNFFRMFDRNTKRDVTLEASRENSKPRAILKPRKVCVGGKRRKDEISVDSLDFSKKILHTAWHPSENIIAVAATNNLYIFQDKVN

SEQ ID NO: 96578 - DNA, 243 bp, Artificial Sequence
  derived and/or modified sequence
atgtgcctgatatcactctgtgtgagtttcacctctgtgaacaagagagagcagaacaagcctaagatcctcatcttgctcaagaaaagacttagtggatgttttattaaagaggcaagagggacccggctcaagggcaaccagctggccgtaaccaaggcccgtgacgacggcggtttagctgaagatggtgacagcggagggggcaaagtgatcagattttggatatacttcgaaggctag

SEQ ID NO: 96579 - DNA, 1506 bp, Artificial Sequence
  derived and/or modified sequence
atggtgctgcagccttcagaaagacattacagggattggaaccatagacgcctggggccatggtgtagtccaacagggtctcctgcccccctctcttgcgaaaccgggtgcggggagggttcttggatcctggtttgcagacttctggtgccgacccaggtttccctgctgtctatggaggaggacattgacacaaggaagatcaataatagttttttaagggaccactcctacgccaccgaagctgatatcataagcaccgttgaatttaatcatactggcgaactgctggctactggagacaagggaggacgggtcgtgatctttcaacgggagcaagagtcaaaaaaccaggttcaccgtaggggtgagtacaacgtctactccacatttcagtcccacgaacccgaattcgattaccttaagtctctagaaattgaggaaaaaataaacaaaattcggtggctacctcaacaaaacgccgcttactttctgctgtctacaaatgacaagactgtgaagctttggaaagtctcagagcgggataagaggcctgaaggatacaatctcaaagatgaagagggtcggcttagagatcctgcgaccataactacgttaagagtccctgtccttcggccaatggatctgatggtggaagcgactcctaggcgcgtgtttgcaaacgctcatacataccatatcaattctatttccgttaatagcgactacgagacttatatgtctgccgacgacctgaggattaatctatggaacttcgaaatcacaaatcagtccttcaacatagtggacatcaagcccgcaaacatggaggagctgactgaggtaattaccgccgcagagtttcacccacaccactgcaatactttcgtttacagctcctccaaaggcaccattcgcctgtgcgacatgcgcgcaagcgcgctctgcgacagacacactaagttctttgaggagccggaggacccgagtaatagatccttttttagcgagatcatttctagcatctctgacgtcaagttctctcactcaggccgatatatcatgacacgggactatctcactgtcaaggtgtgggatttgaacatggaaaacagacctatcgaaacctaccaggtccacgactatttgaggtcaaagctgtgctctctttacgaaaacgattgcatcttcgacaagtttgaatgcgtttggaatggctctgactcggttataatgacaggctcttacaacaattttttcagaatgttcgaccgaaatactaaaagagatgtcaccttggaagcctcgagggagaatagcaagccacgggctatactaaagccacgcaaagtgtgtgtgggtggaaaaagaaggaaagatgaaatttccgtcgactctttagacttcagcaaaaaaattctgcatacagcttggcaccctagcgagaatataattgccgtggccgcaactaacaatttatatatctttcaggacaaggtgaattag

SEQ ID NO: 96580 - DNA, 1506 bp, Artificial Sequence
  derived and/or modified sequence
atggtgctgcagcccagcgagcggcactacagagactggaaccaccggcggctgggcccctggtgcagccccaccggcagccctgcccccctgagctgtgaaacaggctgtggggagggctcctggatcctggtgtgccgcctgctggtgcccacccaggtgtccctgctgtccatggaggaggacatcgacaccaggaagatcaacaacagcttcctgcgggaccacagctatgccacagaggccgacatcatcagcacagtggagttcaaccacactggagagctgctggccactggagacaagggcggccgggtggtgatcttccagcgggagcaggagagcaagaaccaggtgcacagaagaggagagtacaacgtgtacagcaccttccagagccatgagcctgagtttgactacctgaagagcctggagattgaggagaagatcaacaagatccgctggctgccccagcagaatgctgcctacttcctgctgagcaccaatgacaagacagtgaagctgtggaaggtgtctgagcgggacaagaggcctgagggctacaacctgaaggatgaggagggccgcctgcgggaccctgccaccatcaccaccctgcgggtgcctgtgctgcggcccatggacctgatggtggaggccaccccaagaagagtgtttgccaatgcccacacctaccacatcaacagcatctctgtgaacagcgactatgagacctacatgtctgcagatgacctgcgcatcaacctgtggaactttgagatcaccaaccagagcttcaacatcgtggacatcaagccagccaacatggaggagctgacagaggtgatcacagctgctgagttccacccccaccactgcaacacctttgtgtacagcagcagcaagggcaccatccggctgtgtgacatgagggccagcgccctgtgtgacagacacaccaagttctttgaggagcctgaggaccccagcaacagaagcttcttcagcgagatcatcagcagcatcagtgatgtgaagttcagccacagcggccgctacatcatgacccgggactacctgactgtgaaggtgtgggacctgaacatggagaaccggcccatcgagacctaccaggtgcatgactacctgcggagcaagctgtgcagcctgtatgaaaatgactgcatctttgacaagtttgaatgtgtgtggaatggaagtgacagcgtcatcatgacaggcagctacaacaacttcttcaggatgtttgacaggaacaccaagagagatgtgaccctggaggccagccgggagaacagcaagccccgggccatcctgaagcccaggaaggtgtgtgtgggcggcaagaggaggaaggatgagatctctgtggacagcctggacttcagcaagaagatcctgcacacagcctggcaccccagcgagaacatcatcgctgtggccgccaccaacaacctgtacatcttccaggacaaggtgaactag

SEQ ID NO: 96581 - DNA, 1506 bp, Artificial Sequence
  derived and/or modified sequence
atggtgctgcagcccagcgagcggcactaccgggactggaaccaccgaaggctcgggccctggtgttcgcccacgggctccccagccccgctgagctgtgaaacaggatgcggagagggctcctggattctcgtgtgcagactgcttgttcctacacaggtgagtctgctgtccatggaagaggacattgacacgagaaaaattaacaactccttcctcagggaccactcttatgcaaccgaggctgacatcatcagtaccgtggagtttaaccacaccggggagttgttggcaacgggagataagggaggccgggttgttattttccagcgtgagcaagagtccaagaaccaagtgcacagaagaggcgaatataacgtctactccacatttcagtcccatgagcccgagtttgattaccttaaaagtctggaaatcgaggagaagatcaacaaaattcggtggttgccccagcagaatgcagcatattttttgctgagcacaaacgacaagacggtcaagctgtggaaagtgtcggagagagataagagaccagaggggtataacctgaaggacgaagaaggccgtctaagagacccggccactatcaccacattgagggtgcccgtgctgcggcctatggacctgatggtagaggccactcctcgccgcgtcttcgcaaacgcacacacctaccatattaattccattagtgtgaatagtgattatgagacttatatgtctgccgatgatctccgcattaacctctggaacttcgaaatcactaaccagtccttcaacattgtggatatcaagccggcgaacatggaggagctgactgaagttataaccgccgccgagtttcatccacaccactgtaacaccttcgtctactcgtcctctaagggtaccatacggctctgtgacatgcgggcttcagcgctgtgcgaccgtcacactaagttttttgaggaaccagaggaccctagcaaccgaagttttttttctgaaatcatctcaagtatttcagacgtcaagttcagccatagcgggaggtatattatgacgagggactacctgaccgtaaaggtctgggatttgaatatggagaatcgcccaatcgagacataccaggtccacgattacctcagatccaagctctgtagcctctacgaaaacgactgtatcttcgataagtttgaatgcgtttggaacggatcggattctgttatcatgactgggagttacaataactttttccgcatgttcgataggaataccaagcgggatgtgactttggaggccagtagagaaaactctaagccaagagccatcctgaaacctagaaaagtgtgtgtcggaggaaaacggcgtaaagatgaaatttccgtggacagtctggacttttcgaaaaaaatcttgcataccgcgtggcatccctcggaaaatatcattgctgtggctgccacaaataacttatatatttttcaggacaaagtgaactag

SEQ ID NO: 96582 - DNA, 1506 bp, Artificial Sequence
  derived and/or modified sequence
atggtgctgcaaccgagcgaacgccattacagggattggaaccaccgacgccttggcccttggtgctctccaaccggatccccagcgcctctgtcttgcgagaccggatgcggtgaaggctcctggatcctcgtgtgtagactacttgttccaacccaggtgagtttactgtccatggaggaggacattgacactcgcaaaatcaataattcattcttgcgggatcattcctacgctaccgaagcggacatcatctctacagttgaattcaatcatacaggtgagctgttggccacaggggataaaggcggaagagttgtgatttttcagcgagaacaggaatctaaaaatcaggtgcaccgacgcggagaatacaatgtgtatagcactttccagtcccatgagcctgaattcgactacctgaaatctctcgaaatcgaggaaaagatcaataaaatccgctggctgccccagcagaatgccgcatacttcctgttatccacaaacgacaagaccgttaaactgtggaaagttagtgagagggataaacgacctgaaggatataatctcaaagacgaagaaggaagacttagagaccccgcaacaatcacgacccttagagttcctgtcctgaggcctatggacctgatggtagaagccacccccagacgcgtgttcgccaatgcacacacctatcacattaactccatctctgtgaacagtgactacgagacctatatgtcggccgacgatctgagaattaacctgtggaacttcgaaatcacgaaccagtcctttaatatcgtcgacatcaagccagctaacatggaagagttgactgaggtcatcacagctgctgagtttcatcctcatcattgcaatacattcgtgtactcttcaagcaagggcaccattcggctttgtgacatgagagccagcgcactctgtgaccgacacacaaagttcttcgaggagcccgaggatccgtccaacaggagcttcttcagcgaaataattagcagcatatcagatgtcaagttctcccactctgggcgatacataatgacaagggattacttgaccgttaaggtgtgggatctgaatatggagaataggccaattgagacctatcaggtccacgactacctgaggtctaagctgtgcagtctctatgaaaatgactgcatttttgacaaattcgaatgtgtctggaacggttccgactccgtgattatgacgggcagttacaacaatttttttcgcatgtttgataggaacactaagcgggatgtgacattggaggcctcccgtgaaaattcaaagcccagagcgattctcaaaccgaggaaagtgtgcgtcggaggcaaaaggagaaaggacgaaatcagtgtggattctctcgacttctctaagaaaatcttgcacactgcctggcatccgtcagaaaacattatcgctgtggcggctacgaataatctctatatattccaggataaggtgaactag

SEQ ID NO: 96583 - DNA, 1506 bp, Artificial Sequence
  derived and/or modified sequence
atggtgcttcagccaagtgaaaggcactatcgagattggaaccacagaaggctcggaccatggtgcagtcccactggctcccctgcccccctctcctgtgagactggctgcggggagggatcatggatacttgtctgccggcttctggttcccacgcaagtaagcctgctgtcaatggaggaggacattgatacccgcaaaatcaacaacagtttcctgcgcgaccacagctatgcgaccgaagctgacattatctctacggtagaattcaaccacacgggagaattactagcgacaggggacaaggggggtcgggttgtaatatttcaacgagagcaggagagtaaaaatcaggttcatcgtaggggtgaatacaatgtttacagcacattccagagccatgaacccgagttcgattacctgaagagtttagaaatagaagaaaaaatcaataaaataagatggctcccccagcagaatgcagcttactttcttctgtctactaatgataaaactgtgaagctgtggaaagtcagcgagcgtgataagaggccagaaggctacaatctgaaagatgaggagggccggctccgggatcctgccaccatcacaaccctgcgggtgcctgtcctgagacccatggacctgatggtggaggccaccccacgaagagtatttgccaacgcacacacatatcacatcaactccatatctgtcaacagcgactatgaaacctacatgtccgctgatgacctgaggattaacctatggaactttgaaataaccaatcaaagttttaatattgtggacattaagccagccaacatggaggagctcacggaggtgatcacagcagccgagttccacccccatcattgcaacaccttcgtgtacagcagcagcaaagggacaatccggctgtgtgacatgcgggcatctgccctgtgtgacaggcacaccaaattttttgaagagccggaagatccaagcaacagatcatttttctctgaaattatctcttcgatttcggatgtgaagttcagccacagtgggaggtatatcatgaccagggactacttgaccgtcaaagtctgggatctcaacatggaaaaccgccccatcgagacttaccaggttcatgactacctccgcagcaagctgtgttccctctatgaaaatgactgcatttttgataaatttgagtgtgtgtggaatgggtcagacagtgtcatcatgacaggctcctacaacaacttcttcaggatgttcgacagaaacaccaagcgtgatgtgacccttgaggcttcgagggaaaacagcaagccccgggctatcctcaaaccccgaaaagtgtgtgtggggggcaagcggagaaaagacgagatcagtgtcgacagtctggactttagcaaaaagatcttgcatacagcttggcatccttcagaaaatattatagcagtggcggctacaaataacctatatatattccaggacaaggttaactag

SEQ ID NO: 96584 - DNA, 1506 bp, Artificial Sequence
  derived and/or modified sequence
atggtgctgcagcccagcgagagacactacagagactggaaccacagaagactgggcccctggtgcagccccaccggcagccccgcccccctgagctgcgagaccggctgcggcgagggcagctggatcctggtgtgcagactgctggtgcccacccaggtgagcctgctgagcatggaggaggacatcgacaccagaaagatcaacaacagcttcctgagagaccacagctacgccaccgaggccgacatcatcagcaccgtggagttcaaccacaccggcgagctgctggccaccggcgacaagggcggcagagtggtgatcttccagagagagcaggagagcaagaaccaggtgcacagaagaggcgagtacaacgtgtacagcaccttccagagccacgagcccgagttcgactacctgaagagcctggagatcgaggagaagatcaacaagatcagatggctgccccagcagaacgccgcctacttcctgctgagcaccaacgacaagaccgtgaagctgtggaaggtgagcgagagagacaagagacccgagggctacaacctgaaggacgaggagggcagactgagagaccccgccaccatcaccaccctgagagtgcccgtgctgagacccatggacctgatggtggaggccacccccagaagagtgttcgccaacgcccacacctaccacatcaacagcatcagcgtgaacagcgactacgagacctacatgagcgccgacgacctgagaatcaacctgtggaacttcgagatcaccaaccagagcttcaacatcgtggacatcaagcccgccaacatggaggagctgaccgaggtgatcaccgccgccgagttccacccccaccactgcaacaccttcgtgtacagcagcagcaagggcaccatcagactgtgcgacatgagagccagcgccctgtgcgacagacacaccaagttcttcgaggagcccgaggaccccagcaacagaagcttcttcagcgagatcatcagcagcatcagcgacgtgaagttcagccacagcggcagatacatcatgaccagagactacctgaccgtgaaggtgtgggacctgaacatggagaacagacccatcgagacctaccaggtgcacgactacctgagaagcaagctgtgcagcctgtacgagaacgactgcatcttcgacaagttcgagtgcgtgtggaacggcagcgacagcgtgatcatgaccggcagctacaacaacttcttcagaatgttcgacagaaacaccaagagagacgtgaccctggaggccagcagagagaacagcaagcccagagccatcctgaagcccagaaaggtgtgcgtgggcggcaagagaagaaaggacgagatcagcgtggacagcctggacttcagcaagaagatcctgcacaccgcctggcaccccagcgagaacatcatcgccgtggccgccaccaacaacctgtacatcttccaggacaaggtgaactag

SEQ ID NO: 96585 - DNA, 462 bp, Artificial Sequence
  derived and/or modified sequence
atgatcgtgagcagcgccctgatgatctggaagggcctgatggtgatcaccggcagcgagagccccatcgtggtggtgctgagcggcagcatggagcccgccttccacagaggcgacctgctgttcctgaccaacagagtggaggaccccatcagagtgggcgagatcgtggtgttcagaatcgagggcagagagatccccatcgtgcacagagtgctgaagatccacgagaagcagaacggccacatcaagttcctgaccaagggcgacaacaacgccgtggacgacagaggcctgtacaagcagggccagcactggctggagaagaaggacgtggtgggcagagccagaggcttcgtgccctacatcggcatcgtgaccatcctgatgaacgactaccccaagttcaagtacgccgtgctgttcctgctgggcctgttcgtgctggtgcacagagagtag

SEQ ID NO: 96586 - DNA, 462 bp, Artificial Sequence
  derived and/or modified sequence
atgatcgtttcttccgccctcatgatttggaaaggcctcatggtgataaccggcagcgagagccccatagtcgtagtgttatcagggtcaatggagcccgcctttcatagaggtgacctgctgttcctcacaaaccgcgtggaggacccgattcgcgtgggggagatcgttgtcttccggattgagggacgagaaattcctatcgtccatcgagttttgaaaatacacgaaaagcagaacggccacattaaattccttactaaaggtgacaataacgccgtggatgatagaggattgtacaaacagggacagcattggctggagaaaaaggatgtggtgggtagagctcgtggctttgttccgtacataggcattgttaccattttgatgaatgattatcccaagttcaagtacgccgttctgttcctgctgggcctgtttgtgctcgtgcaccgcgagtag

SEQ ID NO: 96587 - DNA, 462 bp, Artificial Sequence
  derived and/or modified sequence
atgattgtgtcctctgccctgatgatctggaagggcctgatggtgatcactggaagtgagagccccatcgtggtggtgctgagcggctccatggagcccgccttccacagaggagacctgctcttcctgaccaacagagtggaggaccccatccgggtgggggagatcgtggtgttcagaattgagggccgggagatccccatcgtgcaccgggtgctgaagatccacgagaagcagaatggccacatcaagttcctgaccaagggggacaacaatgctgtggatgaccggggcctgtacaagcagggccagcactggctggagaagaaggatgtggtgggccgggcccggggctttgtgccctacatcggcatcgtgaccatcctgatgaatgactaccccaagttcaagtatgctgtgctcttcctgctgggcctgtttgtgctggtgcaccgggagtag

SEQ ID NO: 96588 - DNA, 462 bp, Artificial Sequence
  derived and/or modified sequence
atgatcgtgagcagcgccctgatgatctggaagggcctgatggtgatcactggcagtgaaagtcctatagtcgttgtcctaagcgggtctatggaaccagcctttcacagaggagacctcttgtttttaacaaaccgagtggaagatcccatccgtgtgggagagattgtggtgttcaggatcgaggggagggaaatccccatcgtccacagggtgctgaagatacacgagaaacagaacgggcacatcaaattcctgacaaagggcgataataacgctgtagacgataggggactgtataagcaaggtcaacactggctggaaaaaaaagacgtggttgggagagctagggggtttgtcccttacatcgggatagtgacaattctcatgaacgattaccccaagtttaagtacgcagttctcttccttctggggcttttcgttctcgtgcaccgcgaatag

SEQ ID NO: 96589 - DNA, 462 bp, Artificial Sequence
  derived and/or modified sequence
atgattgtcagctcagcgctgatgatatggaagggactcatggttataaccggcagcgagagccctattgttgtcgtgttgtctgggtccatggagccggcttttcacagaggggacctcctgttcctaactaatagggtcgaggaccctatcagggtcggcgagatagttgtgtttagaatagaagggagggaaatcccaatcgtgcatagggttctgaaaattcacgaaaagcagaatggacacataaagttcctgacgaaaggcgacaacaacgccgtggacgatagaggtctttacaagcagggccaacattggctcgaaaaaaaggacgtggtcggtagagcgaggggattcgtgccatatattggcatcgttactatcctaatgaatgactatccaaaatttaagtacgccgtgctctttctgctgggcctctttgttctcgtacatcgagaatag

SEQ ID NO: 96590 - protein, 335 aa, Artificial Sequence
  derived and/or modified sequence
MILASVLRSGPGGGLPLRPLLGPALALRARSTSATDTHHVEMARERSKTVTSFYNQSAIDAAAEKPSVRLTPTMMLYAGRSQDGSHLLKSARYLQQELPVRIAHRIKGFRCLPFIIGCNPTILHVHELYIRAFQKLTDFPPIKDQADEAQYCQLVRQLLDDHKDVVTLLAEGLRESRKHIEDEKLVRYFLDKTLTSRLGIRMLATHHLALHEDKPDFVGIICTRLSPKKIIEKWVDFARRLCEHKYGNAPRVRINGHVAARFPFIPMPLDYILPELLKNAMRISDRGGGIAHKDLDRVMDYHFTTAEASTQDPRISPLFGHLDMHSGAQSGPMHG

SEQ ID NO: 96591 - DNA, 1008 bp, Artificial Sequence
  derived and/or modified sequence
atgatcctggccagcgtgctgagaagcggccccggcggcggcctgcccctgagacccctgctgggccccgccctggccctgagagccagaagcaccagcgccaccgacacccaccacgtggagatggccagagagagaagcaagaccgtgaccagcttctacaaccagagcgccatcgacgccgccgccgagaagcccagcgtgagactgacccccaccatgatgctgtacgccggcagaagccaggacggcagccacctgctgaagagcgccagatacctgcagcaggagctgcccgtgagaatcgcccacagaatcaagggcttcagatgcctgcccttcatcatcggctgcaaccccaccatcctgcacgtgcacgagctgtacatcagagccttccagaagctgaccgacttcccccccatcaaggaccaggccgacgaggcccagtactgccagctggtgagacagctgctggacgaccacaaggacgtggtgaccctgctggccgagggcctgagagagagcagaaagcacatcgaggacgagaagctggtgagatacttcctggacaagaccctgaccagcagactgggcatcagaatgctggccacccaccacctggccctgcacgaggacaagcccgacttcgtgggcatcatctgcaccagactgagccccaagaagatcatcgagaagtgggtggacttcgccagaagactgtgcgagcacaagtacggcaacgcccccagagtgagaatcaacggccacgtggccgccagattccccttcatccccatgcccctggactacatcctgcccgagctgctgaagaacgccatgagaatcagcgacagaggcggcggcatcgcccacaaggacctggacagagtgatggactaccacttcaccaccgccgaggccagcacccaggaccccagaatcagccccctgttcggccacctggacatgcacagcggcgcccagagcggccccatgcacggctag

SEQ ID NO: 96592 - DNA, 1008 bp, Artificial Sequence
  derived and/or modified sequence
atgattctggccagtgtgcttaggtcgggtccaggtggagggctacccttgagacccttgctgggccctgcgcttgctctgcgggcaaggtcgactagtgccactgatacacaccacgtagagatggcccgagaaagatcaaaaaccgtgaccagtttctacaatcaatccgcaatagacgccgcggcggagaagccctccgtgaggctgactccaaccatgatgctgtacgcaggccggtcccaggacggatctcacttgctgaagagcgcccggtacctccagcaggagttgccagttagaatagcccatcgcattaagggctttcgatgtctgccttttattattgggtgcaatcccacgattctgcacgtgcacgaactgtacattcgcgcgtttcaaaaactcaccgacttcccgcctattaaagaccaggcggacgaagcccaatattgccaattagtccgacagcttctggacgatcacaaagacgtggtaactctgctagctgagggtctgagagagagccgaaagcatattgaggatgagaagttggttagatacttccttgacaagactctgaccagccgcctcggcatcaggatgctcgcaacgcatcatctagccctgcatgaagacaagcccgacttcgtggggatcatttgtacccggctgtccccaaaaaaaatcattgaaaagtgggtggatttcgcccgacggttgtgtgaacataaatatggcaatgcccccagggtccgaattaacggacatgtagccgcaaggtttccatttatcccgatgccattggactacatcctacctgagctgctgaaaaacgcaatgagaatcagcgatcggggcgggggcatcgcccacaaagacctggatcgcgtgatggactatcattttacaaccgccgaggcatccactcaggatccacgcatttctcctttgttcggacatttagatatgcattctggcgcccaaagcggcccaatgcatggttag

SEQ ID NO: 96593 - DNA, 1008 bp, Artificial Sequence
  derived and/or modified sequence
atgatcctggcctctgtgctgcggagcggccctgggggcggcctgcccctgcggcccctgctgggccctgccctggccctgcgggcccggagcaccagcgccacagacacccaccacgtggagatggcccgggagaggagcaagacagtgaccagcttctacaaccagagcgccattgatgctgctgctgagaagcccagcgtgcggctgacccccaccatgatgctgtatgccggccgcagccaggacggcagccacctgctgaagagcgcccgctacctgcagcaggagctgcctgtgcgcatcgcccaccgcatcaagggcttccgctgcctgcccttcatcatcggctgcaaccccaccatcctgcacgtgcatgagctgtacatccgggccttccagaagctgacagacttcccccccatcaaggaccaggctgatgaggcccagtactgccagctggtgcggcagctgctggatgaccacaaggatgtggtgaccctgctggccgagggcctgcgggagagcaggaagcacattgaagatgagaagctggtgcgctacttcctggacaagaccctgaccagccggctgggcatccgcatgctggccacccaccacctggccctgcacgaggacaagccagactttgtgggcatcatctgcacccggctgagccccaagaagatcatcgagaagtgggtggactttgcccggcggctgtgtgagcacaagtatggaaatgccccccgggtgcgcatcaatggacatgtggccgcccgcttccccttcatccccatgcccctggactacatcctgcctgagctgctgaagaatgccatgaggatcagtgacagaggaggcggcatcgcccacaaggacctggacagagtgatggactaccacttcaccacagctgaggccagcacccaggacccccgcatcagccccctgtttggccacctggacatgcacagcggggcccagagcggccccatgcacggctag

SEQ ID NO: 96594 - DNA, 1008 bp, Artificial Sequence
  derived and/or modified sequence
atgatcctggccagcgtgctgcggagcggccccggcggcggcctgcctttgcggccactgctgggacctgccctggcactacgcgcaagatcaacctccgcaacagatacacatcatgtcgaaatggccagagagcgaagtaagacggtgaccagcttttacaatcagagcgcaatcgatgccgcagctgaaaagccatctgtgagactcactccaactatgatgctgtacgccggccggtcccaggatggatcgcacctgctgaagagcgcaaggtatcttcaacaagagcttcccgtccgaattgctcaccggatcaaaggcttcaggtgtctcccctttatcatcggttgtaacccgacaattttacacgtccatgagctgtacatacgcgcattccagaaattgacagatttcccaccaatcaaagatcaggcggatgaggctcagtattgccagttggtcagacagctcctggacgatcacaaggacgttgtgacattgttggccgaaggactgcgcgagtcacggaaacacatagaggacgagaaactggtccgctacttcctagataaaactctgactagccggcttggcattcgcatgctggccacgcaccatctggccctgcatgaagacaagccagactttgtgggaatcatttgtacaagactgtcaccgaagaaaatcatcgaaaaatgggtagactttgcgcgacgactgtgcgaacataagtacggcaacgctccaagggttcggatcaacggccatgtggccgcacgctttcctttcatccctatgccattggattacatcttgcccgagctgctgaaaaacgcgatgcggatatccgatagagggggcgggatagctcataaagacctagatcgtgtaatggactatcatttcactacagctgaagcctccacacaggatccacggatatccccactattcggacatttggatatgcactccggtgcacaatccggtccaatgcacggatag

SEQ ID NO: 96595 - DNA, 1008 bp, Artificial Sequence
  derived and/or modified sequence
atgattctggcatctgtgctgaggtccggacccggagggggtctgccgttgagacctcttctcggccctgccctggctctgcgtgccagatccacttccgctaccgatactcaccatgtcgaaatggcccgtgagaggtccaaaaccgtgacttccttttacaatcagagcgctattgacgcagcagccgaaaagccctccgtgcgcttaaccccaactatgatgttgtatgccggtaggtcacaagacggaagccacctgctaaaatctgccagatacctgcaacaggaactgcctgtacgaattgcccaccgaatcaaaggattccggtgcttgccctttatcattggttgtaacccaaccatcctgcacgtgcacgagctatacatccgcgcattccaaaaattgactgacttcccaccaatcaaagatcaggccgacgaggcccagtactgtcagctggtgaggcaacttctcgatgaccacaaggacgtggtgactctgctagcggaaggactaagggagtcacgcaagcatatcgaagatgagaaactcgttagatacttcttggacaagaccttaacatctcgtcttgggatacgcatgctggccacacaccatctggccctgcatgaggacaagccagattttgttgggattatatgtacaaggttatcccccaaaaaaattatagaaaagtgggttgatttcgcgcgtcggttgtgcgaacacaagtacggcaatgcccctagagtgaggatcaacggccacgtagcagctcgttttccgtttattcctatgcccctggactatatcctgcccgagcttctgaaaaacgccatgcggatctcagatagaggcggtggcattgcacataaggaccttgatagagtgatggattaccatttcactactgccgaagcctccacacaggatccacgcatctcccccctatttggtcatctggatatgcactctggggcacaaagtggtcctatgcacggctag

SEQ ID NO: 96596 - protein, 115 aa, Artificial Sequence
  derived and/or modified sequence
MAGRPLRIGDQLVLEEDYDETYIPSEQEILEFAREIGIDPIKEPELMWLAREGIVAPLPGEWKPCQDITGDIYYFNFANGQSMWDHPCDEHYRSLVIQERAKLSTSGAIKKKKKK

SEQ ID NO: 96597 - protein, 121 aa, Artificial Sequence
  derived and/or modified sequence
MAGRPLRIGDQLVLEEDYDETYIPSEQEILEFAREIGIDPIKEPELMWLAREGIVAPLPGEWKPCQDITGDIYYFNFANGQSMWDHPCDEHYRSLVIQERAKLSTSGAIKKKKKKKEKKDK

SEQ ID NO: 96598 - protein, 216 aa, Artificial Sequence
  derived and/or modified sequence
MTSICVEGNIASGKTTCLEFFSNATDVEVLTEPVSKWRNVRGHNPLGLMYHDASRWGLTLQTYVQLTMLDRHTRPQVSSVRLMERSIHSARYIFVENLYRSGKMPEVDYVVLSEWFDWILRNMDVSVDLIVYLRTNPETCYQRLKKRCREEEKVIPLEYLEAIHHLHEEWLIKGSLFPMAAPVLVIEADHHMERMLELFEQNRDRILTPENRKHCP

SEQ ID NO: 96599 - DNA, 651 bp, Artificial Sequence
  derived and/or modified sequence
atgaccagcatctgcgtggagggcaacatcgccagcggcaagaccacctgcctggagttcttcagcaacgccaccgacgtggaggtgctgaccgagcccgtgagcaagtggagaaacgtgagaggccacaaccccctgggcctgatgtaccacgacgccagcagatggggcctgaccctgcagacctacgtgcagctgaccatgctggacagacacaccagaccccaggtgagcagcgtgagactgatggagagaagcatccacagcgccagatacatcttcgtggagaacctgtacagaagcggcaagatgcccgaggtggactacgtggtgctgagcgagtggttcgactggatcctgagaaacatggacgtgagcgtggacctgatcgtgtacctgagaaccaaccccgagacctgctaccagagactgaagaagagatgcagagaggaggagaaggtgatccccctggagtacctggaggccatccaccacctgcacgaggagtggctgatcaagggcagcctgttccccatggccgcccccgtgctggtgatcgaggccgaccaccacatggagagaatgctggagctgttcgagcagaacagagacagaatcctgacccccgagaacagaaagcactgcccctag

SEQ ID NO: 96600 - DNA, 651 bp, Artificial Sequence
  derived and/or modified sequence
atgacatctatttgtgtagaaggcaatattgcttctggcaagaccacttgcctcgaatttttttcaaatgccactgatgtggaagttttaaccgaacctgtgtccaaatggagaaatgttcgggggcacaacccactgggcctcatgtatcacgacgcctcaagatgggggctgactcttcagacttacgtccagctaaccatgttggatagacatactaggcctcaggtctcctctgttcgtctgatggaaagatccatacactccgctcgatacatctttgtggagaatctttacagatctgggaagatgcctgaggttgattatgtcgtgctgagcgagtggttcgattggattcttcggaatatggacgtctccgtcgacctgattgtctacttacgcaccaaccctgaaacctgctatcagcgcctcaagaaacgctgtcgcgaagaggagaaggtcattcctctggagtacctagaggccatccaccatttacacgaggaatggctgatcaaaggctcattgtttccaatggccgctccggtgcttgtcatcgaagcagatcatcatatggagagaatgctggaactgttcgaacagaaccgagacaggatcctgacaccggaaaatcgaaaacactgcccctag

SEQ ID NO: 96601 - DNA, 651 bp, Artificial Sequence
  derived and/or modified sequence
atgaccagcatctgtgtggagggcaacatcgccagcggcaagaccacctgcctggagttcttcagcaatgccacagatgtggaggtgctgacagagcctgtgtccaagtggagaaatgtgcggggccacaaccccctgggcctgatgtaccatgatgccagccgctggggcctgaccctgcagacctacgtgcagctgaccatgctggacagacacacccggccccaggtgtcctctgtgcggctgatggagaggagcatccacagcgcccgctacatctttgtggagaacctgtacagaagtggcaagatgcctgaggtggactatgtggtgctgtctgagtggtttgactggatcctgaggaacatggatgtgtctgtggacctgattgtgtacctgcggaccaaccctgagacctgctaccagaggctgaagaagcgctgccgggaggaggagaaggtgatccccctggagtacctggaggccatccaccacctgcacgaggagtggctgatcaagggcagcctcttccccatggccgcccctgtgctggtgattgaggccgaccaccacatggagaggatgctggagctgtttgagcagaacagagaccgcatcctgaccccagagaacaggaagcactgcccctag

SEQ ID NO: 96602 - DNA, 651 bp, Artificial Sequence
  derived and/or modified sequence
atgaccagcatctgcgtggagggcaacatcgccagcggcaagaccacttgcctggaattcttttccaacgccactgatgtcgaggtcctgaccgaacccgtatccaagtggcgaaacgtccgcggacataatcctctcgggttgatgtaccatgacgcaagtaggtggggtctaacactccagacttacgttcagctgactatgctcgaccggcacaccaggccgcaggtctcctcagtgcgtctgatggagcgctctatccatagtgccagatatatttttgttgaaaatctgtaccggagcggtaagatgccagaggtggactacgttgttctctctgaatggtttgactggatattaaggaacatggatgtgagtgtggatctgatagtgtacctgcgtaccaatccagagacttgctaccagcgcctcaaaaaaaggtgtagggaagaagagaaggtcattcccttggagtatctggaggcaatacatcaccttcacgaagaatggctgataaaaggcagcctctttccaatggctgcaccagtattggttatcgaggccgatcatcacatggaacgtatgctggaactgtttgagcagaaccgtgatcgcatcctcactcctgagaacaggaaacattgtccttag

SEQ ID NO: 96603 - DNA, 651 bp, Artificial Sequence
  derived and/or modified sequence
atgacgtctatctgtgtagagggcaatatagccagcggtaaaaccacatgtctggagttcttctctaatgctaccgatgtggaagtactgactgagcccgtaagcaagtggcggaacgtcagaggccacaacccactgggccttatgtatcacgatgcaagccgctggggcctaacattgcagacctacgtccagttaacaatgctcgatcgtcacaccagaccacaggtgtcctcagtgcgactcatggaacgctcaattcatagtgcccgttacattttcgtcgagaacttgtaccgatccggcaagatgcccgaggtggactacgttgttctgagcgaatggttcgattggattctgcgcaacatggacgtgagcgtggacctgatcgtttaccttcggacaaatccagaaacctgctatcagagactgaagaaaagatgcagggaagaagaaaaggtcatcccactggaataccttgaagccattcatcacctgcatgaggagtggctgattaagggctctttgtttcctatggctgctccagtactggtgattgaagccgatcaccatatggagcggatgctggaacttttcgagcagaacagagatcgcatcctgaccccagagaatagaaagcattgcccatag

SEQ ID NO: 96604 - DNA, 2266 bp, Artificial Sequence
  derived and/or modified sequence
agtatttctcctcttgctgagatgaaatgcgaccgggtctctttaagggccaggcgccgggatccaggcggcgcccaacggctggactagcagtcgtccgcgccgactcgcacaagaaggaaccccgggcctctggatccgctcgcccggctatgctgctgtggccgctgcggggctgggccgcccgggcgctgcgctgctttgggccgggaagtcgcgggagcccggcctcaggccccgggccgcggagggtgcagcgccgggcctggcctcccgataaagaacaggaaaaagagaaaaaatcagtgagacggcgtcttgctgtgttgcccaggctggcctccaactcctgggctcaagtgatcctctggcatcagcctcctgagtagctgtgatgacaagtatctgtgtcgagggcaatattgcaagtgggaagacgacatgcctggaattcttctccaacgcgacagacgtcgaggtgttaacggagcctgtgtccaagtggagaaatgtccgtggccacaatcctctgggcctgatgtaccacgatgcctctcgctggggtcttacgctacagacttatgtgcagctcaccatgctggacaggcatactcgtcctcaggtgtcatctgtacggttgatggagaggtcgattcacagcgcaagatacatttttgtagaaaacctgtatagaagtgggaagatgccagaagtggactatgtagttctgtcggaatggtttgactggatcttgaggaacatggacgtgtctgttgatttgatagtttaccttcggaccaatcctgagacttgttaccagaggttaaagaagagatgcagggaagaggagaaggtcattccgctggaatacctggaagcaattcaccatctccatgaggagtggctcatcaaaggcagccttttccccatggcagcccctgttctggtgattgaggctgaccaccacatggagaggatgttagaactctttgaacaaaatcgggatcgaatattaactccagagaatcggaagcattgcccataggaggcaaaaggtctatggctcatgtctgaaaaatgcctgctgctgccaagttagctattgggagcaatctggaaaaacttgctcccaggagggctttgtgtctggccagcttgattttcctaatggtctcatctcctttgctagtgtctttgtcatgcgtctctggccctcgtgggtaaatgacaaacgggaccaatgggtttgccaagccctttgctgttcgcagcctcacattcccccggtgcctctcccatggctttgtgctgctgagtcgctctcatgaagcccttagggagagcacctgttgtgtgcctgacaccacgctggagctgtgtaccaatcgtctcagccttcattaggaggccgaggtaggagtcttatatcccaggtgaggaatttgaagctcagaaaggttgaggggctccccagaggtcacacagcctgtgtgcagtggagctggcaccattcagactttcagccgactcagcaactttcccttgccctgggctgcctcctcctgagagctgttccccaccgccctgcctcttccggttggaggctctcatgtctctttggggagagctggcagtgtgcggagctgataacattttcccaatattgagcagttcccaaggacagtcagcatttctagacttccacaaaattatgctgcatttggctggagcccggtgttcagtggtttccctgcccgaggtcgctgcagccccatctaccacatcttcatgtggacattgagattcacatgctggctcctgaagggtgctcagtctccttggtgattaaggtcctgcttgaactgctgccaactccatgtcagggaagtcgcttttggtgcctggctggtttgcccagagccaagctggggcaaggggcagccagccctggcttccaaggctcccgtactgtctgtgtccttgtataaggagctttgctcttggaattactgaaagtctgtggcccaagagagagacacaagtggccttaagtctttttgaagtgttatttcatccagggaaatgcctcgagccatagagcctgaaatcatctttgttggctcagaaaataccttagcttcactcagctggactgcattgaaggcgaggctgccccttggatcaagcagaaaacaagagaaagaaagaacgttccctttggggatagtctggaaagttgggatttgcaaataaaggctctggaagc

SEQ ID NO: 96605 - DNA, 636 bp, Artificial Sequence
  derived and/or modified sequence
atgcactgcaccgccttcgccaccgccgacgagtaccacctgggcaacctgagccaggacctggccagccacggctacgtggaggtgaccagcctgcccagagacgccgccaacatcctggtgatgggcgtggagaacagcgccaaggagggcgaccccggcaccatcttcttcttcagagagggcgccgccgtgttctggaacgtgaaggacaagaccatgaagcacgtgatgaaggtgctggagaagcacgagatccagccctacgagatcgccctggtgcactgggagaacgaggagctgaactacatcaagatcgagggccagagcaagctgcacagaggcgagatcaagctgaacagcgagctggacctggacgacgccatcctggagaagttcgccttcagcaacgccctgtgcctgagcgtgaagctggccatctgggaggccagcctggacaagttcatcgagagcatccagagcatccccgaggccctgaaggccggcaagaaggtgaagctgagccacgaggaggtgatgcagaagatcggcgagctgttcgccctgagacacagaatcaacctgagcagcgacttcctgatcacccccgacttctactgggacagagagaactag

SEQ ID NO: 96606 - DNA, 636 bp, Artificial Sequence
  derived and/or modified sequence
atgcactgcaccgccttcgccactgccgatgagtaccacctcggcaacctttcccaggacctagcttctcatggatatgtcgaggtcaccagtctgcctcgggatgcggctaacatactcgtgatgggtgtggaaaattccgccaaagagggagatccaggaaccatctttttttttagagaaggcgccgctgttttttggaacgttaaggataagaccatgaaacatgtcatgaaggtgctcgaaaagcacgaaattcagccctacgaaattgccttggtccactgggaaaatgaggagctgaattatatcaaaattgagggccagagcaagctccaccgcggcgaaattaagctcaattcagagctcgatttagacgacgctatactggagaagttcgcattcagtaatgcattatgcctgagtgtaaagcttgcaatctgggaggcttctctggacaagttcatcgagtccatccagagtattcccgaggctctgaaagccgggaaaaaggtgaagttgagccacgaggaagtcatgcaaaagatcggagaattgtttgcactaaggcaccggattaacctgagttccgacttcctgatcacccccgacttttattgggatagagaaaattag

SEQ ID NO: 96607 - DNA, 636 bp, Artificial Sequence
  derived and/or modified sequence
atgcactgcacagcctttgccacagcagatgagtaccacctgggcaacctgagccaggacctggccagccacggctacgtggaggtgaccagcctgcccagagatgctgccaacatcctggtgatgggcgtggagaacagcgccaaggagggggaccccggcaccatcttcttcttccgggagggcgctgctgtgttctggaatgtgaaggacaagaccatgaagcacgtgatgaaggtgctggagaagcatgagatccagccctatgaaattgccctggtgcactgggagaatgaggagctgaactacatcaagattgagggccagagcaagctgcacagaggagagatcaagctgaacagcgagctggacctggatgatgccatcctggagaagtttgccttcagcaatgccctgtgcctgtctgtgaagctggccatctgggaggccagcctggacaagttcatcgagagcatccagagcatccctgaggccctgaaggccggcaagaaggtgaagctgagccatgaggaggtgatgcagaagattggagagctgtttgccctgcggcaccgcatcaacctgagcagtgacttcctgatcaccccagacttctactgggaccgggagaactag

SEQ ID NO: 96608 - DNA, 636 bp, Artificial Sequence
  derived and/or modified sequence
atgcactgcaccgccttcgccaccgccgacgagtaccacctgggcaacttatcacaggacttggcctcacacggctacgttgaggttaccagcctcccccgggatgcagccaacattttagttatgggagttgagaactcagctaaagagggggatcccggcacaatatttttcttcagagagggggctgccgtgttctggaacgtaaaagataaaaccatgaaacatgtcatgaaagttctggagaagcacgagattcagccctatgagattgcactggtgcactgggaaaacgaggaacttaattatatcaagatagagggccagtctaaactgcaccgaggcgagattaaattgaactccgaactggacctggacgatgccattctagaaaagtttgctttttcgaacgcattgtgcttaagcgttaagctggctatctgggaggcatctctcgacaagtttattgagtctatccaatcaatacccgaggccctaaaggccggaaaaaaggtgaaacttagccacgaggaggtcatgcagaaaataggagaattgtttgcactgagacatcggattaatctgtcctcggacttcctcattactcctgatttttactgggaccgagagaactag

SEQ ID NO: 96609 - DNA, 636 bp, Artificial Sequence
  derived and/or modified sequence
atgcattgtacagcattcgccacagctgacgagtaccaccttggtaatctttcccaagacctagccagccacggttatgttgaggtgacctcgctgccacgcgacgcggcaaacatacttgtaatgggtgtggagaatagtgccaaagagggtgaccccggaaccatattctttttccgtgagggggcagccgtcttctggaacgtcaaggataagacaatgaaacatgtgatgaaagtcttggaaaagcacgagatacagccctacgaaatcgctttagtgcattgggagaacgaagaactaaattacatcaagatcgagggacagtcaaagcttcatagaggtgaaataaagctcaatagcgagctggatctggatgatgccattctggagaaattcgctttctccaacgctctgtgcctttcagtgaagctggcgatttgggaggctagtctggataaattcatcgaatcaattcagtctatcccagaggcactgaaagccggaaaaaaggtcaagctgtctcacgaggaagtaatgcaaaagatcggcgagttattcgccttgcgacaccgcattaatcttagttccgatttcctgatcacacccgatttctactgggaccgggaaaattag

SEQ ID NO: 96610 - DNA, 1413 bp, Artificial Sequence
  derived and/or modified sequence
atcaactttaaagatattttaaacttgatgaagacttctgaatctatcagaaaacaggttagaatgtctgtcttcaagtcttgattctgaaaagtagcccctgagcctgtttcattttggctgtgtttttattactgtgcagctgacaccccttggaaaggacctaatgcactgcacagcatttgcaacggcagatgagtatcatctgggaaatctgtctcaagatctggcctcccacggatatgttgaagtaacaagcttgcctagaggtacttcttcttgaacctggggccaaatgcagcaaatattttggtgatgggtgtggaaaattctgcaaaagaaggtgatcctggaacaatattcttcttcagggaaggagctgctgtgttttggaatgtgaaagacaaaactatgaagcatgtgatgaaagttctagaaaaacatgaaattcagccctatgaaatcgcactggtacactgggaaaatgaagaacttaactacataaaaatagagggacagtcaaaacttcacaggggggaaatcaagttaaattcagagctggatttagatgatgccattctagagaagtttgctttctccaatgctctatgcctttctgtaaaactggcaatttgggaagcatcactggataaatttattgaatctattcagtcaattcctgaggctttaaaagctgggaagaaagtgaaactatctcatgaagaagttatgcagaaaatcggtgaactctttgctctaaggcaccgtataaacttgagttcagacttcctgattactcctgatttctactgggacagagaaaacctggaaggactttacgataaaacgtgtcaattccttagcattggccgaagagttaaggtcatgaatgaaaaacttcagcactgcatggaactaacagatctaatgcggaatcacctgaatgagaagagggcactccgcttggagtggatgattgtcatcctcattaccatagaggtaatgtttgagctgggacgagtatttttctgatcaagtgataaccaaagtgtcactgcaagagatattcaagttctacaatcaaaaattaaatgttcggcccggcgcggtgcctcatgcctgtaatcccagcactttcggaggccaagaagggtggcttgagatgagatcaggagctcaagacaagcctggccaacatggtgaaaccccatctctactaaaaataccaaaattagccaggtgtgttggcacacgcccgtcatctcagctactcaggaggctgaggcaggagaatctcttgaacttgggaggcggaggttgcagtgagctaagatcacaccactgcactccagccagggcaacagtgagactcagtctcaaaaataaacaataaaataaataaataaatgttca

SEQ ID NO: 96611 - DNA, 743 bp, Artificial Sequence
  derived and/or modified sequence
gggttggctgcagtagtgagaggctgggggtgcggctctttccctgcagtcctgccgaggaagcgtgcgtccctggcgcttccttcttctcttccggcggagaggacctaatgcactgcacagcatttgcaacggcagatgagtatcatctgggaaatctgtctcaagatctggcctcccacggatatgttgaagtaacaagcttgcctagagatgcagcaaatattttggtgatgggtgtggaaaattctgcaaaagaaggtgatcctggaacaatattcttcttcagggaaggagctgctgtgttttggaatgtgaaagacaaaactatgaagcatgtgatgaaagttctagaaaaacatgaaattcagccctatgaaatcgcactggtacactgggaaaatgaagaacttaactacataaaaatagagggacagtcaaaacttcacaggggggaaatcaagttaaattcagagctggatttagatgatgccattctagagaagtttgctttctccaatgctctatgcctttctgtaaaactggcaatttgggaagcatcactggataaatttattgaatctattcagtcaattcctgaggctttaaaagctgggaagaaagtgaaactatctcatgaagaagttatgcagaaaatcggtgaactctttgctctaaggcaccgtataaacttgagttcagacttcctgattactcctgatttctactgggacagagaaaac

SEQ ID NO: 96612 - protein, 2845 aa, Artificial Sequence
  derived and/or modified sequence
MALGKVLAMALVLALAVLGSLSPGARAGDCKGQRQVLREAPGFVTDGAGNYSVNGNCEWLIEAPSPQHRILLDFLFLDTECTYDYLFVYDGDSPRGPLLASLSGSTRPPPIEASSGKMLLHLFSDANYNLLGFNASFRFSLCPGGCQSHGQCQPPGVCACEPGWGGPDCGLQECSAYCGSHGTCASPLGPCRCEPGFLGRACDLHLWENQGAGWWHNVSARDPAFSARIGAAGAFLSPPGLLAVFGGQDLNNALGDLVLYNFSANTWESWDLSPAPAARHSHVAVAWAGSLVLMGGELADGSLTNDVWAFSPLGRGHWELLAPPASSSSGPPGLAGHAAALVDDVWLYVSGGRTPHDLFSSGLFRFRLDSTSGGYWEQVIPAGGRPPAATGHSMVFHAPSRALLVHGGHRPSTARFSVRVNSTELFHVDRHVWTTLKGRDGLQGPRERAFHTASVLGNYMVVYGGNVHTHYQEEKCYEDGIFFYHLGCHQWVSGAELAPPGTPEGRAAPPSGRYSHVAAVLGGSVLLVAGGYSGRPRGDLMAYKVPPFVFQAPAPDYHLDYCSMYTDHSVCSRDPECSWCQGACQAAPPPGTPLGACPAASCLGLGRLLGDCQACLAFSSPTAPPRGPGTLGWCVHNESCLPRPEQARCRGEQISGTVGWWGPAPVFVTSLEACVTQSFLPGLHLLTFQQPPNTSQPDKVSIVRSTTITLTPSAETDVSLVYRGFIYPMLPGGPGGPGAEDVAVWTRAQRLHVLARMARGPDTENMEEVGRWVAHQEKETRRLQRPGSARLFPLPGRDHKYAVEIQGQLNGSAGPGHSELTLLWDRTGVPGGSEISFFFLEPYRSSSCTSYSSCLGCLADQGCGWCLTSATCHLRQGGAHCGDDGAGGSLLVLVPTLCPLCEEHRDCHACTQDPFCEWHQSTSRKGDAACSRRGRGRGALKSPEECPPLCSQRLTCEDCLANSSQCAWCQSTHTCFLFAAYLARYPHGGCRGWDDSVHSEPRCRSCDGFLTCHECLQSHECGWCGNEDNPTLGRCLQGDFSGPLGGGNCSLWVGEGLGLPVALPARWAYARCPDVDECRLGLARCHPRATCLNTPLSYECHCQRGYQGDGISHCNRTCLEDCGHGVCSGPPDFTCVCDLGWTSDLPPPTPAPGPPAPRCSRDCGCSFHSHCRKRGPGFCDECQDWTWGEHCERCRPGSFGNATGSRGCRPCQCNGHGDPRRGHCDNLSGLCFCQDHTEGAHCQLCSPGYYGDPRAGGSCFRECGGRALLTNVSSVALGSRRVGGLLPPGGGAARAGPGLSYCVWVVSATEELQPCAPGTLCPPLTLTFSPDSSTPCTLSYVLAFDGFPRFLDTGVVQSDRSLIAAFCGQRRDRPLTVQALSGLLVLHWEANGSSSWGFNASVGSARCGSGGPGSCPVPQECVPQDGAAGAGLCRCPQGWAGPHCRMALCPENCNAHTGAGTCNQSLGVCICAEGFGGPDCATKLDGGQLVWETLMDSRLSADTASRFLHRLGHTMVDGPDATLWMFGGLGLPQGLLGNLYRYSVSERRWTQMLAGAEDGGPGPSPRSFHAAAYVPAGRGAMYLLGGLTAGGVTRDFWVLNLTTLQWRQEKAPQTVELPAVAGHTLTARRGLSLLLVGGYSPENGFNQQLLEYQLATGTWVSGAQSGTPPTGLYGHSAVYHEATDSLYVFGGFRFHVELAAPSPELYSLHCPDRTWSLLAPSQGAKRDRMRNVRGSSRGLGQVPGEQPGSWGFREVRKKMALWAALAGTGGFLEEISPHLKEPRPRLFHASALLGDTMVVLGGRSDPDEFSSDVLLYQVNCNAWLLPDLTRSASVGPPMEESVAHAVAAVGSRLYISGGFGGVALGRLLALTLPPDPCRLLSSPEACNQSGACTWCHGACLSGDQAHRLGCGGSPCSPMPRSPEECRRLRTCSECLARHPRTLQPGDGEASTPRCKWCTNCPEGACIGRNGSCTSENDCRINQREVFWAGNCSEAACGAADCEQCTREGKCMWTRQFKRTGETRRILSVQPTYDWTCFSHSLLNVSPMPVESSPPLPCPTPCHLLPNCTSCLDSKGADGGWQHCVWSSSLQQCLSPSYLPLRCMAGGCGRLLRGPESCSLGCAQATQCALCLRRPHCGWCAWGGQDGGGRCMEGGLSGPRDGLTCGRPGASWAFLSCPPEDECANGHHDCNETQNCHDQPHGYECSCKTGYTMDNMTGLCRPVCAQGCVNGSCVEPDHCRCHFGFVGRNCSTECRCNRHSECAGVGARDHCLLCRNHTKGSHCEQCLPLFVGSAVGGGTCRPCHAFCRGNSHICISRKELQMSKGEPKKYSLDPEEIENWVTEGPSEDEAVCVNCQNNSYGEKCESCLQGYFLLDGKCTKCQCNGHADTCNEQDGTGCPCQNNTETGTCQGSSPSDRRDCYKYQCAKCRESFHGSPLGGQQCYRLISVEQECCLDPTSQTNCFHEPKRRALGPGRTVLFGVQPKFTNVDIRLTLDVTFGAVDLYVSTSYDTFVVRVAPDTGVHTVHIQPPPAPPPPPPPADGGPRGAGDPGGAGASSGPGAPAEPRVREVWPRGLITYVTVTEPSAVLVVRGVRDRLVITYPHEHHALKSSRFYLLLLGVGDPSGPGANGSADSQGLLFFRQDQAHIDLFVFFSVFFSCFFLFLSLCVLLWKAKQALDQRQEQRRHLQEMTKMASRPFAKVTVCFPPDPTAPASAWKPAGLPPPAFRRSEPFLAPLLLTGAGGPWGPMGGGCCPPAIPATTAGLRAGPITLEPTEDGMAGVATLLLQLPGGPHAPNGACLGSALVTLRHRLHEYCGGGGGAGGSGHGTGAGRKGLLSQDNLTSMSL

SEQ ID NO: 96613 - DNA, 8538 bp, Artificial Sequence
  derived and/or modified sequence
atggcactcggcaaagttttggccatggcgctggttctggcgctggctgttttgggctcgctgtctcctggcgcacgcgccggggattgtaaaggacaacgccaggttctgcgcgaggcacctggattcgtgacagacggagcagggaactattccgtgaacggcaactgcgaatggctgatcgaagccccctctccccagcaccggattctcctcgattttttgtttttagacactgagtgcacctatgattatctcttcgtgtacgacggcgactcaccccgggggccattactggcctctctctccggcagtacgagacccccaccaattgaggcatcgtccggtaagatgctgctacatttattcagtgacgctaactataatctgctagggttcaacgcttccttcagattttcactgtgcccaggcggatgccagtcacacggccagtgccagccacccggcgtttgcgcttgtgagccgggctggggtgggcccgactgtgggctgcaagagtgctctgcctactgcggctcccatggtacctgcgctagcccactcggaccttgcaggtgtgagcccggattcctcgggcgagcctgtgatcttcacctgtgggagaatcagggggccgggtggtggcataacgttagcgccagagacccagcgttttccgcgcgaataggcgccgccggcgccttcttaagtcctcctggcctactcgccgtattcggagggcaggatctgaacaacgccctgggcgatctagtgctatacaacttttctgcaaatacttgggaatcctgggacctgtcacctgcgccagccgccaggcattctcacgttgcagtcgcctgggcaggatccctcgtattgatgggcggagaactcgccgatggatctctcactaatgacgtttgggccttttcacccctgggaagaggccactgggaactcttagctcccccggcaagcagttcgtccgggccccctggtctggccggacacgccgcagcgctggtggatgatgtctggctatatgtgtcaggaggcaggacgccccatgacctcttttcttctgggctctttagatttaggctggactccacctctggaggatattgggaacaggtgattcccgctgggggccgccctccagccgccactggtcactctatggtgttccatgctcccagcagggctttgttagtacacggtgggcatagacctagcactgcccgattctccgtgcgagttaattccacagaactgttccacgtggacaggcatgtatggaccaccctgaaaggccgcgacggcctccagggcccaagggaacgggcatttcatactgcatctgtgctcggaaactatatggttgtttatggcggcaatgtgcacactcactatcaggaggagaagtgctatgaagacggaatatttttttaccacctcggctgccaccaatgggtttccggtgcagagttggcgccacccggcacccccgagggtagggccgctcccccttcaggacgctactcacacgttgctgccgtattgggaggaagcgtgttgctggttgccgggggatactctggacgtcccaggggcgacttaatggcctataaggttccaccattcgtattccaggccccagctcccgactaccatctggactattgcagcatgtataccgatcactccgtgtgctctagagatccagagtgtagctggtgtcagggggcctgtcaggccgccccccctcccggcacgcccttgggtgcctgtcctgcagctagctgtctgggcctggggcgcttactgggcgactgtcaggcctgcctggctttcagcagtcctactgctccaccacgggggccgggcaccctcggatggtgcgttcacaatgaatcatgcttgcctagacctgagcaggcaaggtgtcgtggagagcagataagtgggaccgttggatggtggggccctgctcctgtttttgtcacaagcctggaggcctgtgttactcagtcctttctgccaggcctgcatttgcttacatttcagcagccacccaacacaagccagcccgataaagtctccatcgttcgcagcacgacgattactctgacacctagcgcagaaactgacgtaagcctagtttacagaggtttcatttatcccatgctgccagggggcccaggcgggcccggcgctgaagatgtcgccgtttggactagggcgcagcgactgcatgtgctggccagaatggcccgaggccccgacaccgagaacatggaagaggttgggagatgggtcgcccatcaggagaaagagactaggcgcctacaaaggcccggaagcgctaggttgtttcctctgcccggcagggaccacaaatatgctgtggagatccagggtcagctgaacggcagcgccggacccgggcatagtgagctcacgctattgtgggacaggacaggcgtgcctggaggcagcgagatttccttcttctttttggagccctaccgtagttctagctgcacaagctactcttcctgcctgggctgcctggctgaccagggatgcgggtggtgtctcacttcggccacctgtcatctgcggcagggcggggcccattgcggcgacgacggcgccggaggcagtctgcttgtcctggttccaactctgtgcccactatgcgaagagcaccgggactgtcacgcctgcactcaggatccgttttgtgagtggcaccaaagtacctctagaaaaggtgacgccgcatgttcacggcgcggaaggggaagaggcgccctcaaaagccctgaagaatgcccccccctatgcagccaacgcctgacatgtgaggattgtttggccaatagttcccaatgcgcttggtgtcaaagtacgcatacttgttttctgttcgccgcctacttagccaggtacccacatggaggttgcaggggatgggacgacagcgtccactccgaaccacggtgcaggagttgtgatgggtttttaacgtgccacgagtgtctccagagccacgagtgcggctggtgcggcaatgaggacaacccaaccctcggtcgctgcctccaaggcgatttttccggacccttagggggggggaactgcagtctgtgggtgggcgaggggctcggcctgcccgtggccctgcctgctcgttgggcctatgcaaggtgcccagacgtggacgagtgccggctcgggctcgctcgatgtcatccccgcgctacatgcttgaatacacctctcagttatgagtgccattgtcagagaggttatcagggcgacggaatctcacattgcaaccggacctgcctcgaggactgtgggcatggagtgtgttctggcccaccagattttacttgtgtatgtgatttgggatggacgtcagatctgcccccccccactcccgcgccagggccccccgctccacgctgctcccgggattgcggatgttctttccacagtcactgtcggaaacgagggcccggtttctgcgacgagtgtcaggactggacatggggcgagcattgtgagagatgtcggcccgggagctttgggaacgccacagggagccgcggttgcagaccttgtcaatgcaacggacacggggaccccaggcgcggccactgcgacaacctctcaggcctgtgtttttgtcaggatcacaccgagggcgctcactgccagctgtgcagcccagggtactacggcgatccaagagctggcggctcctgcttccgcgaatgcgggggtagagccctgcttacaaatgtcagctctgttgccctgggctcacgccgagtgggcggacttcttcctcctggcgggggggcggcacgggctgggccggggctctcttattgcgtgtgggtggtgtcggctacagaagagttacagccctgtgctccggggactctttgtcctccactgacacttacctttagccccgacagctctaccccttgtactttgtcttacgtgttagctttcgacgggtttccccggttcttggatactggagttgtacagagtgatcgatctcttatcgctgcattttgcggccaacgccgcgaccgcccgctgacagtgcaagccctatctgggctgcttgttcttcactgggaggcgaatggctcatcgtcctggggctttaacgcaagtgttggatccgccagatgcggtagtggagggccaggatcctgtcctgtaccacaggaatgtgtgcctcaagatggcgctgctggggcaggactgtgtcggtgcccgcagggctgggcagggcctcactgcaggatggcactgtgcccagagaactgtaatgcacataccggggccggtacatgcaaccagagcctgggtgtttgcatttgcgccgaaggattcgggggccccgattgtgcaacaaagctggatggcggtcaactcgtgtgggaaactttgatggatagccgcctgtctgccgatacagcatccagattcctgcacaggctcgggcatacaatggttgacggccccgacgcgacactctggatgttcggaggcttaggcctaccccagggcttactgggaaatctgtacagatatagcgtttccgaaaggcgctggacgcaaatgctcgccggggctgaggatggagggccaggtccctcacccagatctttccacgctgctgcctatgtccccgccggcagaggtgccatgtacctgctgggcggcctcactgctggcggagtcaccagggacttctgggtgctaaatctgacaacacttcagtggcggcaggaaaaggccccacagactgtcgagcttcccgccgtggccggacacaccctgacggcacggcgtgggctgtccttgctgcttgtcggtggctacagccctgaaaacggttttaaccaacagttactggaataccagctggccaccggcacttgggtgtccggcgcccagtccggcacccccccaacaggcttatacgggcattcagctgtgtaccacgaagccaccgactctctttacgtcttcgggggatttcgcttccatgtggaactcgctgccccgtccccagagctgtactctctccactgccccgatcgcacctggtcacttctggctccctctcagggcgccaaaagggatcgcatgcgtaatgttcgaggctcctctagaggcctcggccaggtacctggggagcagcctggttcgtggggcttccgagaagttcgaaaaaaaatggccctgtgggcagctctggcgggtacaggagggtttctggaggagatttccccccacctcaaagagccacgcccacgcctgttccatgcgagcgctttgctcggagatactatggttgttttgggtggacgaagcgacccagacgagttcagctctgatgtactgctataccaggtgaactgcaatgcctggctgctgccagacctcactcggtctgcctccgtcgggcctccaatggaagaaagtgttgctcacgctgtggccgccgtcggctcccgactctatatcagtggaggctttgggggcgttgccttaggaagactcctggcactcacactgccgcccgatccatgtagactacttagctccccagaggcctgcaaccagtccggggcctgcacctggtgccacggcgcctgcctgtccggagaccaggcccataggttgggatgcggcggctccccctgctctccgatgccacgtagcccggaggagtgtcgtcgtctccggacatgttcagagtgcctggcaaggcacccccgaacactgcagccaggtgacggcgaggcttccacccctcggtgtaagtggtgtacaaactgtcctgaaggggcttgcatcggtaggaatggctcctgcaccagcgagaacgactgtagaatcaatcaacgggaagtgttctgggctggaaattgctctgaggcggcctgtggcgcagcagattgtgagcagtgcacaagggaggggaaatgcatgtggactaggcaattcaagagaacaggagaaacccggcggattctgtctgtacagcctacatacgattggacatgtttttcccacagcctcttaaacgtctcccccatgccagttgaatcatcaccccccctcccttgcccgacaccctgccacttgctgccaaattgtaccagttgcttggacagcaaaggtgcggatggaggctggcagcactgtgtttggtctagctccctgcagcaatgtctctctccaagctacctgcccctacggtgcatggctggagggtgcggccgcttgctgagagggcctgagtcctgctctttgggctgcgcccaggcgacccagtgtgccctttgcctcaggagaccacattgcgggtggtgcgcttggggaggacaggatggtgggggaaggtgtatggaaggtggcctgtcaggcccccgtgacgggctgacctgcgggaggcctggcgcttcctgggcatttctcagctgccccccggaggatgagtgcgctaacggccatcacgattgtaacgagacacagaactgtcacgaccagccccatgggtacgaatgcagctgcaagacagggtacaccatggacaacatgacaggcctgtgtagaccagtgtgtgcgcagggatgcgttaatggatcctgcgtagaacctgatcattgtcggtgccatttcgggttcgttggtaggaattgttccactgagtgccggtgcaaccgccattcagagtgtgcaggagttggcgcccgagatcactgtctcctatgtagaaaccacacaaaaggctctcactgcgaacaatgtttacccctgtttgtcggtagcgccgtgggcggtgggacgtgccgcccctgtcacgcattttgcaggggtaacagccatatttgtatctcacgcaaagagctccagatgtctaagggggagccgaaaaaatactctttggacccagaggaaattgagaattgggtaaccgaggggccaagcgaagatgaggctgtctgtgttaactgtcagaacaacagttacggcgaaaagtgcgaaagttgtctgcagggctactttctgctggacggcaaatgcaccaagtgccagtgtaacggccacgcggatacatgtaatgagcaggatggaaccggctgcccatgtcagaacaacactgagacaggaacctgtcagggcagttccccgagtgacagaagagactgttataaatatcagtgtgcaaagtgtagggagtccttccacggcagtcctctgggggggcagcaatgttatcgtcttattagcgttgagcaggagtgctgtcttgaccccacgtcacaaaccaattgttttcacgagccgaagcgaagagcactgggacccggacggacagtgctgtttggagttcagcccaaatttaccaacgtcgatatccggctgaccctagatgttacttttggcgctgtcgacttgtacgtcagcaccagttatgacacatttgtggtccgagtagcacccgataccggggtgcacacagtgcacatccagcctccccccgcccccccccccccccccccaccagccgacggtgggccaagaggggccggcgaccctggtggagccggcgctagttccggccccggtgctccagctgagccaagggtgcgagaagtgtggccgcgcggactaattacttatgtaactgtcactgaaccctcggccgttctggttgtccgaggcgtccgggatcgccttgtgataacctacccccacgaacatcacgccctgaagtcgtctcgtttttaccttcttctgctcggcgtgggcgacccgtcaggaccaggggccaacggttccgctgactcccagggcctactgttcttccggcaggaccaggcccatatcgacctgttcgtgttctttagtgtcttctttagctgtttcttcctattcctgtccctgtgcgtcttgctgtggaaggccaaacaggctctggaccagcggcaggagcagcgccgacatctgcaggaaatgacaaagatggcgagtagacctttcgccaaagttacagtctgttttccgcctgatcccacagccccagcttcagcctggaagcctgccgggctcccaccacctgcatttagaaggtccgagccttttctcgctcctctactccttacaggtgctggtggcccgtggggtcctatgggcggcggatgttgccctccagcgatcccagccacaaccgccggcctgcgcgcaggaccaattactctggaacctaccgaggacggtatggccggggttgccacactgctgctccagctgccaggtggtccacacgccccaaatggagcctgccttgggtcagcactggtgaccctccgccatagattgcacgaatattgcggtgggggcggtggggctggaggaagcgggcatggaacgggcgccgggcgtaaaggcctgttgagccaagataatctgacatccatgagcctctag

SEQ ID NO: 96614 - DNA, 8538 bp, Artificial Sequence
  derived and/or modified sequence
atggccctgggcaaggtgctggccatggccctggtgctggccctggccgtgctgggcagcctgagccctggggcccgggccggggactgcaagggccagaggcaggtgctgcgggaggcccctggctttgtgacagatggagctggcaactacagcgtgaatggaaactgtgagtggctgattgaggcccccagcccccagcaccgcatcctgctggacttcctgttcctggacacagagtgcacctatgactacctgtttgtgtatgatggagacagcccccggggccccctgctggccagcctgagcggcagcacccggcccccacccatcgaggccagcagcggcaagatgctgctgcacctgttcagtgatgccaactacaacctgctgggcttcaatgccagcttccgcttcagcctgtgccctgggggctgccagagccacggccagtgccagcccccaggagtgtgtgcctgtgagcccggctggggcggccctgactgtggcctgcaggagtgcagcgcctactgcggcagccacggcacctgtgccagccccctgggcccctgccgctgtgagcccggcttcctgggccgggcctgtgacctgcacctgtgggagaaccagggcgccggctggtggcacaacgtgtctgcccgggaccctgccttcagcgccagaattggagctgctggggccttcctgagccccccaggcctgctggccgtgtttggaggccaggacctgaacaatgccctgggggacctggtgctgtacaacttcagcgccaacacctgggagagctgggacctgagccctgccccagctgcccggcacagccacgtggccgtggcctgggccggcagcctggtgctgatgggcggggagctggctgatggcagcctgaccaatgatgtgtgggccttcagccccctgggccggggccactgggagctgctggcccccccagccagcagcagcagcggccccccaggcctggccggccacgccgccgccctggtggatgatgtgtggctgtatgtgtctgggggccgcacccctcatgacctcttcagcagcggcctcttccgcttccggctggacagcaccagcggcggctactgggagcaggtgatcccagctgggggccggcccccagctgccaccggccacagcatggtgttccacgcccccagccgggccctgctggtgcacggcggccaccggcccagcacagcccgcttctctgtgcgggtgaacagcacagagctgttccacgtggacagacatgtgtggaccaccctgaagggcagagatggcctgcagggcccccgggagcgggccttccacacagcctctgtgctgggcaactacatggtggtgtatggaggaaatgtgcacacccactaccaggaggagaagtgctatgaagatggcatcttcttctaccacctgggctgccaccagtgggtgtctggagctgagctggcccctcctggcaccccagagggccgggccgcccctccttctggccgctacagccacgtggccgctgtgctgggcggctctgtgctgctggtggccggcggctacagcggccggcccaggggggacctgatggcctacaaggtgcccccatttgtgttccaggccccagccccagactaccacctggactactgcagcatgtacacagaccacagcgtgtgcagccgggaccctgagtgctcctggtgccagggcgcctgccaggccgcccctcctcctggcacccccctgggcgcctgcccagctgccagctgcctgggcctgggccgcctgctgggggactgccaggcctgcctggccttcagcagccccacagccccaccccggggccctggcaccctgggctggtgtgtgcacaatgaaagctgcctgcccaggcctgagcaggcccgctgccgcggggagcagatctctggaacagtgggctggtggggccctgcccctgtgtttgtgaccagcctggaggcctgtgtgacccagagcttcctgcccggcctgcacctgctgaccttccagcagccccccaacaccagccagcctgacaaggtgtccatcgtgcgcagcaccaccatcaccctgaccccatctgctgagacagatgtgtccctggtgtaccggggcttcatctaccccatgctgcccggcggccctgggggccctggagcagaagatgtggccgtgtggacccgggcccagaggctgcacgtgctggccaggatggcccggggccctgacacagagaacatggaggaggtgggccgctgggtggcccaccaggagaaggagacccggcggctgcagaggcctggcagcgcccggctcttccccctgcccggccgggaccacaagtatgctgtggagatccagggccagctgaatggcagcgctggccctggccacagcgagctgaccctgctgtgggacagaactggagtgcctgggggcagcgagatctccttcttcttcctggagccctaccgcagcagcagctgcaccagctacagcagctgcctgggctgcctggccgaccagggctgcggctggtgcctgaccagcgccacctgccacctgcggcagggcggggcccactgtggagatgatggagctgggggcagcctgctggtgctggtgcccaccctgtgccccctgtgtgaggagcaccgggactgccacgcctgcacccaggaccccttctgtgagtggcaccagagcaccagcaggaaaggagatgctgcctgcagccggcggggccggggccgcggggccctgaagagcccagaagaatgtcctcccctgtgcagccagaggctgacctgtgaggactgcctggccaacagcagccagtgtgcctggtgccagagcacccacacctgcttcctgtttgctgcctacctggcccgctacccccatggaggctgccggggctgggatgacagcgtgcacagcgagccccgctgccgcagctgtgatggcttcctgacctgccacgagtgcctgcagagccatgaatgtggctggtgtggaaatgaagacaaccccaccctgggccgctgcctgcagggcgacttcagcggccccctgggcggcggcaactgcagcctgtgggtgggggagggcctgggcctgcctgtggccctgcctgcccgctgggcctatgcccgctgcccagatgtggatgaatgtcggctgggcctggcccgctgccacccccgggccacctgcctgaacacccccctgtcctatgagtgccactgccagaggggctaccagggagatggcatcagccactgcaacagaacctgcctggaggactgtggccacggcgtgtgcagcggccccccagacttcacctgtgtgtgtgacctgggctggaccagtgacctgcccccacccaccccagcccctggccccccagccccccgctgcagccgggactgtggctgcagcttccacagccactgcaggaagaggggccctggcttctgtgatgagtgccaggactggacctggggcgagcactgtgagcgctgccggcccggcagctttggaaatgccaccggcagccggggctgccggccctgccagtgcaatggccacggggacccccggcggggccactgtgacaacctgagcggcctgtgcttctgccaggaccacacagaaggagcccactgccagctgtgcagccctggctactacggggaccccagggctgggggcagctgcttccgggagtgtggcggccgggccctgctgaccaacgtgtcctctgtggccctgggcagccggcgggtgggcggcctgctgcccccaggcggcggggccgcccgggccggccctggcctgagctactgtgtgtgggtggtgtctgccacagaggagctgcagccctgtgcccctggcaccctgtgcccccccctgaccctgaccttctccccagacagcagcaccccctgcaccctgtcctatgtgctggcctttgatggcttcccccgcttcctggacacaggagtggtgcagagcgacaggagcctgattgctgccttctgtggccagaggcgggaccggcccctgactgtgcaggccctgagcggcctgctggtgctgcactgggaggccaacggcagcagctcctggggcttcaatgcctctgtgggcagcgcccgctgtggcagcggcggccctggcagctgccctgtgccccaggagtgtgtgccccaggatggagctgctggggccggcctgtgccgctgcccccagggctgggccggcccccactgcaggatggccctgtgcccagagaactgcaatgcccacactggagctggcacctgcaaccagagcctgggcgtgtgcatctgtgccgagggctttggaggccctgactgtgccaccaagctggatggcggccagctggtgtgggagaccctgatggacagccggctgtctgctgacacagccagccgcttcctgcaccggctgggccacaccatggtggatggcccagatgccaccctgtggatgtttggaggcctgggcctgccccagggcctgctgggcaacctgtaccgctacagcgtgtctgaaagacgctggacccagatgctggccggggctgaagatggcggccctggccccagccccaggagcttccacgccgccgcctacgtgcctgctggccgcggggccatgtacctgctgggcggcctgacagctggaggagtgacccgggacttctgggtgctgaacctgaccaccctgcagtggaggcaggagaaggccccccagacagtggagctgcctgctgtggccggccacaccctgacagcccggcggggcctgagcctgctgctggtgggcggctacagcccagaaaatggcttcaaccagcagctgctggagtaccagctggccaccggcacctgggtgtctggggcccagagcggcaccccacccaccggcctgtatggccacagcgctgtgtaccacgaggccacagacagcctgtatgtgtttggaggcttccgcttccacgtggagctggccgcccccagccctgagctgtacagcctgcactgcccagacaggacctggagcctgctggcccccagccagggcgccaagagggacaggatgagaaatgtgcggggcagcagccggggcctgggccaggtgcctggagagcagcccggctcctggggcttccgggaggtgaggaagaagatggccctgtgggccgccctggccggcaccggcggcttcctggaggagatcagcccccacctgaaggagccccggcccaggctcttccacgccagcgccctgctgggggacaccatggtggtgctgggcggccgcagtgaccctgatgagttcagcagtgatgtgctgctgtaccaggtgaactgcaatgcctggctgctgcctgacctgaccaggtctgcctctgtgggcccccccatggaggagagcgtggcccatgctgtggccgctgtgggcagccggctgtacatcagcggcggctttggaggagtggccctgggccgcctgctggccctgaccctgcccccagacccctgccgcctgctgagcagccctgaggcctgcaaccagagcggggcctgcacctggtgccacggggcctgcctgagcggggaccaggcccaccggctgggctgcggcggcagcccctgcagccccatgcccaggagccctgaggagtgccggcggctgcggacctgcagtgaatgtctggcccggcaccccaggaccctgcagcctggagatggagaggccagcaccccccgctgcaagtggtgcaccaactgcccagagggcgcctgcatcggcagaaatggcagctgcaccagtgaaaatgactgccgcatcaaccagcgggaggtgttctgggccggcaactgcagcgaggccgcctgtggggctgctgactgtgagcagtgcacccgggagggcaagtgcatgtggacccggcagttcaagaggactggagagacccggcgcatcctgtctgtgcagcccacctatgactggacctgcttcagccacagcctgctgaatgtgagccccatgcctgtggagagcagcccccccctgccctgccccaccccctgccacctgctgcccaactgcaccagctgcctggacagcaaaggagcagatggcggctggcagcactgtgtgtggagcagcagcctgcagcagtgcctgagccccagctacctgcccctgcgctgcatggccggcggctgcggccgcctgctgcggggccctgagagctgcagcctgggctgtgcccaggccacccagtgtgccctgtgcctgcggcggccccactgcggctggtgtgcctggggcggccaggacggcggcggccgctgcatggagggcggcctgagcggccccagagatggcctgacctgtggccggcctggggcctcctgggccttcctgagctgccccccagaagatgaatgtgccaacggccaccacgactgcaatgagacccagaactgccacgaccagccccacggctatgaatgtagctgcaagacaggctacaccatggacaacatgacaggcctgtgcaggcctgtgtgtgcccagggctgtgtgaatggcagctgtgtggagccagaccactgccgctgccacttcggctttgtgggcaggaactgcagcacagagtgccgctgcaacagacattctgaatgtgccggcgtgggcgcccgggaccactgcctgctgtgcaggaaccacaccaagggcagccactgtgagcagtgcctgcccctgtttgtgggcagcgctgtgggcggcggcacctgccggccctgccacgccttctgccggggcaacagccacatctgcatcagcaggaaggagctgcagatgagcaaaggagagcccaagaagtacagcctggaccctgaggagattgagaactgggtgacagagggccccagtgaagatgaagctgtgtgtgtgaactgccagaacaacagctatggagagaagtgtgagagctgcctgcagggctacttcctgctggatggcaagtgcaccaagtgccagtgcaatggacatgctgacacctgcaatgagcaggacggcaccggctgcccctgccagaacaacacagaaacaggcacctgccagggcagcagccccagcgaccggcgggactgctacaagtaccagtgtgccaagtgccgggagagcttccacggcagccccctgggcggccagcagtgctaccgcctcatctctgtggagcaggagtgctgcctggaccccaccagccagaccaactgcttccacgagcccaagagaagagccctgggccctggccgcacagtgctgtttggagtgcagcccaagttcaccaacgtggacatccggctgaccctggatgtgacctttggagctgtggacctgtatgtgtccaccagctatgacacctttgtggtgcgggtggccccagacacaggagtgcacacagtgcacatccagcccccaccagcccctcctcctcctcctcctccagcagatggcggccccaggggggccggggaccctggaggagctggggccagcagcggccctggggccccagctgagccccgggtgcgggaggtgtggccccggggcctcatcacctacgtgacagtgacagagcccagcgctgtgctggtggtgcggggcgtgcgggaccggctggtgatcacctacccccatgagcaccacgccctgaagagcagccgcttctacctgctgctgctgggcgtgggggaccccagcggccctggggccaacggcagcgctgacagccagggcctgctcttcttccggcaggaccaggcccacatcgacctgtttgtgttcttctctgtgttcttcagctgcttcttcctgttcctgagcctgtgtgtgctgctgtggaaggccaagcaggccctggaccagaggcaggagcagaggaggcacctgcaggagatgaccaagatggccagccggccctttgccaaggtgacagtgtgcttccccccagaccccacagccccagccagcgcctggaagccagctggcctgcccccaccagccttccgccgctctgagcccttcctggcccccctgctgctgaccggggccggcggcccctggggccccatgggcggcggctgctgccccccagccatcccagccaccacagctggcctgcgggccggccccatcaccctggagcccacagaagatggcatggccggcgtggccaccctgctgctgcagctgcccggcggcccccacgccccaaatggagcctgcctgggcagcgccctggtgaccctgcggcaccggctgcacgagtactgcggcggcggcggcggggccggcggcagcggccatggaactggagctggcaggaagggcctgctgagccaggacaacctgacctccatgagcctgtag

SEQ ID NO: 96615 - DNA, 10184 bp, Artificial Sequence
  derived and/or modified sequence
ggccgctctggcccaagcgtcccctcgtctctctgatctggcccatccggcttcggagggaggcgagggtgggtgagcaaagggattgggtctgtggggtccaggcccgaacccctgaagacgggctccgcccccggcacccgctcgcgccccgcccccggctggaggagtctctcctggaccatccgaacctagcctgtcccggcccgcagcctctatggaggctcctgccgggccgtagagcccttcgccccctggggacccacccgtctataaggtccgtttggcctgcagcagcctgagtccgtaatgctgggcactgttcatgggatcggccccctatggagccctgtgtctataggggactcctacggtccctagggttcggccccgtccataatgactccatatacagggccttccatcgctctatagggctcagccctcggcttccagagcctgtcagcagtggccgtacccttcgccgggactgccgggtctccgggacctcttcgatctacaaggtcatgttatgcctatagaggtcgcatttgcagggcctcaccccgggtagagggtcctctccaggtttttacggcctgtccccgctctaagggtcagtgcaggaggcggcgatggccctgggcaaggttctggccatggcactggttttggccttggccgtgctggggtcgctgtcccctggggcccgggcgggggactgcaaggggcagcggcaggtgctgcgggaggcgccaggcttcgtgacggatggtgcgggcaactacagcgtcaatggcaactgcgagtggctcatcgaggccccaagcccccagcaccggatcctgctggacttccttttcctggacacagagtgcacgtatgactacctgttcgtgtatgacggtgactccccgcgagggccgctgcttgccagtctaagtgggagcacccgacctccgcccatcgaagcttcctcaggcaagatgctgctgcacctcttcagtgatgccaactacaacctgctgggctttaacgcctcattccgcttctccctgtgcccgggtggctgccagagccacgggcagtgccagccaccgggtgtgtgtgcctgcgagccgggctgggggggtcctgactgtggcctgcaggagtgctcagcctactgtggcagccacggcacctgcgcctcgcccctgggaccatgccgctgtgagcctggcttcttgggacgtgcctgtgacctgcacctgtgggagaaccagggggctgggtggtggcacaacgtgagtgccagggaccctgccttctctgcccgtattggggcagctggcgccttcctgtccccaccagggctgctggcagttttcggaggccaggacctcaacaatgccctgggtgacctcgtcctatacaacttctccgccaacacctgggagtcttgggacctgagtcctgccccggctgcccgtcactcccatgtggccgtggcctgggccggctccctggtactgatgggtggtgagctggctgacggctcgctcaccaacgacgtgtgggccttcagtccactgggcaggggccactgggagctcctggcaccacctgcctccagctcctcggggcccccaggcctggcaggtcacgcggctgccctggtggatgatgtctggctatatgtgtctggaggccgcaccccgcacgacctcttctcctctggcctcttccgtttccgccttgacagcaccagcgggggctattgggagcaggtgattccggcaggcggacggccccctgctgccactggccactccatggtgttccatgccccctcccgtgccctgctggtccatggtggacaccggccctccactgcccggttctctgtgcgagtgaactccactgagcttttccacgtggatcggcatgtgtggacgacgctgaaggggcgggatgggcttcagggcccaagggagcgagccttccacacagccagtgttctgggcaattacatggtggtctatgggggcaatgtgcacacccattaccaggaggaaaagtgctacgaagatggcatcttcttctaccaccttggctgccatcaatgggtgtcaggagctgagcttgccccgccaggaacccctgagggccgagcagcgcctcccagtggtcggtactcacatgtagctgcggtgcttggtggcagcgtcctgttggtggctggggggtacagcggccggccccgtggggacttgatggcgtacaaggtgcccccctttgtgttccaggcacctgcccctgactaccacttggactactgctccatgtacacagaccacagcgtctgctcccgggacccggaatgcagttggtgccaaggagcctgccaagctgcaccccctcctgggacccccttgggggcttgtccagccgccagctgcctgggcctgggccgcctcctgggtgactgccaggcctgcctggccttcagcagccccacagcccctccacggggacctggcaccctgggctggtgcgtgcacaatgagagctgcctccctaggcctgagcaggcccgctgccgaggggagcagatctcaggcactgtgggctggtgggggcctgcgcctgtcttcgtcacgtccctggaggcctgcgtcacccagagcttcctgcctggcctgcacttgctcacctttcagcagccgcccaatacctcccagcctgacaaggtctcaattgtccgcagcacgaccatcaccctaacacccagcgcagagacagatgtgtccctggtctaccgtggcttcatctacccaatgctgcctggagggccaggtggaccaggggctgaggacgtggccgtgtggacgcgggcccagcgcctacacgtcctggcccggatggcccgtggccctgacacggagaacatggaggaggtggggcgctgggtggctcatcaggagaaggagacgcggcggctgcagcgccctgggtctgctcgcctcttccctctgcctgggcgggaccacaagtatgcagtagagatccagggccagctcaatggctcggcaggccctgggcacagcgagctaactctgctgtgggatcggactggtgtgccaggaggcagcgagatctccttcttcttcctggagccctaccgctcgtcgtcctgcacctcctattcttcctgcctgggctgcttggcagaccagggctgtggctggtgcctgaccagtgccacctgccacctgcgccagggcggagcccattgcggggatgacggggctggtgggtccctgctggtgctggtgcctaccctctgcccactctgcgaggagcatcgggactgccacgcctgcacccaggaccccttctgtgagtggcatcagagcaccagccgcaaaggggacgcggcatgcagccggcggggccggggtcggggtgccctgaagagtccagaggagtgtcccccgctctgcagccagcgactgacctgtgaggactgcctggccaactctagccagtgcgcctggtgccagtccacccacacctgcttcctgtttgctgcctacttggcccggtacccacacgggggctgtcgaggctgggacgacagtgtacactcggagccacggtgccggagctgcgatggcttcctgacctgccatgagtgtctgcagagccacgagtgtggctggtgtggcaatgaggacaaccccacactgggacggtgcctacagggggacttctcagggcccctcggtgggggtaactgctccctgtgggtgggggagggcctggggcttcccgtggccctccctgcccgctgggcatacgcccgctgtcctgacgtggatgagtgtcgcctgggcctggcccggtgccacccgcgggcgacctgcctgaacacgcccctcagctacgagtgtcactgccagcggggctaccagggtgatggcatctcacactgcaaccgcacgtgcttggaggactgtggccatggtgtgtgcagtggccccccggactttacctgcgtgtgtgacctaggctggacatcagacctgccccctcccacacccgccccgggtccgccagccccccgctgctcccgggactgtggctgcagcttccacagccactgccgcaagcggggccctggcttctgcgacgagtgccaggactggacatggggggagcactgcgaacgatgccggcccggcagcttcggcaacgccacaggctctaggggctgccggccctgccagtgcaacgggcacggggacccacgccgtggccactgcgacaacctcagtgggctctgcttctgccaggaccacaccgagggtgcccactgccagctctgctccccaggctattatggggatccccgggccggtggttcctgctttcgggagtgtgggggtcgcgccctcctcaccaacgtgtcctcagtggcactgggctcacgccgggtcggggggctgctgcctccaggtggcggggctgcaagagccgggcctggcctgtcctactgtgtgtgggttgtctcggccactgaggagctacagccctgtgctcccgggaccctctgtcccccactcaccctcaccttctcccccgacagcagcaccccctgcacgctgagctacgtcctggcgtttgatggattcccacgcttcctggacactggtgttgtccagtcggaccgcagcctcatagctgccttctgcggccagcgacgggacaggcccctcactgttcaggccctgtctgggctgctcgtgctgcactgggaggccaatggctcctcatcctggggcttcaatgcttcggtgggctctgcccgctgtgggtcagggggccccgggagctgtcccgtcccccaggaatgcgtgccccaggacggtgctgcaggtgcggggctctgccgatgtcctcagggctgggctggcccacactgccgcatggctctgtgtcctgagaactgcaatgcccacactggggcaggaacttgtaaccagagcctgggtgtgtgcatctgtgccgagggcttcgggggccccgactgcgccaccaagctggatggcgggcagctggtctgggagaccctcatggacagccgcctctcagccgacactgccagccgcttcctgcaccgcctgggccacaccatggtggatggacccgatgccaccttgtggatgtttgggggcctgggcctgccccaggggctgctgggaaacctgtacaggtactcagtgagtgagcggcggtggacacagatgctggcgggagccgaggacgggggcccaggcccatcgccccgctccttccatgcagccgcatatgtgcccgctggccgtggtgccatgtatctgctggggggacttaccgctggaggcgtcacccgtgatttctgggtcctcaacctcaccaccctgcaatggcggcaggagaaggccccccagaccgtggagctgccagccgttgctggtcacacccttactgcccgccgaggcctgtctctgctcctggtgggcggttactccccggaaaatggcttcaaccagcagctgctggagtaccagctggcaaccggcacctgggtgtcaggagcccagagtgggacaccccccacaggtctctatggtcactctgctgtctaccacgaggccaccgactccctctacgtgtttggggggttccgattccatgtggagctggcggccccatcccccgagctctactccctgcactgtcctgaccgcacctggagtctgctggccccttctcagggggcaaagcgagatcgtatgaggaatgtgcgtggctcatctcggggtctgggccaagttcctggggagcagcctgggtcatgggggttccgggaagtcaggaagaagatggctctgtgggctgctcttgctggtacaggaggtttcctggaggaaatctcacctcacctgaaggagccccgcccccggcttttccacgcctcagccctgttaggggacaccatggtggttcttggggggcgctcggaccctgacgagttcagcagcgacgttctgctctaccaggtcaactgcaatgcctggcttctgcccgacctcacccgctcggcctctgtggggcccccaatggaggagtctgtggcccatgctgtggcagcagtcgggagccgcctgtatatctctgggggtttcgggggagtggccctgggccgcctgctggcactgaccctgccccctgacccctgccgcctgctgtcctcacctgaagcttgtaaccagtctggggcctgcacctggtgccatggggcctgcttgtccggggatcaggcccacaggctgggctgcgggggctccccctgctccccaatgcctcgctccccggaggaatgtcgacgtctccggacctgcagtgagtgcctggcccgccatcctcggaccctgcaacctggagatggagaggcgtccaccccccgctgtaagtggtgtaccaactgccccgaaggtgcttgcattggacgcaatgggtcctgcacctctgagaatgactgtcggatcaaccagcgagaggtcttctgggcagggaactgctccgaggctgcgtgcggggctgctgactgcgagcagtgcacgcgggagggcaagtgcatgtggacgcggcagttcaagaggacaggggagacccgccgcatcctctccgtgcagcccacctatgactggacgtgcttcagccactctctgctgaatgtgtcccccatgccggtggaatcatcacccccactgccctgccccaccccttgtcacctcctacccaactgtacctcctgcctggactctaagggagcagatgggggctggcagcactgtgtttggagcagcagcctgcagcagtgtctgagcccttcctacctgcccctgcgatgtatggccggaggctgtgggcggctgctccggggacctgagagctgctccctgggctgtgctcaggcaactcagtgcgccttgtgcctgcggcgcccccattgcggctggtgtgcctgggggggccaggatgggggtggccgctgcatggagggtggactcagcggcccccgtgatgggctgacatgtgggcgtccgggggcctcctgggccttcctgtcctgcccccctgaggacgagtgtgcaaacgggcaccacgactgcaacgagacgcagaattgccacgaccagccccacggctatgagtgcagctgcaagaccggctataccatggacaacatgacagggctgtgccgccctgtgtgcgcccagggctgcgtgaacggctcatgtgtggagcccgaccactgccgctgccactttggctttgtgggccgcaactgctccacggaatgccgctgcaaccgccacagtgaatgcgctggtgttggggcgcgtgaccactgcttgctctgccgcaaccacaccaagggcagccactgtgagcagtgcctcccgctgtttgtgggttcagctgtcggaggcgggacctgccggccctgccacgccttttgtcgtggaaatagccacatctgcatctccaggaaggagttacaaatgtccaagggagagccaaagaagtactcactggacccagaggagattgaaaactgggtgacagagggtcctagtgaagacgaggccgtgtgcgtgaactgccagaataacagctatggggagaaatgcgagagctgcctgcagggctacttcctcctggacgggaagtgcaccaaatgccagtgtaatggccacgcggacacatgtaacgagcaggatgggacgggctgtccatgtcagaataacacagagacgggcacatgccagggcagctcccccagtgaccgtcgagactgctacaagtaccagtgcgccaagtgccgggaatcatttcacgggagtccgctgggcggccagcagtgctaccgcctcatctcggtggagcaggagtgctgcctggaccccacgtcccagaccaactgcttccatgagcccaaacgccgggcgctaggccccggccgcactgtcctctttggcgtgcagcccaaattcaccaacgtggacatccgcctgacgctggacgtgaccttcggggccgtggacctctatgtctccacctcctatgacaccttcgtggtccgtgtggcccctgacactggcgtccatactgtacacatccagccacccccagccccaccacctccaccaccccctgcagatggtgggccccggggggctggggatccaggaggagcaggggccagcagtgggccgggcgccccagcagagccacgggtacgggaggtatggccgcggggcctgattacctacgtgacggtgacggagccgtcggcagtgctggtggtccgcggcgtgcgggaccggctggtcatcacctacccacacgagcaccatgccctcaagtcgagccgcttctacctgctgctgctgggcgtgggagacccaagtgggcccggcgccaacggctcagccgactcgcagggcctgctcttcttccggcaggaccaggcccacattgacctgtttgtcttcttctccgtcttcttctcctgcttcttcctcttcctctcactctgtgtgctcctctggaaggccaagcaggctctggaccagcggcaggagcagcgccggcacttgcaggagatgaccaagatggccagccgccccttcgccaaggtcaccgtctgcttcccacctgaccctactgccccggcctccgcctggaagccggctgggctcccacctcccgccttccgccgctctgagcccttcctggcacccctgctgctgacaggggccggtgggccctggggacccatgggagggggctgctgcccaccagccatccccgccaccactgctgggctgcgagctgggcccatcactctcgagcccacagaagatggcatggctggcgtggccacactgctgctccagctgcctggcgggccccatgcacccaacggcgcctgcctggggtcagccctcgtcacactgcggcacaggctgcacgagtactgtgggggtggtgggggtgctgggggcagtgggcatgggactggtgcgggccggaagggactgttgagccaggacaacctcaccagcatgtccctctgacatgcccagggttctcatccacagcagctgggtcacctgatagggccgccctggacttggggtccctccacctgggggcccctggacactgtctacttggagaccactggcccccttcccccagggttgcccagatggggcctcctttgttctgcattcagcagctatttatcgagtacctactctgtcaggcactgtcataggcgtggggcaaagcaggaaccaagagacgaggttccctgatctcatgggacttaggttctggtgaagggagacaatcagtgcacatgcacacaccccacacgcatacacacatgaacacatgcacatgtgcacacacaagtaagatggcttcagagagggagaagcactgtgaggcctccagaggatgtggcagtgagggacgatggggtgaagtcagctgggcattcaaagaagctagactgagaacgcctgagaagaaccagctacgggaagagctttgggaagcaaaggcagaggccctggggtgggagcaggcttgttttattggaaggaccagaaaactggtaagtgtgacccagatcaagtgtgaggagatgaggctggggatagtcaggggctggatcacccagggccttgtgggccccacatagggttttgggttttattctcagggcaatgggaagctgttggatggtttgatgaaggggagtgacaggatccgatgtacctatttaagaatttaagagggtcgggtgcggtggctcatgcctataatcctagcactttgagaggccaaggtgggctgatcacaaggtcaagagttcgtgaccagcctggccaatatggtgaaaccccatgtctactaaaaatacaaaaattagctgggcatggtggcacacacttgtagtccgagctactcgggaggctgaggcagaagaatcgcttgaacccaggaggcggaggttgcagtgagctcagattgcgtcactgcactccaacctgggtgacagagcgagactccacctc

SEQ ID NO: 96616 - DNA, 2675 bp, Artificial Sequence
  derived and/or modified sequence
aactgctccacggaatgccgctgcaaccgccacagtgaatgcgctggtgttggggcgcgtgaccactgcttgctctgccgcaaccacaccaagggcagccactgtgagcagtgcctcccgctgtttgtgggttcagctgtcggaggcgggacctgccggccctgccacgccttttgtcgtggaaatagccacatctgcatctccaggaaggagttacaaatgtccaagggagagccaaagaagtactcactggacccagaggagattgaaaactgggtgacagagggtcctagtgaagacgaggccgtgtgcgtgaactgccagaataacagctatggggagaaatgcgagagctgcctgcagggctacttcctcctggacgggaagtgcaccaatgcgccaagtgccgggaatcatttcacgggagtccgctgggcggccagcagtgctaccgcctcatctcggtggagcaggagtgctgcctggaccccacgtcccagaccaactgcttccatgagcccaaacgccgggcgctaggccccggccgcactgtcctctttggcgtgcagcccaaattcaccaacgtggacatccgcctgacgctggacgtgaccttcggggccgtggacctctatgtctccacctcctatgacaccttcgtggtccgtgtggcccctgacactggcgtccatactgtacacatccagccacccccagccccaccacctccaccaccccctgcagatggtgggccccggggggctggggatccaggaggagcaggggccagcagtgggccgggcgccccagcagagccacgggtacgggaggtatggccgcggggcctgattacctacgtgacggtgacggagccgtcggcagtgctggtggtccgcggcgtgcgggaccggctggtcatcacctacccacacgagcaccatgccctcaagtcgagccgcttctacctgctgctgctgggcgtgggagacccaagtgggcccggcgccaacggctcagccgactcgcagggcctgctcttcttccggcaggaccaggcccacattgacctgtttgtcttcttctccgtcttcttctcctgcttcttcctcttcctctcactctgtgtgctcctctggaaggccaagcaggctctggaccagcggcaggagcagcgccggcacttgcaggagatgaccaagatggccagccgccccttcgccaaggtcaccgtctgcttcccacctgaccctactgccccggcctccgcctggaagccggctgggctcccacctcccgccttccgccgctctgagcccttcctggcacccctgctgctgacaggggccggtgggccctggggacccatgggagggggctgctgcccaccagccatccccgccaccactgctgggctgcgagctgggcccatcactctcgagcccacagaagatggcatggctggcgtggccacactgctgctccagctgcctggcgggccccatgcacccaacggcgcctgcctggggtcagccctcgtcacactgcggcacaggctgcacgagtactgtgggggtggtgggggtgctgggggcagtgggcatgggactggtgcgggccggaagggactgttgagccaggacaacctcaccagcatgtccctctgacatgcccagggttctcatccacagcagctgggtcacctgatagggccgccctggacttggggtccctccacctgggggcccctggacactgtctacttggagaccactggcccccttcccccagggttgcccagatggggcctcctttgttctgcattcagcagctatttatcgagtacctactctgtcaggcactgtcataggcgtggggcaaagcaggaaccaagagacgaggttccctgatctcatgggacttaggttctggtgaagggagacaatcagtgcacatgcacacaccccacacgcatacacacatgaacacatgcacatgtgcacacacaagtaagatggcttcagagagggagaagcactgtgaggcctccagaggatgtggcagtgagggacgatggggtgaagtcagctgggcattcaaagaagctagactgagaacgcctgagaagaaccagctacgggaagagctttgggaagcaaaggcagaggccctggggtgggagcaggcttgttttattggaaggaccagaaaactggtaagtgtgacccagatcaagtgtgaggagatgaggctggggatagtcaggggctggatcacccagggccttgtgggccccacatagggttttgggttttattctcagggcaatgggaagctgttggatggtttgatgaaggggagtgacaggatccgatgtacctatttaagaatttaagagggtcgggtgcggtggctcatgcctataatcctagcactttgagaggccaaggtgggctgatcacaaggtcaagagttcgtgaccagcctggccaatatggtgaaaccccatgtctactaaaaatacaaaaattagctgggcatggtggcacacacttgtagtccgagctactcgggaggctgaggcagaagaatcgcttgaacccaggaggcggaggttgcagtgagctcagattgcgtcactgcactccaacctgggtgacagagcgagactccacctc

SEQ ID NO: 96617 - DNA, 8538 bp, Artificial Sequence
  derived and/or modified sequence
atggccctgggcaaggtgctggccatggccctggtgctggccctggctgtgctggggtcactgtccccaggggctcgcgccggggactgcaagggccagcgacaggtactaagagaggcccctggattcgtgaccgacggggccggcaattacagtgtcaacggaaattgtgaatggcttattgaagcccccagtccgcagcacagaatacttttggattttctttttttagacaccgagtgtacatacgattatctcttcgtctacgatggagactccccccgggggccgctgctggcctccctttccggcagcactaggcctccgcctattgaggctagcagcggaaaaatgttgctccacctcttttcggatgctaactataatttgttgggctttaatgcatcattccgcttctccctgtgcccaggcggctgtcagtcacacggacaatgtcagccccccggtgtgtgcgcctgcgagcccggatggggtgggcctgattgcgggctgcaagagtgcagtgcctactgcggcagccacgggacatgcgcgtcaccacttgggccatgcaggtgtgagcctgggtttctcggtagggcttgtgacctccacctctgggaaaatcagggtgccggttggtggcacaacgtgagcgctcgggacccagctttctccgctcggatcggcgcagctggtgcatttcttagtccacccgggctgctggccgtgttcgggggacaggatctcaataatgctctcggagaccttgtgctctataatttttcagcaaacacctgggaatcctgggatttgtcaccagcacccgcggctagacactcacacgtggcagtggcctgggctggcagcttggtgcttatgggcggcgaattggccgatggctccctgaccaacgacgtctgggccttctcacccctgggacgtggacactgggagctgttggctccaccagcctccagcagttccggtcccccagggcttgctggccatgctgccgccctggttgatgacgtttggctttacgttagcggtggacggacaccacatgacctcttcagctccggactgttccgctttaggctggactcaacctctgggggctattgggaacaggtgattcctgcgggtggccgccctcccgcggccaccgggcattccatggtcttccacgcgccatcccgcgcgctgcttgtgcacggtgggcatcgtcccagtacagcccggttcagcgttcgagtaaactctacagagctgtttcacgtggacaggcacgtttggacaacgctgaagggacgtgatgggctgcagggaccaagagaacgagcattccatacagctagcgtcctaggtaattacatggtggtttatggcgggaacgtccatacgcactatcaggaggaaaaatgttatgaggacggcatcttcttctatcatctcggctgccaccagtgggtctccggtgctgagctcgctccgcccggtacccccgaaggaagggcagcgccaccttctgggcggtactcccacgtcgcagccgttctgggtggcagtgtgttactggtggctggcggctactctggaaggcctcggggagacctgatggcatataaagttcccccctttgtgtttcaggcgcctgctcccgattaccatctggattactgttcaatgtacaccgatcactctgtctgctctcgggacccagaatgctcttggtgtcaaggcgcttgccaagccgcccctccacctggaacgcctcttggcgcgtgccccgctgcatcttgtctgggcctggggagactgctgggagattgccaggcgtgcttagcgtttagcagtcccacagccccaccgaggggccctgggaccctgggttggtgcgttcataacgaatcctgcctcccccgtcctgagcaggctagatgcaggggtgagcagatcagtgggacagttggatggtggggacctgcccctgtgttcgtaacttctctggaggcctgtgttacccaaagctttctccctggcctacacctgcttaccttccagcagcctccgaatacaagccagcctgataaagtaagtattgttagatcgacaaccattactctgacaccctctgccgaaacagacgtcagcctggtgtacaggggcttcatttatccaatgctgcccgggggcccaggcggccctggagccgaggatgtcgcagtatggacccgggcccaacggctgcatgtgctcgcacggatggcccggggccctgataccgagaatatggaggaagtcggcagatgggtggcccaccaggaaaaggaaaccaggcgacttcagcggcccgggagcgctagactattcccattgcccggcagggatcataagtacgcagtggagattcagggccaattgaatggctccgcgggccctggtcatagtgagctgactctgttatgggacagaaccggggtgccaggagggtccgagatcagtttctttttcctcgagccatatcgctcaagcagctgcacgagttacagctcctgcctgggttgcttagccgatcaaggatgtggatggtgcctgacatcagcaacttgtcatttgcgacaagggggggcgcactgcggtgatgacggcgctggtggctcgttattggtgcttgtcccaactctttgccctctgtgtgaagagcacagagactgtcatgcttgcacacaagatcctttctgcgagtggcaccaaagcactagccggaagggggatgcagcttgcagtcggcgcggtcgtggcagaggcgcactgaaatcccccgaggagtgtcctccattgtgcagccaacggctgacatgtgaggactgccttgccaattccagtcagtgtgcttggtgtcagagtacacacacttgctttctcttcgcggcatatctggccagatacccacacggaggctgcagaggatgggacgactccgttcacagcgagccaagatgtagatcttgcgatggctttcttacttgtcatgagtgcctgcagtcccacgaatgtggctggtgtggaaacgaagataacccgacactcggcaggtgtctccagggggatttcagcggaccgttagggggcgggaattgctctctttgggtcggagagggtttgggacttcccgtggccctgcccgctcggtgggcctatgcacgctgccccgatgtggatgaatgccgcctgggtcttgcccgatgccaccctcgggccacatgcctcaacaccccattgagctacgagtgtcactgccagcgtgggtaccagggagacggcatatcacactgcaacaggacatgtcttgaggattgcggtcacggagtgtgctcaggaccgcctgatttcacctgcgtatgcgatctcgggtggacctccgatttacctccccctactccggcaccaggtccacccgccccaaggtgctcgcgcgattgtggttgctcattccacagtcactgtcgcaagcgtgggccaggcttttgcgacgaatgtcaggattggacttggggcgaacattgcgagaggtgtagaccaggttcattcgggaatgctacagggtcgcgtgggtgccgtccttgccaatgcaacggacacggcgacccccgaaggggtcactgcgataacctgagcggtctgtgtttttgccaggaccacaccgagggtgcccactgtcagttgtgttctccgggatattatggcgatcccagagcaggcgggagctgtttccgagagtgtggcggcagagcattactgactaacgtgtcctccgtcgccctggggagtagaagagtagggggcctgttgccccccggagggggggctgcccgtgccgggccaggcctgtcttattgcgtctgggtagtatccgctaccgaggaactccagccatgcgccccaggaacactttgccccccccttacactgacattttccccggactcctctactccatgcactctctcctacgtgctggccttcgatgggttcccacggttcctggacactggggtggttcagagtgaccgcagtctgatcgcagcattctgcgggcagcgcagggataggcctttgacggttcaggctctgtctggactattggtgttgcactgggaggctaacggttcaagttcttgggggttcaacgcgtcagtgggaagtgcacgctgcggctccggcggacccgggtcatgtcctgtgcctcaagaatgcgtccctcaagatggtgccgctggggccggcctgtgccggtgtccgcaggggtgggccggaccacactgtaggatggcactgtgccccgagaattgtaacgcacatacaggtgcaggcacttgtaatcaaagcctcggggtatgtatttgcgcagagggctttggcgggccagattgcgctaccaaacttgatggcggtcagcttgtatgggagacactaatggattcaagactgtcagcagacactgcgtccagattcctgcacaggttaggacacaccatggtggacgggccagatgccacgctctggatgttcggtggcctcggcttgccccagggattactgggaaacttgtaccggtatagcgtgtcggaaaggaggtggacacagatgttggccggcgcagaagacgggggccccggaccatcaccacgcagttttcatgcggctgcatacgttcccgccggccgtggagcaatgtacctcctgggcgggttgacagccggaggagtgacccgcgatttttgggtgttgaatcttaccacgctgcaatggcgtcaagagaaagcacctcaaaccgtggaactgccagctgtggctgggcatacactgactgcacgtaggggtctctctttgctactcgttggagggtatagcccagagaacggattcaaccagcagctgctcgagtatcagctagctaccggaacttgggtgtccggagctcagagcggcaccccccctaccggattatacgggcattccgccgtctaccacgaggccaccgattccctgtatgttttcggaggatttcggttccacgtcgaacttgccgcccctagccccgagctgtacagcctgcattgcccagaccgcacctggagtcttctggcgccatcccaaggggctaagcgggacagaatgcgaaatgtgcgcggctcctccaggggcttgggccaggtccctggtgagcagccagggagttggggatttagagaggtgcggaaaaagatggcactttgggctgcactggcagggaccggcgggtttctcgaggaaataagcccccatctgaaggaaccacggcctcgtctgttccatgctagcgctttactcggcgataccatggttgtcttgggcggaagaagcgatccggatgaatttagtagcgacgtcctgctgtaccaagtcaattgtaacgcctggctgctacccgatctgactcggtcggcgagcgtgggcccacccatggaggagagcgtggcccatgccgtggcagcagtaggctctagactttacatctcaggtgggtttggtggagtcgcactcgggcgactcctggctctcaccctaccccccgatccctgtcgcctgctcagtagcccagaagcttgcaaccagtcaggcgcatgcacttggtgtcacggcgcttgcctgtcgggggaccaggctcacagactgggatgcggcggatctccctgttctcccatgccccggagccccgaagagtgtcggcgcctgagaacgtgcagtgaatgtctcgcaaggcatcctcgaaccctgcagcccggcgacggggaagcctcaacaccccggtgcaagtggtgcactaattgcccggagggtgcatgcatcggaagaaatggatcctgcacgtctgagaatgactgtagaataaatcagcgtgaggtgttttgggcgggtaactgcagtgaagctgcttgcggagcagcagattgcgagcagtgcacacgggaggggaagtgcatgtggactaggcaatttaaaaggaccggagagactcgccggatccttagcgttcagccaacctacgattggacttgcttcagtcattcacttctgaacgtgtcgcctatgcctgtcgagtcatcgccaccactcccatgcccaaccccctgtcacctcctgccaaattgcaccagttgtctggattcaaagggcgcagatgggggatggcagcactgtgtgtggagttcctctctgcagcagtgcctctccccttcatacttgcctcttcgctgtatggccggcgggtgcggccgtctcctccgcggtcccgagtcctgttctttgggctgcgcccaggcaacccagtgcgccttgtgccttagaagaccccattgtggatggtgtgcttggggaggacaggacggaggagggcggtgtatggagggggggttgtcagggcctcgggatggcctgacttgcggacggcccggcgcctcctgggccttcctgagttgccccccagaagacgagtgtgccaacgggcaccacgattgcaatgagacacaaaactgtcacgatcagccacacggatatgaatgctcttgtaaaaccggttatacgatggataatatgaccggcttatgcaggcccgtttgtgcccagggctgtgtgaacggctcctgcgtcgaaccagaccattgcaggtgccatttcgggtttgtagggaggaactgctcaacagagtgcaggtgtaacaggcacagcgagtgcgctggagtgggggccagagaccactgtttgctgtgtcgaaaccacaccaaagggtctcattgcgagcagtgtctccccttgtttgtcggcagcgcagtagggggcggaacctgtagaccatgtcatgccttttgcagaggcaattcccatatatgtattagtcgcaaagaattacagatgagtaaaggggagcccaagaaatactcccttgaccccgaggagattgagaactgggtcacggagggacccagcgaagacgaagcagtgtgcgtgaactgtcaaaacaactcttacggggagaagtgtgaatcttgcctgcaaggttattttttgctggacggcaaatgtactaaatgccagtgcaacggtcatgccgatacctgcaatgagcaggatggaacagggtgcccttgccagaataacactgaaaccggaacttgccagggctcgagccccagtgatcgccgtgactgctataagtaccaatgtgcaaaatgtcgtgaatcctttcatggctctccactgggggggcaacagtgctatcggctgatttcagtagaacaggaatgttgtctagaccccacctctcagacaaactgcttccacgaaccgaagaggcgggctctgggcccaggccgtactgtgctcttcggcgttcagcccaagtttacaaacgtcgacatcagactgaccctcgacgtaacgtttggggctgtggatctgtacgtgtccacgagttatgacacttttgtggtgcgagtagccccagatacaggagttcataccgtgcacatccaaccccctccagccccgccaccccctccaccgccagcggatggagggccaagaggcgcaggtgaccctggaggcgccggggcctcctctggccctggagccccagccgaacctcgcgtgagggaggtctggccaagaggactgataacttatgtcaccgttaccgagccttccgccgtcctggtggttagaggggttagggataggctcgttattacgtatccccacgagcatcacgctttaaaatcctcgagattttatctgcttttgttaggtgtgggcgatccttccgggcctggggccaatgggagtgctgacagccaaggattactcttttttcgacaggatcaagctcacattgacctattcgttttcttcagtgtgttcttttcatgcttcttccttttcttgtccctctgcgtactgttatggaaagctaaacaggcacttgaccagagacaagaacaacggcggcacttacaggagatgaccaaaatggccagcaggccgttcgcgaaggtgactgtgtgttttcccccagatcctactgccccagccagcgcttggaaaccggcaggcctgccgcctccagccttcagacgaagtgagcctttccttgctcccctgctgctgacaggagcaggggggccttggggcccaatgggagggggctgctgtcccccagctattcccgccaccactgccgggctgcgagcaggccccataactctggagcctactgaggatggtatggctggggtagctaccctgctcctgcagctgcccggggggccacatgctcccaacggcgcctgtttgggatcagctttggtaactctacgtcaccggctgcacgagtactgcggcgggggcggaggagccggagggtctggccacggaacaggagccggccgcaaagggctcctgagccaagacaacttgactagcatgagtctttag

SEQ ID NO: 96618 - DNA, 8538 bp, Artificial Sequence
  derived and/or modified sequence
atggccctgggaaaagtgctagcgatggccctcgtgttggcattagctgtgttagggagtctgtcccccggtgccagagcaggtgactgcaagggtcagaggcaggtgcttagagaggccccagggttcgtgacggacggcgctggcaactactccgtgaatggcaattgcgagtggttaatcgaggctccatccccacaacaccgcatcctgctggactttctattcctggatacggagtgcacatacgactatctcttcgtgtatgatggagattctccccgagggccacttctggcatctctttctgggagcacccgacccccacctatagaggcgtcttccggtaagatgttgctgcatctttttagtgacgccaactacaacctcttggggttcaacgctagttttagattctctttatgccccggtgggtgccagtcacacggccagtgccagccccctggagtttgcgcatgcgagcccggatggggtggcccagactgcgggctgcaagagtgcagtgcatactgcgggtcccacggcacgtgtgcctcgcctcttggcccttgtagatgcgagcctgggttcttaggtagagcgtgcgacctgcatctgtgggagaatcaaggagcgggttggtggcacaacgtctcagctcgcgacccggctttcagcgctcgaatcggtgcagctggggcattcctgtctcccccaggactccttgcagtgtttgggggacaagatctcaacaacgcattgggagaccttgtgctttataacttctccgcgaacacatgggaatcgtgggacttgagcccagcgcctgctgcaaggcactctcacgtagctgttgcttgggcgggatctcttgtcctgatgggcggagaactagccgacggctccctcaccaatgatgtttgggctttttcccccttgggccgtgggcactgggagctcctagctccacctgcaagcagcagttcaggcccacccggacttgccggacatgccgctgctctcgtggatgatgtgtggctgtatgtgagcggcggaagaacccctcatgacctgttctcctccggcctattccgttttcgcctggactcaacgtccggcggatactgggagcaagtcatccctgcaggtggcaggccgccagccgctaccggacattcaatggtttttcacgctccgtcaagagcactgctcgtccatggtgggcaccggccttcaactgccagattttctgtgcgagtgaattccaccgagctgttccatgtggatcgtcatgtctggactactcttaagggcagagatggtttgcaaggcccaagagagcgtgcgttccacacagcttctgtcctgggaaattacatggtcgtgtatggtggcaatgtgcatacccactatcaggaagagaagtgctatgaggatggcattttcttctatcacctgggttgtcaccagtgggtatcaggggcagaactcgctccccctggcacccccgaaggacgcgctgccccaccaagtggcagatacagccacgtggcagcggtactagggggaagcgtcctcttggttgctggtggatactctgggcgtccaaggggcgacctgatggcttataaagtgcctccctttgtgtttcaagcccctgctccagattatcatctggactactgcagtatgtataccgaccacagtgtgtgttccagggatccagagtgctcttggtgtcagggagcttgtcaggccgcacctcccccaggcacaccgttgggggcttgccctgctgcttcctgcctaggtctgggcagacttctaggagattgccaggcctgtctcgcattctcctctccgaccgccccacctcgtgggcctggaaccttaggctggtgcgtacacaacgaatcatgcttgcctaggccggaacaggcccgatgtcgtggggagcagatctccggaacagtcggctggtggggcccagcaccagtgtttgtaacctccttggaggcttgtgtgacccagagcttccttccagggctgcaccttcttacatttcaacagccacctaatacctctcagccagacaaggtttctatcgttcgctcaacaacgatcaccctgacccctagcgccgagacagacgtgtctttggtgtacagaggtttcatttaccctatgctcccaggaggccctggaggccctggcgcagaggatgttgctgtctggactcgggcacaacgcttgcacgtgcttgcaagaatggccagagggccagatactgagaacatggaagaagtaggacgctgggtagcccaccaggagaaagaaactcgcagattgcaacgccctgggagtgccaggctgttccccttacccggaagagatcacaagtacgcagtcgagatccaggggcagttgaatggctccgccggtcccggacatagcgagttgaccctattatgggatagaacaggagttcctgggggatcagagattagtttcttttttcttgaaccttatcgtagtagctcttgcacttcttactcctcctgcctcgggtgccttgcagaccagggatgcggctggtgtttaacctccgccacttgtcatctgaggcaaggaggcgcacactgcggtgacgacggagctggcggatcattgcttgttttggtgccaaccctttgtccactatgtgaagagcatcgcgactgccacgcctgtacacaggaccccttttgcgaatggcaccagtctacatcacgcaaaggagacgcagcttgctcaagaaggggcagggggcgtggagcacttaagagtcccgaggaatgcccccctctgtgcagccagcgattgacctgcgaggattgtctcgccaactcatcccagtgcgcatggtgtcagtccacccatacttgcttcctgtttgccgcttacctcgcccgttatccccacggtggctgccgaggatgggacgattccgtgcattccgagccgaggtgcaggagttgtgacggttttctcacctgtcatgagtgtctgcaatcccatgagtgtggctggtgcggcaatgaggataaccccactttgggaaggtgtcttcagggggacttttcaggcccactgggtggcggtaactgttcgttatgggtaggggagggactcgggctgcccgtcgccctgcccgctcgatgggcctatgccagatgtccggacgtggatgagtgcaggttgggactggccagatgtcaccccagagctacatgccttaacacgcccctgtcatatgaatgtcactgtcagagaggataccagggcgatgggatttcacactgtaataggacatgcctcgaagattgcgggcacggagtgtgtagcggaccccctgattttacttgtgtgtgtgatctgggttggacatcagatttaccccctcctacgcctgctccgggaccccctgcgcctagatgttctcgggattgcgggtgctcattccactcccattgccgcaagagaggcccaggcttttgtgatgagtgccaagactggacctggggggagcactgcgagcgctgtagacctggttcattcgggaacgccacaggttcacgcggttgtagaccgtgccaatgtaatggccacggtgaccctaggcggggacactgtgacaatctatcaggtttgtgcttctgtcaggatcatacagagggcgctcattgccagctgtgttccccaggttattatggggatcctagagccggtggctcctgtttcagagagtgtggcggtagggcactcttgaccaacgtcagctccgttgccctggggagcaggcgggtggggggtctgttgccacctggtggaggtgctgcccgagcaggccctgggttatcctactgtgtatgggtggtgtccgccactgaggaactgcagccatgtgcccctgggacattgtgccctccactaaccctgacattttcccccgactcctccactccgtgtacgcttagctatgtattggcattcgacggttttcccagatttttggacacgggggtggtccaaagcgatcgtagtctgatcgctgccttctgcggccagcgccgagatagaccactgactgtgcaagcgctgtccggcctgcttgtactgcactgggaggcaaacgggagctcctcctggggattcaatgctagcgtcgggtcagcgcgttgcgggagtgggggacccggttcttgccctgttcctcaggagtgtgtgcctcaggacggagccgcaggcgctggattgtgtcggtgcccacagggttgggctggaccccattgccgcatggccctctgcccggagaattgtaacgctcacactggcgcagggacctgtaatcagtcactgggcgtctgcatttgcgctgagggcttcggaggcccagattgcgccaccaagcttgacgggggacagctggtctgggagacactcatggactctagattgagcgccgatacagcgtccagattcctccatcgtctggggcacactatggtcgatgggccagacgcgaccctctggatgtttggtggcttggggctgccacagggactgctgggcaacctctacaggtacagcgtctctgaaagacgatggactcagatgctagctggagctgaagatggaggtccaggaccgtcaccaagaagcttccacgccgctgcctatgtgccggctggacggggagcaatgtacctgctcggcggtctgacagccggaggggtgactcgggatttttgggtattgaacctcactaccctacagtggagacaggaaaaggcacctcagacggtggagcttcccgctgtggcgggtcacacactcacagctaggagaggcctgtcacttctgctggtcggcggttattcaccggagaacggttttaatcagcagctgctggaatatcaattggccaccggtacctgggtttctggagctcagtcaggcacccctccaacaggcctttatggtcacagcgccgtgtatcatgaagctacggactcactatacgtttttgggggatttaggttccatgtcgagcttgctgcaccctctccagaactgtattcactgcattgtccagatagaacctggtcactactagctccaagccagggggcaaagcgtgaccgcatgagaaatgtgcggggatctagtcgtggtttgggacaggttccaggagaacagccaggcagctggggcttccgcgaggtgcggaagaagatggctctctgggctgcactcgccggtacaggcggattcttggaggagatctctccgcaccttaaggaacctaggcccaggctgttccatgcttcagctttgctgggcgacaccatggtcgtgctggggggaagaagtgacccggacgaattctcgtctgacgtgttgctttatcaggtgaactgtaatgcgtggctcctgcctgatctgactcgtagcgcgagcgttgggcctcccatggaagaatcagtggctcacgccgtggctgccgtgggttctcggttgtacatctcaggaggttttggcggtgtggcattgggccgactgttggcgttgacactgcctcctgacccttgtagactgctttcatctcccgaagcttgtaaccagtctggtgcatgcacttggtgccacggtgcttgcctgtccggcgaccaagctcatcggctggggtgcggcggatcaccatgctctcctatgccaagaagccctgaagaatgccggaggctgagaacgtgctcagaatgcctggcacgtcatccaagaacactacagcccggtgacggcgaagccagcacccctcggtgcaagtggtgtacaaattgccctgagggtgcatgcatcgggaggaacggaagttgtacttccgagaatgactgcaggataaaccaacgggaggttttctgggccggaaactgcagtgaagctgcatgtggggcagccgactgtgagcagtgtacgagagaaggcaagtgtatgtggaccaggcaattcaagaggacgggcgagacccggagaatcctgtctgtccagcctacctacgattggacgtgtttctctcattctctgctgaacgtgtcccctatgccggttgagagcagccccccactcccgtgtcccaccccctgccacttgctgccgaattgcacatcttgcctggattccaaaggagccgacgggggttggcaacactgtgtttggagtagctccctgcagcaatgcctcagcccttcatatctgcctctaagatgcatggcgggaggatgcggcaggttactgcgcggaccagaatcctgcagtctgggctgcgcacaggccactcaatgtgctctgtgcctgagacggcctcattgtggctggtgtgcttggggaggacaggatggcggaggcaggtgcatggaaggagggttgtctggaccccgagatgggctgacctgcggtcgccctggagccagctgggcctttctctcctgccctcccgaggatgagtgtgcaaacggccaccacgactgcaatgaaacgcagaactgccatgatcagccacatggctacgagtgctcctgtaaaaccggctacacgatggacaatatgaccggattgtgccgccctgtgtgcgctcagggctgtgtcaacgggagctgcgtcgagccagaccattgtcgatgtcactttggctttgtgggcaggaactgtagtacagaatgcagatgtaatcgccacagcgagtgtgccggagtgggcgcaagagaccactgcctgctgtgtagaaatcacactaaaggaagccactgtgagcagtgtctgccactgttcgtgggcagtgcagtgggcggaggaacctgccgtccttgtcatgcattctgccggggaaattcccacatttgtatcagtcgaaaagaattgcaaatgagcaaaggcgagcctaagaaatacagcctggacccagaggaaatcgagaactgggttacggaagggccttcggaggacgaggcagtgtgtgtgaactgtcagaacaacagctacggtgagaaatgcgaatcatgcttacaaggatattttcttttggacggtaagtgtacaaaatgccaatgtaacgggcacgcagacacatgtaacgaacaagacggaacaggctgcccatgtcaaaataacacagaaactgggacctgccagggtagctcccctagcgatagacgtgactgctacaagtaccagtgtgccaagtgcagggaaagcttccacggttcaccacttggagggcagcagtgctataggttaatttcggtagagcaagaatgttgcctggatcctacctcccaaaccaattgcttccacgagcctaaacggagggcactcggcccaggaaggacagtgctgttcggagtccaaccaaagttcaccaatgtggacatcagactgacactggatgtgacgtttggagccgtggacttatacgtgtctacctcttacgacacctttgtggtgcgcgtggcgccagacacaggcgtgcatacagtgcacattcagccgcctcctgcccctccaccccctccaccccctgcagacggtggtcccagaggggctggcgatcctgggggagctggagcctcctctggccctggcgcaccagccgagcccagggttagggaagtgtggcctagaggacttatcacttatgtgaccgtgaccgaaccgtcggcggtgcttgttgtccggggtgtgcgagatcggctggtcatcacatacccccatgagcaccacgctctaaagagctcacgattctatctgctgttgctgggggttggagacccttctggcccaggagcaaacggctctgctgatagccagggactgctgttctttagacaggaccaagcgcatatcgatctttttgtcttcttctcagtcttcttctcatgctttttcctgtttttgtccttgtgcgttctcctatggaaggctaagcaggcactggaccaacggcaggagcagcgcagacacctccaggaaatgaccaagatggctagcaggccctttgctaaggtgaccgtatgctttccacctgatccgaccgcccctgcgagtgcctggaagcccgcaggactcccacctccagcctttcggagaagcgaacctttcttggctcctttacttctgacgggagctggtggcccttggggacccatgggtggtggctgctgcccgcctgcaatccccgcaacaactgccggattacgggcaggcccaatcacccttgagccaaccgaggatggtatggccggtgtagcgacccttcttctgcagctgcccggaggtccacatgccccaaatggagcctgtttgggctcagccttagtgacactcaggcacagattacatgagtactgcggcggtggagggggagcaggaggatctggacatgggaccggcgctgggcgaaagggactgttaagccaggacaatctgacctccatgagtctgtas

SEQ ID NO: 96619 - DNA, 8538 bp, Artificial Sequence
  derived and/or modified sequence
atggccctgggcaaggtgctggccatggccctggtgctggccctggccgtgctgggcagcctgagccccggcgccagagccggcgactgcaagggccagagacaggtgctgagagaggcccccggcttcgtgaccgacggcgccggcaactacagcgtgaacggcaactgcgagtggctgatcgaggcccccagcccccagcacagaatcctgctggacttcctgttcctggacaccgagtgcacctacgactacctgttcgtgtacgacggcgacagccccagaggccccctgctggccagcctgagcggcagcaccagacccccccccatcgaggccagcagcggcaagatgctgctgcacctgttcagcgacgccaactacaacctgctgggcttcaacgccagcttcagattcagcctgtgccccggcggctgccagagccacggccagtgccagccccccggcgtgtgcgcctgcgagcccggctggggcggccccgactgcggcctgcaggagtgcagcgcctactgcggcagccacggcacctgcgccagccccctgggcccctgcagatgcgagcccggcttcctgggcagagcctgcgacctgcacctgtgggagaaccagggcgccggctggtggcacaacgtgagcgccagagaccccgccttcagcgccagaatcggcgccgccggcgccttcctgagcccccccggcctgctggccgtgttcggcggccaggacctgaacaacgccctgggcgacctggtgctgtacaacttcagcgccaacacctgggagagctgggacctgagccccgcccccgccgccagacacagccacgtggccgtggcctgggccggcagcctggtgctgatgggcggcgagctggccgacggcagcctgaccaacgacgtgtgggccttcagccccctgggcagaggccactgggagctgctggccccccccgccagcagcagcagcggcccccccggcctggccggccacgccgccgccctggtggacgacgtgtggctgtacgtgagcggcggcagaaccccccacgacctgttcagcagcggcctgttcagattcagactggacagcaccagcggcggctactgggagcaggtgatccccgccggcggcagaccccccgccgccaccggccacagcatggtgttccacgcccccagcagagccctgctggtgcacggcggccacagacccagcaccgccagattcagcgtgagagtgaacagcaccgagctgttccacgtggacagacacgtgtggaccaccctgaagggcagagacggcctgcagggccccagagagagagccttccacaccgccagcgtgctgggcaactacatggtggtgtacggcggcaacgtgcacacccactaccaggaggagaagtgctacgaggacggcatcttcttctaccacctgggctgccaccagtgggtgagcggcgccgagctggccccccccggcacccccgagggcagagccgccccccccagcggcagatacagccacgtggccgccgtgctgggcggcagcgtgctgctggtggccggcggctacagcggcagacccagaggcgacctgatggcctacaaggtgccccccttcgtgttccaggcccccgcccccgactaccacctggactactgcagcatgtacaccgaccacagcgtgtgcagcagagaccccgagtgcagctggtgccagggcgcctgccaggccgcccccccccccggcacccccctgggcgcctgccccgccgccagctgcctgggcctgggcagactgctgggcgactgccaggcctgcctggccttcagcagccccaccgccccccccagaggccccggcaccctgggctggtgcgtgcacaacgagagctgcctgcccagacccgagcaggccagatgcagaggcgagcagatcagcggcaccgtgggctggtggggccccgcccccgtgttcgtgaccagcctggaggcctgcgtgacccagagcttcctgcccggcctgcacctgctgaccttccagcagccccccaacaccagccagcccgacaaggtgagcatcgtgagaagcaccaccatcaccctgacccccagcgccgagaccgacgtgagcctggtgtacagaggcttcatctaccccatgctgcccggcggccccggcggccccggcgccgaggacgtggccgtgtggaccagagcccagagactgcacgtgctggccagaatggccagaggccccgacaccgagaacatggaggaggtgggcagatgggtggcccaccaggagaaggagaccagaagactgcagagacccggcagcgccagactgttccccctgcccggcagagaccacaagtacgccgtggagatccagggccagctgaacggcagcgccggccccggccacagcgagctgaccctgctgtgggacagaaccggcgtgcccggcggcagcgagatcagcttcttcttcctggagccctacagaagcagcagctgcaccagctacagcagctgcctgggctgcctggccgaccagggctgcggctggtgcctgaccagcgccacctgccacctgagacagggcggcgcccactgcggcgacgacggcgccggcggcagcctgctggtgctggtgcccaccctgtgccccctgtgcgaggagcacagagactgccacgcctgcacccaggaccccttctgcgagtggcaccagagcaccagcagaaagggcgacgccgcctgcagcagaagaggcagaggcagaggcgccctgaagagccccgaggagtgcccccccctgtgcagccagagactgacctgcgaggactgcctggccaacagcagccagtgcgcctggtgccagagcacccacacctgcttcctgttcgccgcctacctggccagatacccccacggcggctgcagaggctgggacgacagcgtgcacagcgagcccagatgcagaagctgcgacggcttcctgacctgccacgagtgcctgcagagccacgagtgcggctggtgcggcaacgaggacaaccccaccctgggcagatgcctgcagggcgacttcagcggccccctgggcggcggcaactgcagcctgtgggtgggcgagggcctgggcctgcccgtggccctgcccgccagatgggcctacgccagatgccccgacgtggacgagtgcagactgggcctggccagatgccaccccagagccacctgcctgaacacccccctgagctacgagtgccactgccagagaggctaccagggcgacggcatcagccactgcaacagaacctgcctggaggactgcggccacggcgtgtgcagcggcccccccgacttcacctgcgtgtgcgacctgggctggaccagcgacctgcccccccccacccccgcccccggcccccccgcccccagatgcagcagagactgcggctgcagcttccacagccactgcagaaagagaggccccggcttctgcgacgagtgccaggactggacctggggcgagcactgcgagagatgcagacccggcagcttcggcaacgccaccggcagcagaggctgcagaccctgccagtgcaacggccacggcgaccccagaagaggccactgcgacaacctgagcggcctgtgcttctgccaggaccacaccgagggcgcccactgccagctgtgcagccccggctactacggcgaccccagagccggcggcagctgcttcagagagtgcggcggcagagccctgctgaccaacgtgagcagcgtggccctgggcagcagaagagtgggcggcctgctgccccccggcggcggcgccgccagagccggccccggcctgagctactgcgtgtgggtggtgagcgccaccgaggagctgcagccctgcgcccccggcaccctgtgcccccccctgaccctgaccttcagccccgacagcagcaccccctgcaccctgagctacgtgctggccttcgacggcttccccagattcctggacaccggcgtggtgcagagcgacagaagcctgatcgccgccttctgcggccagagaagagacagacccctgaccgtgcaggccctgagcggcctgctggtgctgcactgggaggccaacggcagcagcagctggggcttcaacgccagcgtgggcagcgccagatgcggcagcggcggccccggcagctgccccgtgccccaggagtgcgtgccccaggacggcgccgccggcgccggcctgtgcagatgcccccagggctgggccggcccccactgcagaatggccctgtgccccgagaactgcaacgcccacaccggcgccggcacctgcaaccagagcctgggcgtgtgcatctgcgccgagggcttcggcggccccgactgcgccaccaagctggacggcggccagctggtgtgggagaccctgatggacagcagactgagcgccgacaccgccagcagattcctgcacagactgggccacaccatggtggacggccccgacgccaccctgtggatgttcggcggcctgggcctgccccagggcctgctgggcaacctgtacagatacagcgtgagcgagagaagatggacccagatgctggccggcgccgaggacggcggccccggccccagccccagaagcttccacgccgccgcctacgtgcccgccggcagaggcgccatgtacctgctgggcggcctgaccgccggcggcgtgaccagagacttctgggtgctgaacctgaccaccctgcagtggagacaggagaaggccccccagaccgtggagctgcccgccgtggccggccacaccctgaccgccagaagaggcctgagcctgctgctggtgggcggctacagccccgagaacggcttcaaccagcagctgctggagtaccagctggccaccggcacctgggtgagcggcgcccagagcggcaccccccccaccggcctgtacggccacagcgccgtgtaccacgaggccaccgacagcctgtacgtgttcggcggcttcagattccacgtggagctggccgcccccagccccgagctgtacagcctgcactgccccgacagaacctggagcctgctggcccccagccagggcgccaagagagacagaatgagaaacgtgagaggcagcagcagaggcctgggccaggtgcccggcgagcagcccggcagctggggcttcagagaggtgagaaagaagatggccctgtgggccgccctggccggcaccggcggcttcctggaggagatcagcccccacctgaaggagcccagacccagactgttccacgccagcgccctgctgggcgacaccatggtggtgctgggcggcagaagcgaccccgacgagttcagcagcgacgtgctgctgtaccaggtgaactgcaacgcctggctgctgcccgacctgaccagaagcgccagcgtgggcccccccatggaggagagcgtggcccacgccgtggccgccgtgggcagcagactgtacatcagcggcggcttcggcggcgtggccctgggcagactgctggccctgaccctgccccccgacccctgcagactgctgagcagccccgaggcctgcaaccagagcggcgcctgcacctggtgccacggcgcctgcctgagcggcgaccaggcccacagactgggctgcggcggcagcccctgcagccccatgcccagaagccccgaggagtgcagaagactgagaacctgcagcgagtgcctggccagacaccccagaaccctgcagcccggcgacggcgaggccagcacccccagatgcaagtggtgcaccaactgccccgagggcgcctgcatcggcagaaacggcagctgcaccagcgagaacgactgcagaatcaaccagagagaggtgttctgggccggcaactgcagcgaggccgcctgcggcgccgccgactgcgagcagtgcaccagagagggcaagtgcatgtggaccagacagttcaagagaaccggcgagaccagaagaatcctgagcgtgcagcccacctacgactggacctgcttcagccacagcctgctgaacgtgagccccatgcccgtggagagcagcccccccctgccctgccccaccccctgccacctgctgcccaactgcaccagctgcctggacagcaagggcgccgacggcggctggcagcactgcgtgtggagcagcagcctgcagcagtgcctgagccccagctacctgcccctgagatgcatggccggcggctgcggcagactgctgagaggccccgagagctgcagcctgggctgcgcccaggccacccagtgcgccctgtgcctgagaagaccccactgcggctggtgcgcctggggcggccaggacggcggcggcagatgcatggagggcggcctgagcggccccagagacggcctgacctgcggcagacccggcgccagctgggccttcctgagctgcccccccgaggacgagtgcgccaacggccaccacgactgcaacgagacccagaactgccacgaccagccccacggctacgagtgcagctgcaagaccggctacaccatggacaacatgaccggcctgtgcagacccgtgtgcgcccagggctgcgtgaacggcagctgcgtggagcccgaccactgcagatgccacttcggcttcgtgggcagaaactgcagcaccgagtgcagatgcaacagacacagcgagtgcgccggcgtgggcgccagagaccactgcctgctgtgcagaaaccacaccaagggcagccactgcgagcagtgcctgcccctgttcgtgggcagcgccgtgggcggcggcacctgcagaccctgccacgccttctgcagaggcaacagccacatctgcatcagcagaaaggagctgcagatgagcaagggcgagcccaagaagtacagcctggaccccgaggagatcgagaactgggtgaccgagggccccagcgaggacgaggccgtgtgcgtgaactgccagaacaacagctacggcgagaagtgcgagagctgcctgcagggctacttcctgctggacggcaagtgcaccaagtgccagtgcaacggccacgccgacacctgcaacgagcaggacggcaccggctgcccctgccagaacaacaccgagaccggcacctgccagggcagcagccccagcgacagaagagactgctacaagtaccagtgcgccaagtgcagagagagcttccacggcagccccctgggcggccagcagtgctacagactgatcagcgtggagcaggagtgctgcctggaccccaccagccagaccaactgcttccacgagcccaagagaagagccctgggccccggcagaaccgtgctgttcggcgtgcagcccaagttcaccaacgtggacatcagactgaccctggacgtgaccttcggcgccgtggacctgtacgtgagcaccagctacgacaccttcgtggtgagagtggcccccgacaccggcgtgcacaccgtgcacatccagcccccccccgcccccccccccccccccccccccgccgacggcggccccagaggcgccggcgaccccggcggcgccggcgccagcagcggccccggcgcccccgccgagcccagagtgagagaggtgtggcccagaggcctgatcacctacgtgaccgtgaccgagcccagcgccgtgctggtggtgagaggcgtgagagacagactggtgatcacctacccccacgagcaccacgccctgaagagcagcagattctacctgctgctgctgggcgtgggcgaccccagcggccccggcgccaacggcagcgccgacagccagggcctgctgttcttcagacaggaccaggcccacatcgacctgttcgtgttcttcagcgtgttcttcagctgcttcttcctgttcctgagcctgtgcgtgctgctgtggaaggccaagcaggccctggaccagagacaggagcagagaagacacctgcaggagatgaccaagatggccagcagacccttcgccaaggtgaccgtgtgcttcccccccgaccccaccgcccccgccagcgcctggaagcccgccggcctgcccccccccgccttcagaagaagcgagcccttcctggcccccctgctgctgaccggcgccggcggcccctggggccccatgggcggcggctgctgcccccccgccatccccgccaccaccgccggcctgagagccggccccatcaccctggagcccaccgaggacggcatggccggcgtggccaccctgctgctgcagctgcccggcggcccccacgcccccaacggcgcctgcctgggcagcgccctggtgaccctgagacacagactgcacgagtactgcggcggcggcggcggcgccggcggcagcggccacggcaccggcgccggcagaaagggcctgctgagccaggacaacctgaccagcatgagcctgtag

SEQ ID NO: 96620 - protein, 391 aa, Artificial Sequence
  derived and/or modified sequence
MASRIGLRMQLMREQAQQEEQRERMQQQAVMHYMQQQQQQQQQQLGGPPTPAINTPVHFQSPPPVPGEVLKLDDVIDNIMRLDDVLGYINPEMQMPNTLPLSSSHLNVYSSDPQVTASLVGVTSSSCPADLTQKRELTDAESRALAKERQKKDNHNLIERRRRFNINDRIKELGMLIPKANDLDVRWNKGTILKASVDYIRRMQKDLQKSRELENHSRRLEMTNKQLWLRIQELEMQARVHGLPTTSPSGMNMAELAQQVVKQELPSEEGPGEALMLGAEVPDPEPLPALPPQAPLPLPTQPPSPFHHLDFSHSLSFGGREDEGPPGYPEPLAPGHGSPFPSLSKKDLDLMLLDDSLLPLASDPLLSTMSPEASKASSRRSSFSMEEGDVL

SEQ ID NO: 96621 - DNA, 1648 bp, Artificial Sequence
  derived and/or modified sequence
cacttccagtcgccaccacctgtgcctggggaggtgttgaagttggatgatgtcattgacaacattatgcgtctggacgatgtccttggctacatcaatcctgaaatgcagatgcccaacacgctacccctgtccagcagccacctgaatgtgtacagcagcgacccccaggtcacagcctccctggtgggcgtcaccagcagctcctgccctgcggacctgacccagaagcgagagctcacagatgctgagagcagggccctggccaaggagcggcagaagaaagacaatcacaacttaattgaaaggagacgaaggttcaacatcaatgaccgcatcaaggagttgggaatgctgatccccaaggccaatgacctggacgtgcgctggaacaagggcaccatcctcaaggcctctgtggattacatccggaggatgcagaaggacctgcaaaagtccagggagctggagaaccactctcgccgcctggagatgaccaacaagcagctctggctccgtatccaggagctggagatgcaggctcgagtgcacggcctccctaccacctccccgtccggcatgaacatggctgagctggcccagcaggtggtgaagcaggagctgcctagcgaagagggcccaggggaggccctgatgctgggggctgaggtccctgaccctgagccactgccagctctgcccccgcaagccccgctgcccctgcccacccagccaccgtccccattccatcacctggacttcagccacagcctgagctttgggggcagggaggacgagggtcccccgggctaccccgaacccctggcaccggggcatggctccccattccccagcctgtccaagaaggatctggacctcatgctcctggacgactcactgctaccgctggcctctgatccacttctgtccaccatgtcccccgaggcctccaaggccagcagccgccggagcagcttcagcatggaggagggcgatgtgctgtgaccctggctgcccctgtgccagggaacaggggccggcctgggggctgggagggccaggggcacctccctcccacccttcaggctgcactgtgtgtgaagtagccacctgccctgcctccctcctccccgttggcccctgtttggacttagtgcctgtctggcagcctgtggggtcaggagaagcacccccagggcagccctcttgactggcgcagtgggaagaggccttcagcccctctcccggagatggaatcgcggggcagggaggggcagggtgttctagaggtgagaagagggcctggtggagattccctgtcttctgagcccgagcccctcattaccagtgaaggacatgcttgaggggttcgggaagctcctcatctgaggcaactggtcctgggggtgctcaggcctgcctttttgggactcagatggcaggaggtccaccccgcagcctggtcctcggctctcccacaggtgggcaccccccactttggtgctaatagctctccaccaggtggtgtgagcgcgggggctgccagaagcgggaggggtcactgccggaagagcagctgccctccgacccctcactttgtgcctttagtaaacactgtgctttgtaaaaaaaaaaaaaaaaaaaaaaa

SEQ ID NO: 96622 - DNA, 216 bp, Artificial Sequence
  derived and/or modified sequence
atggcctcccggatcgggcttcggatgcagctgatgcgagagcaggcccaacaggaggagcaaagagaaaggatgcaacagcaagccgttatgcactatatgcagcagcaacagcaacagcaacagcagcagcttggaggaccacccaccccagctatcaacacacctgtccatttccagtcccctcctcccgtaccaggagaggtgctgaagtag

SEQ ID NO: 96623 - DNA, 1176 bp, Artificial Sequence
  derived and/or modified sequence
atggccagcagaatcggcttacgcatgcagctaatgcgcgaacaggcacagcaggaagagcagcgtgagaggatgcagcaacaggcagtgatgcattacatgcaacagcaacagcagcaacagcagcaacagctgggaggcccccccacgcccgccattaacactcccgtccatttccagagccctccccccgtgcccggcgaggtattaaaactggacgacgtaatcgataatattatgaggctggacgacgtgttgggttatataaacccagaaatgcagatgcccaataccttacctctgtccagctctcatttgaatgtttatagctctgatcctcaggtgacagcctcgttagtgggggttacttcctcctcttgtcccgcggatttgacccagaaaagggaactcaccgacgccgaatcgcgagccctggccaaggaacggcaaaagaaggacaatcataatctgattgaaaggcggagacggtttaatattaatgatcgcatcaaggagctcggcatgctcatccccaaagctaacgacctggacgtgaggtggaacaagggaactatcctaaaagccagcgtggactacattaggcggatgcaaaaggatctgcagaaaagccgagagctcgagaatcactcacgtcggctggaaatgacaaataagcagctttggctacggatccaggagctggagatgcaggctcgggtccacgggttgccgacgaccagcccctccggcatgaatatggctgaattggctcagcaggtggtgaaacaggaattacctagcgaagagggtcctggtgaagccctgatgctcggtgccgaggtaccggaccctgaaccgctaccagccctgccaccgcaagcccccctgcctcttccaacacagcccccttcacccttccaccatttggatttctctcattcactcagctttgggggaagagaagacgagggcccgcccggttatcccgaacccctggcacccggacacggcagcccatttccttctctcagcaagaaagacttggatctcatgctactcgatgattcactgctacctcttgctagtgaccctttgctgtcaacaatgtctccagaggcctctaaagcatcgagtagaagatcctcattcagcatggaagaaggagacgtgttgtag

SEQ ID NO: 96624 - DNA, 216 bp, Artificial Sequence
  derived and/or modified sequence
atggcttcccggatcggcctgcgcatgcaactgatgcgggaacaagctcaacaggaagaacagcgggaaaggatgcaacagcaggcggtaatgcactacatgcaacaacaacaacaacaacaacagcagcagctaggagggccccccacaccagccatcaacaccccagtgcactttcagtcccctcctccagtccccggcgaggtgctgaagtag

SEQ ID NO: 96625 - DNA, 216 bp, Artificial Sequence
  derived and/or modified sequence
atggccagcagaattggcctgaggatgcagctgatgagggagcaggcccagcaggaggagcagcgggagaggatgcagcagcaggccgtgatgcactacatgcagcagcagcagcagcagcagcagcagcagctgggcggcccccccaccccagccatcaacacccctgtgcacttccagagccccccacctgtgcctggagaggtgctgaagtag

SEQ ID NO: 96626 - DNA, 1176 bp, Artificial Sequence
  derived and/or modified sequence
atggccagcagaattggcctgaggatgcagctgatgagggagcaggcccagcaggaggagcagcgggagaggatgcagcagcaggccgtgatgcactacatgcagcagcagcagcagcagcagcagcagcagctgggcggcccccccaccccagccatcaacacccctgtgcacttccagagccccccacctgtgcctggagaggtgctgaagctggatgatgtgattgacaacatcatgaggctggatgatgtgctgggctacatcaaccctgagatgcagatgcccaacaccctgcccctgagcagcagccacctgaatgtgtacagcagtgacccccaggtgacagccagcctggtgggcgtgaccagcagcagctgcccagctgacctgacccagaagcgggagctgacagatgctgagagccgggccctggccaaggagcggcagaagaaggacaaccacaacctgattgaaagaagaagacgcttcaacatcaatgaccgcatcaaggagctgggcatgctgatccccaaggccaatgacctggatgtgcgctggaacaagggcaccatcctgaaggcctctgtggactacatccggaggatgcagaaggacctgcagaagagccgggagctggagaaccacagccggcggctggagatgaccaacaagcagctgtggctgcgcatccaggagctggagatgcaggcccgggtgcacggcctgcccaccaccagccccagcggcatgaacatggccgagctggcccagcaggtggtgaagcaggagctgcccagcgaggagggccctggagaggccctgatgctgggcgctgaggtgcctgaccctgagcccctgcctgccctgcccccccaggcccccctgcccctgcccacccagccccccagccccttccaccacctggacttcagccacagcctgagctttggaggaagagaagatgagggccccccaggctacccagagcccctggcccctggccacggcagccccttccccagcctgagcaagaaggacctggacctgatgctgctggatgacagcctgctgcccctggccagtgaccccctgctgagcaccatgagccctgaggccagcaaggccagcagcagaagaagcagcttctccatggaggagggagatgtgctgtag

SEQ ID NO: 96627 - DNA, 216 bp, Artificial Sequence
  derived and/or modified sequence
atggccagccggatcggcctgcggatgcagctgatgcgggagcaggctcagcaggaagagcagcgggaaagaatgcagcaacaggccgtcatgcactatatgcaacaacagcagcagcagcagcagcagcagctgggggggccccctacacctgcaattaatacccctgtacacttccagagcccgccaccagtgccaggggaggttctgaagtag

SEQ ID NO: 96628 - DNA, 1176 bp, Artificial Sequence
  derived and/or modified sequence
atggccagccggatcggcctgcggatgcagctgatgcgggagcaggctcagcaggaggagcagagagaacgcatgcagcaacaggccgtgatgcactatatgcaacagcagcagcagcaacagcagcagcaactgggcggccccccaaccccggcaatcaataccccggtacacttccagtccccgccacccgtgccaggggaggtgctgaagctggacgacgtgatagacaacataatgcggctggacgacgtgcttggatatataaatcccgaaatgcagatgcccaatacattgcctctgagcagctcccatttaaacgtgtacagttccgatcctcaggtgacagcctcccttgtgggggtcacatcttccagctgccccgcggacctgacccagaaacgggaactgaccgatgcagagagccgtgctttagccaaggaaagacaaaagaaagataatcacaatctgatcgaaaggcgccgcagattcaacatcaatgaccggatcaaggagttaggtatgctgatcccgaaagccaatgaccttgacgtacgttggaacaaggggactatcttgaaggcttccgtcgattatattagaagaatgcaaaaagatttgcaaaagtcccgagagttagagaatcatagcaggcggctagaaatgaccaataaacagttgtggctcagaatccaggaattggagatgcaggcccgggtgcacggcttgcccaccacgtcccccagtggcatgaatatggccgaactggcccagcaggttgtgaaacaggagttaccctccgaggaaggccccggggaggctctgatgctcggcgcggaagtaccagaccccgagcccctgcctgcgcttcccccccaggccccattacccctgccaacccagccaccatcgcccttccaccatcttgacttctcccatagtttgagctttggcggcagggaggacgagggcccccctggttaccctgaaccattagctccaggacatggaagtccgtttccgtcccttagcaagaaggatctggacctgatgctcctagacgactcgcttctgccccttgcttccgatccactgctgtcaacgatgtctcccgaggccagtaaagcatcctctagacgttcctccttttctatggaagagggcgacgtgctctag

SEQ ID NO: 96629 - DNA, 216 bp, Artificial Sequence
  derived and/or modified sequence
atggccagccggatcggcctgcggatgcagctgatgcgggagcaggcccagcaggaggaacagcgtgaacggatgcagcagcaagccgtgatgcactatatgcagcagcagcagcaacagcagcagcagcaactgggtggcccaccaactccggcaatcaacacccccgttcatttccagtctcccccaccagtgcctggcgaagtgctcaaatag

SEQ ID NO: 96630 - DNA, 216 bp, Artificial Sequence
  derived and/or modified sequence
atggccagcagaattggactgcgtatgcagctcatgcgggagcaggcccaacaggaagaacagagggaacgcatgcagcagcaggccgtgatgcactacatgcagcaacagcagcaacagcagcaacagcagctcggcggtcctcccactcctgccattaatacccccgtccactttcagtcccctccccctgtcccaggtgaggtgctcaaatag

SEQ ID NO: 96631 - DNA, 1176 bp, Artificial Sequence
  derived and/or modified sequence
atggctagcaggataggcctgcgcatgcagcttatgcgggagcaggcccagcaggaggaacagcgcgagcggatgcagcagcaggccgtcatgcattatatgcagcagcagcagcagcagcagcagcaacaactgggagggcctcctacacctgcaattaacaccccagtccatttccagtcccctcctcctgtgccaggcgaggtcctgaaactcgatgacgtcattgataacatcatgagactggatgatgtgctaggctatattaaccccgagatgcaaatgccaaatacacttccattgagtagctctcatttaaacgtgtactcttcagatccacaagttaccgccagcctggttggcgtaacttctagctcctgccctgctgatctgacacagaaacgggaattgactgatgcagaaagtcgggcactggcgaaagagcgccagaagaaggataatcataacttgattgagcggcgtagacgcttcaatattaatgatcgaattaaggaattaggcatgctgattccaaaggccaacgatttggatgtgaggtggaacaaaggtacgatcctgaaagctagcgtggattacatccggaggatgcaaaaggatttgcagaaatcacgagagctcgaaaaccattccaggagactggaaatgacgaataagcaactgtggctgcgtatacaggagttggaaatgcaggctcgggtgcacggactgccgactacctccccttccggtatgaatatggctgagctggctcagcaggttgtgaagcaggagctgccgagcgaagaaggcccaggggaggccctcatgctcggagcggaggtgccagatcctgagcccctcccagccctgcctccgcaggctcccttgcctctgcctacacagccgcctagtccgttccatcacctcgacttcagccattctttgtcgtttggcggtcgcgaagatgagggccctccgggatatcctgagccgcttgcccctggtcatgggtccccatttccaagtctgtctaaaaaagacttggatctgatgttactggacgattctctgcttccgttagcgtcagacccgctgctgtcgaccatgagtcctgaagcatctaaagccagtagcagacggagcagctttagtatggaggagggagatgtcctctag

SEQ ID NO: 96632 - DNA, 216 bp, Artificial Sequence
  derived and/or modified sequence
atggcctctcggatcggactgagaatgcaattgatgcgcgagcaagcccagcaggaggaacaacgcgagcggatgcagcagcaggctgtgatgcactatatgcagcagcaacagcagcagcaacagcagcaactcggcggaccacccaccccggcaatcaatacccccgttcactttcagtcaccacccccagtcccaggggaagtgctgaaatag

SEQ ID NO: 96633 - DNA, 2098 bp, Artificial Sequence
  derived and/or modified sequence
ggccgggcgggcatgggccttcccggcccggagctgggagtcgaaggggcgggaggcgtgatggtgaactcgcaagaagtttgagggacgcgcgggccccgcgcccactccccctccaccggacacggctggggccggcgatgcctgagagggggtcggaggacgcagtgaacatatatgcatgtacagtgtggatcctcatctgagaggagggagatgaaaacacacccacctcacaggctgttgtgaggactaagggtgcggcagtgcctggtacatgggagccagcgccggcagccaccatggcgtcacgcatagggttgcgcatgcagctcatgcgggagcaggcgcagcaggaggagcagcgggagcgcatgcagcaacaggctgtcatgcattacatgcagcagcagcagcagcagcaacagcagcagctcggagggccgcccaccccggccatcaatacccccgtccacttccagtcgccaccacctgtgcctggggaggtgttgaagttggatgatgtcattgacaacattatgcgtctggacgatgtccttggctacatcaatcctgaaatgcagatgcccaacacgctacccctgtccagcagccacctgaatgtgtacagcagcgacccccaggtcacagcctccctggtgggcgtcaccagcagctcctgccctgcggacctgacccagaagcgagagctcacagatgctgagagcagggccctggccaaggagcggcagaagaaagacaatcacaacttaattgaaaggagacgaaggttcaacatcaatgaccgcatcaaggagttgggaatgctgatccccaaggccaatgacctggacgtgcgctggaacaagggcaccatcctcaaggcctctgtggattacatccggaggatgcagaaggacctgcaaaagtccagggagctggagaaccactctcgccgcctggagatgaccaacaagcagctctggctccgtatccaggagctggagatgcaggctcgagtgcacggcctccctaccacctccccgtccggcatgaacatggctgagctggcccagcaggtggtgaagcaggagctgcctagcgaagagggcccaggggaggccctgatgctgggggctgaggtccctgaccctgagccactgccagctctgcccccgcaagccccgctgcccctgcccacccagccaccatccccattccatcacctggacttcagccacagcctgagctttgggggcagggaggacgagggtcccccgggctaccccgaacccctggcgccggggcatggctccccattccccagcctgtccaagaaggatctggacctcatgctcctggacgactcactgctaccgctggcctctgatccacttctgtccaccatgtcccccgaggcctccaaggccagcagccgccggagcagcttcagcatggaggagggcgatgtgctgtgaccctggctgcccctgtgccagggaacaggggccggcctgggggctgggagggccaggggcacctccctcccacccttcaggctgcactgtgtgtgaagtagccacctgccctgcctccctcctccccgttggcccctgtttggacttagtgcctgtctggcagcctgtggggtcaggagaagcacccccagggcagccctcttgactggcgcagtgggaagaggccttcagcccctctcccggagatggaatcgcggggcagggaggggcagggtgttctagaggtgagaagagggcctggtggagattccctgtcttctgagcccgagcccctcattaccagtgaaggacatgcttgaggggttcgggaagctcctcatctgaggcaactggtcctgggggtgctcaggcctgcctttttgggactcagatggcaggaggtccaccccgcagcctggtcctcggctctcccacaggtgggcaccccccactttggtgctaatagctctccaccaggtggtgtgagcgcgggggctgccagaagcgggaggggtcactgccggaagagcagctgccctccgacccctcactttgtgcctttagtaaacactgtgctttgt

SEQ ID NO: 96634 - DNA, 216 bp, Artificial Sequence
  derived and/or modified sequence
atggccagcagaatcggcctgagaatgcagctgatgagagagcaggcccagcaggaggagcagagagagagaatgcagcagcaggccgtgatgcactacatgcagcagcagcagcagcagcagcagcagcagctgggcggcccccccacccccgccatcaacacccccgtgcacttccagagccccccccccgtgcccggcgaggtgctgaagtag

SEQ ID NO: 96635 - DNA, 1176 bp, Artificial Sequence
  derived and/or modified sequence
atggccagcagaatcggcctgagaatgcagctgatgagagagcaggcccagcaggaggagcagagagagagaatgcagcagcaggccgtgatgcactacatgcagcagcagcagcagcagcagcagcagcagctgggcggcccccccacccccgccatcaacacccccgtgcacttccagagccccccccccgtgcccggcgaggtgctgaagctggacgacgtgatcgacaacatcatgagactggacgacgtgctgggctacatcaaccccgagatgcagatgcccaacaccctgcccctgagcagcagccacctgaacgtgtacagcagcgacccccaggtgaccgccagcctggtgggcgtgaccagcagcagctgccccgccgacctgacccagaagagagagctgaccgacgccgagagcagagccctggccaaggagagacagaagaaggacaaccacaacctgatcgagagaagaagaagattcaacatcaacgacagaatcaaggagctgggcatgctgatccccaaggccaacgacctggacgtgagatggaacaagggcaccatcctgaaggccagcgtggactacatcagaagaatgcagaaggacctgcagaagagcagagagctggagaaccacagcagaagactggagatgaccaacaagcagctgtggctgagaatccaggagctggagatgcaggccagagtgcacggcctgcccaccaccagccccagcggcatgaacatggccgagctggcccagcaggtggtgaagcaggagctgcccagcgaggagggccccggcgaggccctgatgctgggcgccgaggtgcccgaccccgagcccctgcccgccctgcccccccaggcccccctgcccctgcccacccagccccccagccccttccaccacctggacttcagccacagcctgagcttcggcggcagagaggacgagggcccccccggctaccccgagcccctggcccccggccacggcagccccttccccagcctgagcaagaaggacctggacctgatgctgctggacgacagcctgctgcccctggccagcgaccccctgctgagcaccatgagccccgaggccagcaaggccagcagcagaagaagcagcttcagcatggaggagggcgacgtgctgtag

SEQ ID NO: 96636 - protein, 432 aa, Artificial Sequence
  derived and/or modified sequence
MNYPDENTYGNKADIISTVEFNHTGELLATGDKGGRVVIFQREQESKNQVHRRGEYNVYSTFQSHEPEFDYLKSLEIEEKINKIRWLPQQNAAYFLLSTNDKTVKLWKVSERDKRPEGYNLKDEEGRLRDPATITTLRVPVLRPMDLMVEATPRRVFANAHTYHINSISVNSDYETYMSADDLRINLWNFEITNQSFNIVDIKPANMEELTEVITAAEFHPHHCNTFVYSSSKGTIRLCDMRASALCDRHTKFFEEPEDPSNRSFFSEIISSISDVKFSHSGRYIMTRDYLTVKVWDLNMENRPIETYQVHDYLRSKLCSLYENDCIFDKFECVWNGSDSVIMTGSYNNFFRMFDRNTKRDVTLEASRENSKPRAILKPRKVCVGGKRRKDEISVDSLDFSKKILHTAWHPSENIIAVAATNNLYIFQDKVN

SEQ ID NO: 96637 - DNA, 1299 bp, Artificial Sequence
  derived and/or modified sequence
atgaattatcccgatgaaaatacatacggaaataaagctgatataatcagcacagttgaatttaatcacacgggtgaactgctagccactggggataaaggaggcagagtggtgattttccagcgggaacaagaaagcaaaaaccaggtgcatagaaggggggagtataatgtgtactccactttccaaagtcatgagcctgaatttgattacctgaaaagcctcgagattgaagagaaaattaataaaatacgctggctgccacaacagaacgccgcttattttcttctgtccacaaacgataaaacagtcaagttatggaaagtgtctgaacgcgataagagacctgaggggtacaatttaaaagacgaagaagggaggctgagggaccccgcgaccattaccacactgagggtgcctgtgttacggcccatggaccttatggtggaagctacccctcgccgcgtgtttgcaaacgcccacacctaccacattaattccatctctgtgaacagtgactacgagacttatatgtccgctgacgatctccgcattaatttatggaatttcgagattacgaatcagtcttttaatatcgtggacattaagccagctaacatggaggagttaactgaagtgattaccgccgctgaatttcacccacatcactgcaatacattcgtgtatagcagtagcaagggcaccattcgcttgtgtgacatgcgagctagcgcactttgcgatcgccacacaaagttctttgaggagcccgaggacccaagcaacaggtcctttttcagtgagataatttcctctatttccgatgtcaagtttagccattctggccggtatatcatgactcgtgactaccttactgtcaaagtgtgggacctcaatatggagaatagaccaatagaaacatatcaagtacatgattatctgcgatctaaactctgttctctttatgaaaatgattgcatttttgacaagtttgagtgcgtgtggaatgggtcagatagtgttattatgactggcagttacaacaattttttcagaatgttcgaccggaatacaaaacgcgacgttacattggaggcctcccgagagaatagcaagccccgagctatcctgaagccccgcaaagtgtgtgtgggaggtaaacggcgtaaggacgagatcagcgtcgattcactggacttttctaaaaaaattcttcacaccgcatggcatcctagtgagaatataatagctgtggcagcaaccaataatctgtacatcttccaagataaagttaactag

SEQ ID NO: 96638 - DNA, 1299 bp, Artificial Sequence
  derived and/or modified sequence
atgaattaccccgacgaaaatacatacggcaacaaagccgacattatcagtaccgttgagtttaatcatactggtgagctcctggctaccggtgataagggaggaagagttgtgatttttcagagggagcaggagtcgaagaaccaggtgcaccgcagaggagaatacaacgtgtactctacattccagtctcacgaaccagaattcgattatcttaagagcctcgagatcgaagagaaaatcaacaagatccgttggctgcctcaacagaacgcggcctatttcttgctcagtaccaatgataagaccgttaagctttggaaggtgtctgaacgggacaagcggcctgagggctacaatctcaaggatgaggaggggcgcctcagggacccagcaaccatcaccacactgcgcgtgcccgttctcagaccaatggacttgatggtagaagctacgcctagaagggtttttgcaaatgcacatacatatcacatcaactctatatctgtgaacagcgactatgagacctatatgagcgccgacgatcttcgaatcaatttgtggaacttcgaaatcaccaaccagagcttcaacatcgtcgacattaaaccagccaacatggaggagctcaccgaagtgattactgcagcagagtttcatcctcatcactgtaacacttttgtgtacagtagcagcaagggaacaatcaggctttgtgacatgagagcctcagccctttgtgaccgacataccaaattctttgaggagcccgaagaccccagtaataggtcatttttttccgaaatcatctcttctatctccgacgtcaaatttagccattctggtagatacatcatgaccagggactatctcacagtcaaggtctgggacctaaacatggagaatcggccaatagagacctaccaggtgcacgactacctgaggtccaagctgtgttcactatatgagaacgactgcatctttgataagtttgagtgtgtctggaacggctcagactccgtcatcatgaccggatcatataataacttctttcgtatgttcgaccggaacacgaagcgagatgtcacactcgaggcctctagagagaatagtaaacccagagctattctgaagcctaggaaggtgtgcgtgggtgggaagcggaggaaagacgaaatttcagtcgacagtctcgacttcagcaagaagatcctccacacagcttggcacccatctgaaaatataatcgccgtggcagctaccaataatctctatatcttccaggataaggttaattag

SEQ ID NO: 96639 - DNA, 1299 bp, Artificial Sequence
  derived and/or modified sequence
atgaactacccagatgagaacacctacggcaacaaggctgacatcatcagcacagtggagttcaaccacactggagagctgctggccaccggggacaagggcggccgggtggtgatcttccagcgggagcaggagagcaagaaccaggtgcaccggcggggggagtacaacgtgtacagcaccttccagagccatgagcctgagtttgactacctgaagagcctggagattgaggagaagatcaacaagatccgctggctgccccagcagaatgctgcctacttcctgctgagcaccaatgacaagacagtgaagctgtggaaggtgtctgagcgggacaagaggcctgagggctacaacctgaaggatgaggagggccgcctgcgggaccctgccaccatcaccaccctgcgggtgcctgtgctgcggcccatggacctgatggtggaggccaccccccggcgggtgtttgccaatgcccacacctaccacatcaacagcatctctgtgaacagcgactatgagacctacatgtctgcagatgacctgcgcatcaacctgtggaactttgagatcaccaaccagagcttcaacatcgtggacatcaagccagccaacatggaggagctgacagaggtgatcacagctgctgagttccacccccaccactgcaacacctttgtgtacagcagcagcaagggcaccatccggctgtgtgacatgagggccagcgccctgtgtgacagacacaccaagttctttgaggagcctgaggaccccagcaacagaagcttcttcagcgagatcatcagcagcatcagtgatgtgaagttcagccacagcggccgctacatcatgacccgggactacctgactgtgaaggtgtgggacctgaacatggagaaccggcccatcgagacctaccaggtgcatgactacctgcggagcaagctgtgcagcctgtatgaaaatgactgcatctttgacaagtttgaatgtgtgtggaatggaagtgacagcgtcatcatgacaggcagctacaacaacttcttcaggatgtttgacaggaacaccaagagagatgtgaccctggaggccagccgggagaacagcaagccccgggccatcctgaagcccaggaaggtgtgtgtgggcggcaagaggaggaaggatgagatctctgtggacagcctggacttcagcaagaagatcctgcacacagcctggcaccccagcgagaacatcatcgctgtggccgccaccaacaacctgtacatcttccaggacaaggtgaactag

SEQ ID NO: 96640 - DNA, 1299 bp, Artificial Sequence
  derived and/or modified sequence
atgaactaccccgacgagaacacctacggcaacaaggccgacatcatttctactgtggaattcaaccacactggagagttgctcgctaccggagataaggggggacgggtcgtcatctttcagcgagaacaggaaagcaagaaccaggttcatcgccggggggaatacaatgtgtactccaccttccaaagccacgaacccgagttcgactacctcaagtcactggaaatcgaggagaaaatcaacaagattagatggcttccacagcagaatgccgcctatttcctgctctcaaccaacgacaaaaccgtgaagttatggaaagtctcagagcgcgataaaaggccggagggatataatctcaaagacgaggaggggcggttgagggatcctgccaccatcacaaccctcagagtgcccgttctccggcccatggacctgatggtggaagcaacaccccgtcgagttttcgctaacgcccacacatatcatattaatagcatctccgtcaacagtgattatgaaacctacatgtccgcggacgatcttagaattaacctgtggaacttcgagatcaccaatcagagcttcaacatcgtggacatcaaacccgcaaacatggaggaactcactgaggtgattactgcagcagagtttcatccccatcattgtaataccttcgtatactcatcgtcaaagggaactattcggctgtgcgacatgcgcgcgagcgccctgtgtgaccgccacactaaattctttgaagagccggaggatcctagtaaccggtccttcttcagtgaaataatttcgtccatcagcgacgtgaaatttagccatagtggacgctacataatgaccagggattatcttaccgtgaaggtttgggacttgaacatggaaaataggcccattgaaacatatcaggtgcacgactatctgagatctaagctatgctctctttacgaaaatgattgtatatttgataagtttgaatgcgtttggaatggctctgactcagtcatcatgacaggcagctacaataatttttttcgcatgttcgaccgcaacacaaagagggatgtcacactcgaagcgtccagggaaaatagcaagcccagggctattcttaaaccccggaaggtatgcgtgggggggaagcgtagaaaggatgagatttcggtcgacagtttggatttctcaaaaaaaattctacacacagcgtggcacccatcagaaaacattattgccgtggcagcgaccaacaacctgtacattttccaggataaggtgaactag

SEQ ID NO: 96641 - DNA, 1299 bp, Artificial Sequence
  derived and/or modified sequence
atgaactaccccgacgagaacacctacggcaacaaggccgacatcatctccacagtcgagtttaatcatactggcgagctcttggctaccggagataagggaggtcgtgtggtgatatttcagagagaacaagagtctaagaaccaggtacaccgtcgcggggagtataatgtgtatagtacgttccagtcacatgagcccgaattcgactacctgaaatccctggaaatcgaggagaagattaataaaattcgctggcttccccagcagaatgcggcgtattttctgctatctactaacgacaagacggtcaaactttggaaagtgagtgaaagagacaagagacctgaaggctacaaccttaaagacgaagagggaaggctacgcgacccagcaactattacaacactgagggtgccagtcctcaggccaatggacctcatggtggaggccactcccaggcgggtgtttgccaacgctcacacgtaccacattaatagcataagcgtgaattctgattacgaaacctacatgtctgctgacgatttaagaataaacctgtggaattttgagattactaatcagtcattcaacattgtggacatcaaacccgcgaacatggaagaactgactgaagtcataactgccgcggagtttcaccctcaccactgcaacacgttcgtttattctagttcaaagggcactataaggctgtgtgatatgcgcgccagcgcactctgcgatcggcataccaagttttttgaggagcctgaggatccttccaaccggtcgttctttagcgagattattagctccatttctgacgtcaagttttcacacagtgggcggtatattatgacgcgggactacttgaccgtcaaggtgtgggacctcaacatggagaataggccgatagagacttatcaagtccacgactacttgagaagtaagctctgttctttgtatgagaatgactgtattttcgacaagttcgaatgtgtgtggaatgggagcgactctgtgataatgacgggttcatacaacaacttttttcgcatgtttgaccgcaataccaagagggatgtgaccctggaggcttctcgtgaaaatagcaaacctcgtgcgattctcaagccaaggaaggtctgtgtggggggtaaacgcagaaaggatgagatctcagttgacagcctcgatttctccaagaagattctgcatacggcatggcatcccagcgaaaacatcatcgccgtggctgccactaataatctctacatattccaggacaaagtgaactag

SEQ ID NO: 96642 - DNA, 1299 bp, Artificial Sequence
  derived and/or modified sequence
atgaactatcccgacgagaacacctatggaaataaagctgacatcatcagtacagtggagtttaatcacacaggggagctgttagctaccggagacaaaggtggccgagttgtgatattccaaagagaacaagagtccaaaaaccaggttcatagacgtggcgagtacaacgtctactccactttccagtctcatgaaccagaattcgactacctcaaatcactggagatagaagagaagatcaataaaatccgatggctccctcaacaaaatgctgcatatttccttctcagtactaacgataaaactgttaagttgtggaaggtgtctgaaagagataaaagacccgaagggtataatctgaaggatgaagagggaagactccgagatcctgccaccattaccaccctgcgcgtgcctgtgctccggcctatggacctgatggtggaagcgacacctcggcgagtatttgctaacgctcatacctaccacatcaattcgatcagcgttaactctgattacgaaacctacatgtcagccgacgatctgagaatcaatctttggaattttgaaatcactaatcaatcctttaacattgtcgatataaaaccagctaacatggaggaactgacagaggtgattacagccgcagaatttcatcctcatcattgcaacacctttgtctactcttcctctaaagggactatccggttatgcgatatgagggcatctgccctgtgcgacaggcacacgaaattctttgaggaacctgaagatccaagcaaccggtctttcttctcagaaatcatatcctccatttcggacgtgaaattttctcactctggcagatatataatgacacgagactatttaacagtcaaggtgtgggaccttaacatggaaaataggcccatcgagacatatcaggtacatgactatctgcggtcaaagctgtgcagcctgtatgagaatgattgtatcttcgacaagttcgaatgtgtctggaatggcagtgactcagtcattatgaccggcagttataataatttcttcagaatgttcgatagaaacacgaaacgtgacgtcacactggaggcctcgcgcgaaaattccaagcccagggctatactgaaacccaggaaggtatgcgtgggcggaaaaagacgcaaagatgagatatctgtggattccctggacttctcaaagaaaattcttcacactgcatggcacccctccgagaacatcatcgctgttgctgcaaccaataacctctacattttccaggataaggttaactag

SEQ ID NO: 96643 - DNA, 1299 bp, Artificial Sequence
  derived and/or modified sequence
atgaactaccctgacgaaaacacctatgggaataaggctgacataatctccactgttgagttcaaccacaccggcgagctgctggctaccggtgacaaagggggacgtgtggtcattttccagagggaacaggaaagtaaaaaccaggtccacaggcgaggagagtataacgtgtactccacattccaaagccacgagcccgaatttgattatctgaaatcgctggaaatagaagagaaaataaacaagatccgctggctccctcaacagaatgcagcctactttctgttgtccacgaatgataagactgtaaagctctggaaagtcagcgagcgggacaaacggccagagggctacaacctaaaggatgaagaaggacgcttacgcgacccagcaacaattaccacgctaagagtgcctgttctgagacccatggatctgatggtagaggctaccccgaggagagtgttcgctaacgcccacacataccatatcaactccatttccgttaatagcgactacgagacctatatgtcagctgacgacctccggattaacctttggaactttgagattacaaaccagtctttcaatattgtagatataaagccagccaacatggaagagctgactgaagtcatcacagccgcagagtttcatccccatcattgtaatacttttgtgtacagttcctctaagggtaccattcgcctgtgtgacatgcgcgcaagcgccctttgtgatcggcacacaaaattcttcgaagagcctgaggacccctccaacaggtccttcttcagcgagattatttcttccatttctgacgtgaagttttctcatagtggacggtacatcatgactcgtgattatctgaccgtgaaagtctgggacctgaacatggaaaatagaccaatagagacatatcaggttcacgattatctccggtctaagctctgttcgctttatgaaaatgattgtatattcgataagttcgaatgtgtatggaatgggtccgactccgtcatcatgactggttcttataacaacttcttcaggatgttcgaccggaatactaaaagagacgttacactcgaggcaagtagagagaattctaagcccagagcaatcctgaagccccgaaaagtttgcgtgggtggcaaacgtagaaaggacgagattagcgtcgactcgctggatttcagcaagaagattttgcacacagcatggcatccaagcgagaacataattgctgtggccgctacaaacaacctatatatttttcaagacaaggtgaactag

SEQ ID NO: 96644 - DNA, 2012 bp, Artificial Sequence
  derived and/or modified sequence
agtcacacaggggatgactgcaagtccttcgtaaccactccaggacgctgccagggcctgagaagggacaaactccaattgctccagttcaaactggtcctggcctggtcaaacggaggagacagagcagtgattcacagcaggacgtggaattgggacactcacccaggacacactatggtgcttcagccaagtgaaaggcactatcgagattggaaccacagaaggagccaagggagaacccaagacagagaatagtggcccaataatgaagcatgaattatccagatgaaaacacctatggaaataaagctgacattatctctacggtagaattcaaccacacgggagaattactagcgacaggggacaaggggggtcgggttgtaatatttcaacgagagcaggagagtaaaaatcaggttcatcgtaggggtgaatacaatgtttacagcacattccagagccatgaacccgagttcgattacctgaagagtttagaaatagaagaaaaaatcaataaaataagatggctcccccagcagaatgcagcttactttcttctgtctactaatgataaaactgtgaagctgtggaaagtcagcgagcgtgataagaggccagaaggctacaatctgaaagatgaggagggccggctccgggatcctgccaccatcacaaccctgcgggtgcctgtcctgagacccatggacctgatggtggaggccaccccacgaagagtatttgccaacgcacacacatatcacatcaactccatatctgtcaacagcgactatgaaacctacatgtccgctgatgacctgaggattaacctatggaactttgaaataaccaatcaaagttttaatattgtggacattaagccagccaacatggaggagctcacggaggtgatcacagcagccgagttccacccccatcattgcaacaccttcgtgtacagcagcagcaaagggacaatccggctgtgtgacatgcgggcatctgccctgtgtgacaggcacaccaaattttttgaagagccggaagatccaagcaacagatcatttttctctgaaattatctcttcgatttcggatgtgaagttcagccacagtgggaggtatatcatgaccagggactacttgaccgtcaaagtctgggatctcaacatggaaaaccgccccatcgagacttaccaggttcatgactacctccgcagcaagctgtgttccctctatgaaaatgactgcatttttgataaatttgagtgtgtgtggaatgggtcagacagtgtcatcatgacaggctcctacaacaacttcttcaggatgttcgacagaaacaccaagcgtgatgtgacccttgaggcttcgagggaaaacagcaagccccgggctatcctcaaaccccgaaaagtgtgtgtggggggcaagcggagaaaagacgagatcagtgtcgacagtctggactttagcaaaaagatcttgcatacagcttggcatccttcagaaaatattatagcagtggcggctacaaataacctatatatattccaggacaaggttaactaggtggacaagttattacttaataatctcacatactgaatactagtcaaacaagtttttaaatgtttctttgggtcttcatttgatgcattgactttaatttccctatacaggaaatgattggaatagaattaaaaggagtccaacattcccagctccccagttctaagaaacttttgtcaaacccaataggtttgggacacttctgtttagaattgaaagctgccagctaacagtaattcttccatagttgacttgaacttctgatgcttttattgcccagttttctctggtgggtccagtgttttgttcctaggtgtctgctgcgataaaatgaggttgtctgtagtatttaaggagaaaagagataagttttttttaattaagcaattccatttgattgaaaaaaatcaacaaaaaataaacaccgtttactcttag

SEQ ID NO: 96645 - DNA, 2042 bp, Artificial Sequence
  derived and/or modified sequence
gtgaagtcagtggccaccagaccctgagctccccgccccatgtgctgtggagtctaggatgttgaagagagctgggaggagatgccaagaacactaggctgcttcctaccatctagcttacagtccaacatgtgagtaacaccaatacaaatgaaaagccatcaaatgtgtccaatagtgaatatcatcccggcagtctctgagctaggagggagagtcctggagaggtgtttattttctgatataaaaaaggagccaagggagaacccaagacagagaatagtggcccaataatgaagcatgaattatccagatgaaaacacctatggaaataaagctgacattatctctacggtagaattcaaccacacgggagaattactagcgacaggggacaaggggggtcgggttgtaatatttcaacgagagcaggagagtaaaaatcaggttcatcgtaggggtgaatacaatgtttacagcacattccagagccatgaacccgagttcgattacctgaagagtttagaaatagaagaaaaaatcaataaaataagatggctcccccagcagaatgcagcttactttcttctgtctactaatgataaaactgtgaagctgtggaaagtcagcgagcgtgataagaggccagaaggctacaatctgaaagatgaggagggccggctccgggatcctgccaccatcacaaccctgcgggtgcctgtcctgagacccatggacctgatggtggaggccaccccacgaagagtatttgccaacgcacacacatatcacatcaactccatatctgtcaacagcgactatgaaacctacatgtccgctgatgacctgaggattaacctatggaactttgaaataaccaatcaaagttttaatattgtggacattaagccagccaacatggaggagctcacggaggtgatcacagcagccgagttccacccccatcattgcaacaccttcgtgtacagcagcagcaaagggacaatccggctgtgtgacatgcgggcatctgccctgtgtgacaggcacaccaaattttttgaagagccggaagatccaagcaacagatcatttttctctgaaattatctcttcgatttcggatgtgaagttcagccacagtgggaggtatatcatgaccagggactacttgaccgtcaaagtctgggatctcaacatggaaaaccgccccatcgagacttaccaggttcatgactacctccgcagcaagctgtgttccctctatgaaaatgactgcatttttgataaatttgagtgtgtgtggaatgggtcagacagtgtcatcatgacaggctcctacaacaacttcttcaggatgttcgacagaaacaccaagcgtgatgtgacccttgaggcttcgagggaaaacagcaagccccgggctatcctcaaaccccgaaaagtgtgtgtggggggcaagcggagaaaagacgagatcagtgtcgacagtctggactttagcaaaaagatcttgcatacagcttggcatccttcagaaaatattatagcagtggcggctacaaataacctatatatattccaggacaaggttaactaggtggacaagttattacttaataatctcacatactgaatactagtcaaacaagtttttaaatgtttctttgggtcttcatttgatgcattgactttaatttccctatacaggaaatgattggaatagaattaaaaggagtccaacattcccagctccccagttctaagaaacttttgtcaaacccaataggtttgggacacttctgtttagaattgaaagctgccagctaacagtaattcttccatagttgacttgaacttctgatgcttttattgcccagttttctctggtgggtccagtgttttgttcctaggtgtctgctgcgataaaatgaggttgtctgtagtatttaaggagaaaagagataagttttttttaattaagcaattccatttgattgaaaaaaatcaacaaaaaataaacaccgtttactcttagacaaa

SEQ ID NO: 96646 - DNA, 1299 bp, Artificial Sequence
  derived and/or modified sequence
atgaactaccccgacgagaacacctacggcaacaaggccgacatcatcagcaccgtggagttcaaccacaccggcgagctgctggccaccggcgacaagggcggcagagtggtgatcttccagagagagcaggagagcaagaaccaggtgcacagaagaggcgagtacaacgtgtacagcaccttccagagccacgagcccgagttcgactacctgaagagcctggagatcgaggagaagatcaacaagatcagatggctgccccagcagaacgccgcctacttcctgctgagcaccaacgacaagaccgtgaagctgtggaaggtgagcgagagagacaagagacccgagggctacaacctgaaggacgaggagggcagactgagagaccccgccaccatcaccaccctgagagtgcccgtgctgagacccatggacctgatggtggaggccacccccagaagagtgttcgccaacgcccacacctaccacatcaacagcatcagcgtgaacagcgactacgagacctacatgagcgccgacgacctgagaatcaacctgtggaacttcgagatcaccaaccagagcttcaacatcgtggacatcaagcccgccaacatggaggagctgaccgaggtgatcaccgccgccgagttccacccccaccactgcaacaccttcgtgtacagcagcagcaagggcaccatcagactgtgcgacatgagagccagcgccctgtgcgacagacacaccaagttcttcgaggagcccgaggaccccagcaacagaagcttcttcagcgagatcatcagcagcatcagcgacgtgaagttcagccacagcggcagatacatcatgaccagagactacctgaccgtgaaggtgtgggacctgaacatggagaacagacccatcgagacctaccaggtgcacgactacctgagaagcaagctgtgcagcctgtacgagaacgactgcatcttcgacaagttcgagtgcgtgtggaacggcagcgacagcgtgatcatgaccggcagctacaacaacttcttcagaatgttcgacagaaacaccaagagagacgtgaccctggaggccagcagagagaacagcaagcccagagccatcctgaagcccagaaaggtgtgcgtgggcggcaagagaagaaaggacgagatcagcgtggacagcctggacttcagcaagaagatcctgcacaccgcctggcaccccagcgagaacatcatcgccgtggccgccaccaacaacctgtacatcttccaggacaaggtgaactag

SEQ ID NO: 96647 - protein, 257 aa, Artificial Sequence
  derived and/or modified sequence
MEEEASSPGLGCSKPHLEKLTLGITRILESSPGVTEVTIIEKPPAERHMISSWEQKNNCVMPEDVKNFYLMTNGFHMTWSVKLDASDDQPEKPHFDSRSVIFELDSCNGSGKVCLVYKSGKPALAEDTEIWFLDRALYWHFLTDTFTAYYRLLITHLGLPQWQYAFTSYGISPQAKQWFSMYKPITYNTNLLTEETDSFVNKLDPSKVFKSKNKIVIPKKKGPVQPAGGQKGPSGPSGPSTSSTSKSSSGSGNPTRK

SEQ ID NO: 96648 - DNA, 774 bp, Artificial Sequence
  derived and/or modified sequence
atggaggaggaggccagcagccccggcctgggctgcagcaagccccacctggagaagctgaccctgggcatcaccagaatcctggagagcagccccggcgtgaccgaggtgaccatcatcgagaagccccccgccgagagacacatgatcagcagctgggagcagaagaacaactgcgtgatgcccgaggacgtgaagaacttctacctgatgaccaacggcttccacatgacctggagcgtgaagctggacgccagcgacgaccagcccgagaagccccacttcgacagcagaagcgtgatcttcgagctggacagctgcaacggcagcggcaaggtgtgcctggtgtacaagagcggcaagcccgccctggccgaggacaccgagatctggttcctggacagagccctgtactggcacttcctgaccgacaccttcaccgcctactacagactgctgatcacccacctgggcctgccccagtggcagtacgccttcaccagctacggcatcagcccccaggccaagcagtggttcagcatgtacaagcccatcacctacaacaccaacctgctgaccgaggagaccgacagcttcgtgaacaagctggaccccagcaaggtgttcaagagcaagaacaagatcgtgatccccaagaagaagggccccgtgcagcccgccggcggccagaagggccccagcggccccagcggccccagcaccagcagcaccagcaagagcagcagcggcagcggcaaccccaccagaaagtag

SEQ ID NO: 96649 - DNA, 774 bp, Artificial Sequence
  derived and/or modified sequence
atggaagaggaagcctctagccccggactgggttgcagtaaacctcacttagaaaagctcaccctgggaattaccaggatcctggagtcctcccccggagtgaccgaggtcacaatcattgagaaacccccagccgagcggcatatgatcagcagctgggagcagaaaaataactgtgtaatgcccgaggacgtgaaaaatttttacttgatgaccaacggctttcatatgacctggtccgtgaaactggacgctagcgacgatcagcccgaaaagccacacttcgattccagaagcgtgatcttcgagctcgactcatgcaatggatccggcaaagtatgcttggtttataagtccggaaagcctgcccttgcagaggatacagagatctggttcctagatagagccctctactggcactttctgaccgatacttttacagcttactacagactgttgataactcatctcggtctccctcagtggcagtacgcatttaccagctacggaattagtccgcaggctaagcagtggtttagtatgtataaaccaataacctacaacactaaccttctaactgaggagacagattcctttgtcaacaagctggatccttctaaagttttcaagagcaaaaacaaaatcgtcatccctaagaaaaaaggacctgttcagcccgctgggggacagaagggcccctctggcccctccgggcctagtacctcaagcacaagtaagagttcctccggcagcggaaacccaaccagaaaatag

SEQ ID NO: 96650 - DNA, 774 bp, Artificial Sequence
  derived and/or modified sequence
atggaggaggaggccagcagccctggcctgggctgcagcaagccccacctggagaagctgaccctgggcatcacccgcatcctggagagcagccctggggtgacagaggtgaccatcatcgagaagcccccagctgagcggcacatgatcagctcctgggagcagaagaacaactgtgtgatgccagaagatgtgaagaacttctacctgatgaccaacggcttccacatgacctggagcgtgaagctggatgccagtgatgaccagcctgagaagccccactttgacagccgcagcgtcatctttgagctggacagctgcaatggcagcggcaaggtgtgcctggtgtacaagagcggcaagccagccctggccgaggacacagagatctggttcctggaccgggccctgtactggcacttcctgacagacaccttcaccgcctactaccgcctgctgatcacccacctgggcctgccccagtggcagtatgccttcaccagctatggcatcagcccccaggccaagcagtggttctccatgtacaagcccatcacctacaacaccaacctgctgacagaggagacagacagctttgtgaacaagctggaccccagcaaggtgttcaagagcaagaacaagatcgtcatccccaagaagaagggccctgtgcagcctgctgggggccagaagggccccagcggccccagcggccccagcaccagcagcaccagcaagagcagcagcggcagcggcaaccccaccaggaagtag

SEQ ID NO: 96651 - DNA, 1717 bp, Artificial Sequence
  derived and/or modified sequence
gtgcggtgtggggcaccgggcggggccgcgggaaccggcgccccacggagctgctgctgtcagaccaaccccgggcccccatcatcactgcgccgcgctttcaggcgccgagaactaccgttcccggcatgccatgaaattggcctcggcgctgaggcggggtccggccctccacccgctcccgccgcgcgcgaatcgcggtcgcgagccatggaggaggaggcatcgtccccggggctgggctgcagcaagccgcacctggagaagctgaccctgggcatcacgcgcatcctagaatcttccccaggtgtgactgaggtgaccatcatagaaaagcctcctgctgaacgtcatatgatttcttcctgggaacaaaagaataactgtgtgatgcctgaagatgtgaagaacttttacctgatgaccaatggcttccacatgacatggagtgtgaagctggatgccagtgatgatcagccagagaagcctcactttgactctcgcagtgtgatatttgagctggattcatgcaatggcagtgggaaagtttgccttgtctacaaaagtgggaaaccagcattagcagaagacactgagatctggttcctggacagagcgttatactggcattttctcacagacacctttactgcctattaccgcctgctcatcacccacctgggcctgccccagtggcaatatgccttcaccagctatggcattagcccacaggccaagcaatggttcagcatgtataaacctatcacctacaacacaaacctgctcacagaagagaccgactcctttgtgaataagctagatcccagcaaagtgtttaagagcaagaacaagatcgtaatcccaaaaaagaaagggcctgtgcagcctgcaggtggccagaaagggccctcaggaccctccggtccctccacttcctccacttctaaatcctcctctggctctggaaaccccacccggaagtgagcacccctccctccaactccctaccagctccagagtggtggtttccatgcacagatggccctaggggtgacctccagttttgcgtgtggaccgtaggcctctttctagttgaatgaccaaaattgtaaggcttttagtcccaccgacattagccaggctcgtagtgaggcctccagagcaggttgtgctgtcccctgcctctggaagcaatggggaatttggaatcttgtgtaagtgcccaaataagtctgagtgctttcctcttcttcaacactcaaccctcaatcccttagcactgattgattagagaggtcccccaaagaaaccactggttttgacccatgaagcattagaactgcattgttcattcaggagccactagtcacatatgactatttaaatttaaagtaaattgtatgaaaaattcatttcttcaattgcattagccacattttgagtattcatgtggctggtagattctgtattagcacaaagatatggaacatttccatcaccacagaaagttctgttggacagcactgcattagaatattttcatactgctcttcctcaattaatttttgttgttaatgttgatgtcttcattggatgggtcataatgttccatgaaacctctcaagtacacaattgtatgttctttgtatcccttaccacaaatatctcgctctgctcatttcttttgcagcttcctataaagtttgtcttcctcatc

SEQ ID NO: 96652 - DNA, 774 bp, Artificial Sequence
  derived and/or modified sequence
atggaggaggaggccagcagccccggcctgggctgcagcaagccccatctggagaaattgaccttgggtattaccagaatcttggagagttccccgggtgtgactgaggttaccataattgagaagccacctgctgaacgccatatgataagtagctgggaacaaaaaaacaactgtgttatgccagaggacgtcaaaaacttctatctgatgacgaacggctttcacatgacgtggagcgtgaaacttgatgccagtgatgatcagccagagaagccccacttcgattcccgatccgtcatcttcgaactagatagttgtaacgggtcaggcaaggtatgcctggtttataagtctggcaaacccgcattggccgaggatacagagatttggttcttggatcgcgccttgtattggcatttcctgaccgacaccttcacggcatattacaggctcctgatcactcatctcggcttgccccagtggcagtatgcctttactagctatggcatcagtcctcaagccaaacaatggttttcgatgtacaaaccaattacatataacacaaatctgctcaccgaggagacagattccttcgtcaataagctggacccttctaaggttttcaagagtaaaaataagatcgtgatccccaagaaaaaaggtcccgtccaaccagcaggaggacaaaaaggccccagtggcccatctggccctagcacctcgagcacttcgaaatcaagctcaggcagcggtaatcctacccgcaagtag

SEQ ID NO: 96653 - DNA, 774 bp, Artificial Sequence
  derived and/or modified sequence
atggaggaagaggcctccagtcctggcctcgggtgcagtaagccacatctggagaagctgacactgggcatcacgcggatccttgaatcttccccaggcgtgaccgaggtcaccatcatcgagaagcctcccgcagaacggcacatgataagctcatgggagcaaaagaataattgtgtgatgccagaggacgtcaagaatttctatctgatgaccaacggcttccatatgacttggtcagtgaagctggacgcctcagacgatcagcctgaaaagcctcactttgatagcagaagtgtgatctttgaacttgacagttgtaacggttccggaaaggtttgtctagtttataagtcagggaaaccagcccttgcggaggacaccgagatctggtttttagatagggctctgtactggcacttcctcacggacacctttaccgcgtactaccgcctactgatcacccacctggggctgccccagtggcagtatgcatttacctcatatggcatttccccacaggctaagcagtggttctccatgtacaagcctatcacctacaacaccaacctgctcaccgaggagactgacagcttcgtgaacaagctggacccgtcaaaggtatttaagagtaaaaataaaattgtgattccgaagaaaaaaggacccgtgcagccagcaggcggtcagaagggaccctctggtcccagcggtccaagtacaagctccactagcaagtcctcctccggatccggcaacccaacgcggaaatag

SEQ ID NO: 96654 - protein, 324 aa, Artificial Sequence
  derived and/or modified sequence
MGPWGEPELLVWRPEAVASEPPVPVGLEVKLGALVLLLVLTLLCSLVPICVLRRPGANHEGSASRQKALSLVSCFAGGVFLATCLLDLLPDYLAAIDEALAALHVTLQFPLQEFILAMGFFLVLVMEQITLAYKEQSGPSPLEETRALLGTVNGGPQHWHDGPGVPQASGAPATPSALRACVLVFSLALHSVFEGLAVGLQRDRARAMELCLALLLHKGILAVSLSLRLLQSHLRAQVVAGCGILFSCMTPLGIGLGAALAESAGPLHQLAQSVLEGMAAGTFLYITFLEILPQELASSEQRILKVILLLAGFALLTGLLFIQI

SEQ ID NO: 96655 - protein, 240 aa, Artificial Sequence
  derived and/or modified sequence
MGPWGEPELLVWRPEAVASEPPVPVGLEVKLGALVLLLVLTLLCSLVPICVLRRPGANHEGSASRQKALSLVSCFAGGVFLATCLLDLLPDYLAAIDEALAALHVTLQFPLQEFILAMGFFLVLVMEQITLAYKEQSGPSPLEETRALLGTVNGGPQHWHDGPGVPQASGAPATPSALRACVLVFSLALHSVFEGLAVGLQRDRARAMELCLALLLHKGILAVSLSLRLLQSHLRAQVVA

SEQ ID NO: 96656 - protein, 206 aa, Artificial Sequence
  derived and/or modified sequence
MGPWGEPELLVWRPEAVASEPPVPVGLEVKLGALVLLLVLTLLCSLVPICVLRRPGANHEGSASRQKALSLVSCFAGGVFLATCLLDLLPDYLAAIDEALAALHVTLQFPLQEFILAMGFFLVLVMEQITLAYKEQSGPSPLEETRALLGTVNGGPQHWHDGPGVPQASGAPATPSALRACVLVFSLALHSVFEGLAVGLQRDRAR

SEQ ID NO: 96657 - protein, 321 aa, Artificial Sequence
  derived and/or modified sequence
MGPWGEPELLVWRPEAVASEPPVPVGLEVKLGALVLLLVLTLLCSLVPICVLRRPGANHEGSASRQKALSLVSCFAGGVFLATCLLDLLPDYLAAIDEALAALHVTLQFPLQEFILAMGFFLVLVMEQITLAYKEQSGPSPLEETRALLGTVNGGPQHWHDGPGVPQASGAPATPSALRACVLVFSLALHSVFEGLAVGLQRDRARAMELCLALLLHKGILAVSLSLRLLQSHLRAQVVAGCGILFSCMTPLGIGLGAALAESAGPLHQLAQSVLEGMAAGTFLYITFLEILPQELASSEQRILKVILLLAGFALLTGLLF

SEQ ID NO: 96658 - protein, 222 aa, Artificial Sequence
  derived and/or modified sequence
MKAQLQFPLQEFILAMGFFLVLVMEQITLAYKEQSGPSPLEETRALLGTVNGGPQHWHDGPGVPQASGAPATPSALRACVLVFSLALHSVFEGLAVGLQRDRARAMELCLALLLHKGILAVSLSLRLLQSHLRAQVVAGCGILFSCMTPLGIGLGAALAESAGPLHQLAQSVLEGMAAGTFLYITFLEILPQELASSEQRILKVILLLAGFALLTGLLFIQI

SEQ ID NO: 96659 - protein, 313 aa, Artificial Sequence
  derived and/or modified sequence
MGPWGEPELLVWRPEAVASEPPVPVGLVLTLLCSLVPICVLRRPGANHEGSASRQKALSLVSCFAGGVFLATCLLDLLPDYLAAIDEALAALHVTLQFPLQEFILAMGFFLVLVMEQITLAYKEQSGPSPLEETRALLGTVNGGPQHWHDGPGVPQASGAPATPSALRACVLVFSLALHSVFEGLAVGLQRDRARAMELCLALLLHKGILAVSLSLRLLQSHLRAQVVAGCGILFSCMTPLGIGLGAALAESAGPLHQLAQSVLEGMAAGTFLYITFLEILPQELASSEQRILKVILLLAGFALLTGLLFIQI

SEQ ID NO: 96660 - DNA, 975 bp, Artificial Sequence
  derived and/or modified sequence
atgggcccctggggcgagcctgaacttctggtgtggagacctgaggcggtagcatctgagcctccagtccccgtggggctggaagtcaagcttggcgctctggtgctactgctcgtgctgaccctgctgtgcagtctggtgcccatttgcgtcctccgacggccaggagctaaccacgaagggagcgcatccaggcagaaagctctctctctcgtctcttgttttgctgggggggtctttctggctacctgcttgctggatctcctccctgactatctggccgccattgacgaggctttggccgccctgcatgtgaccttgcaatttccacttcaggagtttatcctggcgatgggtttttttttggtgcttgttatggagcaaattactttggcttataaggagcagagtggaccatccccgcttgaggagacaagggccttactgggcactgttaatggtggcccgcagcattggcatgacgggccaggtgttccccaagcgtccggtgcccctgccacccctagcgccttgcgggcctgcgtgctggtgtttagcctcgcactgcattctgttttcgaaggcctcgccgtcgggttacagcgggatcgggcacgtgctatggaactttgcctagcccttctgctacacaaggggatcctcgcggtgtccttgtcgctacggttgctccaatcccacctgagggcacaggtcgtcgccggatgcggaatattgttttcgtgtatgacaccactgggtatcggtctaggtgccgcactcgcggagtcagctggccccctccaccaacttgcgcagtcagtgctggagggtatggccgctgggacatttctatacattacctttctggagatcctgcctcaagaattggccagttcggagcaacgaatcctgaaggtgatccttctgctcgcaggtttcgcgcttctgactggccttctgttcatccagatttag

SEQ ID NO: 96661 - DNA, 975 bp, Artificial Sequence
  derived and/or modified sequence
atggggccatggggcgagccagaactactggtgtggcgaccagaagccgtggcctctgaacctcccgtgcctgtcgggctcgaggtgaagctgggagccttagtcctgctcctagtcttgactctactgtgttcactagttcccatctgcgtgcttagaaggcctggagcaaaccatgagggatccgcctccagacaaaaagccctcagcctggtctcttgctttgccggtggcgtgtttctggccacatgtctgcttgatctgcttcccgactacctcgctgccattgacgaggcattagcagccctgcacgtgacccttcagtttcctctccaggagtttattctggcaatggggttcttcctagtgctggtgatggagcagatcacactggcctataaggagcagagtggcccatccccactggaggaaacacgtgccttgctgggcactgtgaacggagggccccagcactggcacgatggccctggggttccacaagcgtcaggcgcgccagcaacccccagcgcactgcgcgcctgcgtgctcgtcttctccctggccctccactcagtgtttgagggcctggccgtgggtctgcagcgggacagagcccgggcaatggagttatgtctcgcattgctcttgcataaaggtattttggcagttagtctctccttgcggctcctgcagtcccatctcagggcgcaggtggtagcaggctgcggtattctgttctcttgcatgacccctctgggaattggtctgggcgccgcccttgcagaatccgccggcccactccaccaactggctcagagcgtcctggaggggatggcagccggaaccttcctctacatcaccttcctggagattctgcctcaggagctcgccagctccgaacagcggatacttaaggtcatcctcctgcttgccgggtttgccctgctcaccgggctcttattcattcaaatctag

SEQ ID NO: 96662 - DNA, 975 bp, Artificial Sequence
  derived and/or modified sequence
atgggaccctggggcgaaccagagctgctcgtctggcggcccgaggcggtggcgagcgagcctcccgttccagtcggcctggaggtcaaattgggcgctctggtcctattgctggtgcttaccttactgtgctcactggtcccaatctgcgtgctgcgaaggcctggcgccaatcacgagggaagtgctagcaggcaaaaagcactcagcctggtgtcctgttttgctggaggagtgttcctggctacatgccttcttgacctgctgcccgactacctcgcagcaatcgacgaggctttagcggccttgcacgtgactttacagttccccctccaggagttcattctcgccatgggcttctttttagtgcttgtgatggaacagatcaccctagcctataaagaacagagtggcccttcaccgctggaggaaacgcgcgctttgctgggtactgtcaacggcggcccacagcattggcatgatggcccaggagtcccccaggcatcaggcgcccctgctaccccaagtgcattgcgggcttgcgtgctggttttcagccttgcactgcactcggtgtttgagggattggccgtgggcctccagcgcgatagggcccgcgcgatggagctttgcctggctctgctcctacataagggcatcctcgcagtcagtttatccctgaggctgctgcagtctcatttgcgggctcaggtagtggccggatgtggcatcctgttctcttgcatgacccccctaggaataggcctgggcgcagctctggcagagtccgcaggtcctttgcatcagctggcacaatccgtactggagggcatggccgccgggacctttttatacatcaccttcctggagattctaccacaggagttggcatcctctgagcagcgcattctcaaggtcattctcctgcttgccggatttgctcttctgaccggactgttgtttatccagatttag

SEQ ID NO: 96663 - DNA, 975 bp, Artificial Sequence
  derived and/or modified sequence
atgggaccctggggagaaccagagctgctagtttggcgcccggaagcggtagctagtgagccccccgtgccagtcgggctcgaggtaaagctgggagccctagtactgcttcttgtgttgacgttattatgttctctggtaccgatatgcgtcctacggcggccaggggctaaccatgagggctcagctagtcgccagaaggccctgtcactcgtgtcctgctttgcagggggcgtctttctggccacctgtttactggatttgctgcctgattacctcgcagcaatcgatgaagctctggcagcgcttcacgtgacacttcagttccctcttcaggagtttatcttggccatggggtttttcctggttctggtcatggaacagatcacactcgcgtataaggagcaatccggacccagtcctcttgaggagacgcgcgccctgctagggacagtaaacggtggcccccagcattggcatgacggccccggcgtgcctcaggcaagtggagcgcccgcaactccctcagccctcagggcatgcgtgttggtttttagccttgcattgcactcagtttttgagggactggcagtcgggctgcaacgggaccgcgccagggcaatggaactgtgcctcgctctcctgctacataaaggcattctggctgtgtccctgtccttaaggttactgcagtcacacctaagagcccaggtagtggccggctgcggcatactgttttcttgcatgactcccttaggaatcgggctgggagccgctttggcagagtctgccggacccctgcatcagctcgcacagagcgtgctggaaggaatggccgcaggaactttcctctacatcactttcttggaaattttgccacaggaactggcctcttcagaacagcggattctcaaggtaatcctcctgctcgccggattcgcactgctgacaggcctgctcttcatccagatttag

SEQ ID NO: 96664 - DNA, 723 bp, Artificial Sequence
  derived and/or modified sequence
atggggccctggggggagccagagctcctcgtctggcgtccagaggcagttgccagcgaacctcccgttcctgtagggcttgaggtgaagttaggagcgctggtgttgcttctagtgctcacattgctctgctctttagtacctatttgtgtactccgcaggccaggtgcaaaccacgaaggtagcgccagccgccagaaggcactttccttagtgagttgcttcgctggaggcgtctttctggccacctgcctgcttgacctgctaccagattacctggccgcaattgacgaagccttggcagcgctgcacgtgacccttcagtttcctctgcaggagttcattcttgccatgggattcttcctggtgctggttatggagcagatcacccttgcctacaaggaacagtccgggccttcgcctcttgaggagaccagggcgctcttaggcaccgtgaatggaggcccgcagcactggcatgatgggccaggcgtgccccaggcctctggggctccagccactccgagcgccctgcgtgcctgcgtgctggtcttttctcttgccctacactccgtcttcgaaggtctcgcagtggggctgcagcgcgatagagcacgcgctatggagctgtgtctcgcgcttctgttgcacaaaggcattctcgctgtctctctctcccttagactgctgcagagccacctacgcgcccaggttgtcgcatag

SEQ ID NO: 96665 - DNA, 621 bp, Artificial Sequence
  derived and/or modified sequence
atggggccatggggggaacccgagttgctggtctggcggccagaagcagttgctagcgaacctcccgtcccagtgggactggaggtaaaactcggagcactcgtgctcctcctcgttcttactctcctgtgctctttggtgcctatttgtgtgcttaggcggcccggcgcaaatcatgaggggagcgcttcgcggcagaaggcgctgtcacttgtgtcctgctttgccggaggggtttttttggccacatgtctattggacctgctgccagactacttagcagccatcgatgaagcactcgccgccctgcacgtcactttacagtttcctctgcaggagtttattcttgccatggggttctttctggtgctggtaatggagcagattacactcgcgtacaaggaacaaagtggcccaagtcccttggaggaaacgcgagctctcctggggacagtcaatggtgggccacagcactggcatgacggaccaggggtcccccaggcatccggagcaccagctactccctcagccctgcgcgcctgtgtgctcgtcttctcccttgctctgcacagcgtgttcgaaggactggctgtgggcctgcagcgtgaccgggcccggtag

SEQ ID NO: 96666 - DNA, 966 bp, Artificial Sequence
  derived and/or modified sequence
atggggccctggggcgagccagagcttttagtgtggaggccagaggcggttgctagcgaacctcctgttcctgtgggacttgaggtgaaattgggagccctcgtgctgctgctcgtcttgacactgctctgttctctggtgcccatttgcgtcctacgccgccccggcgctaaccatgagggctccgcgtcccggcagaaggccttgtcacttgtcagttgtttcgctggtggggtattcctggcaacgtgcctgctggatctcctgcccgattacttggctgcaatcgacgaggctctcgcagccctgcatgtcacactgcagtttccacttcaagagtttatcctcgcaatggggttcttcctcgtccttgttatggaacagatcacattggcgtataaagagcagagtggaccatctccattagaggagacacgggccctgctcggaacagtgaacggggggccccagcactggcacgacgggcccggggtcccccaagccagcggcgctcccgccacgccctctgccctgcgggcctgcgtgttggtcttcagcctagctctgcattccgtattcgaggggctcgcagttggcttgcagagggatagggcccgagctatggaactgtgcctcgccctcctgcttcacaaaggtatcctggccgtgtctttgagtttgcgcctgcttcaatcccaccttcgggctcaggtggtcgcggggtgcggtattctgttcagctgcatgactcccttagggattgggcttggcgccgcactcgcagagtctgctgggccattgcatcagctggcgcagagcgtactagagggtatggccgccggcaccttcctgtatatcacgttcctggagattcttccgcaggaactagcctcatctgagcaacgtattctcaaagtgatcctgctgctcgcaggtttcgctctgttgaccggcctgttgttttag

SEQ ID NO: 96667 - DNA, 669 bp, Artificial Sequence
  derived and/or modified sequence
atgaaagcgcagctgcagtttcctctgcaggaattcattcttgccatgggtttctttcttgtgctcgttatggaacagatcaccctcgcatacaaggagcagagcggtccatcaccattggaggagacaagagctcttctgggcaccgttaatggtggcccacaacattggcacgatgggccaggggttccgcaagcctcgggggcaccggctactccgagtgcactgcgcgcttgcgttctggtgttctcgctggcactgcactccgtattcgagggactagctgtgggtctgcaacgggatcgcgctcgcgcaatggaactgtgtctggcactcctgctgcataaaggaattcttgccgtaagcctctccctccggttgctgcagtcacatctgagggcacaggtggtggctgggtgtgggatattgttttcctgcatgacccccctggggattggacttggtgccgccctggcggagagcgccgggcccctgcatcagctagcccagagcgtgttggaaggaatggcagcgggaacttttctgtatatcactttcctcgaaatcctccctcaggagctggcgagctcagaacaacgcattttaaaggtaatcttgctgttggccggctttgcactgctgacagggctccttttcattcagatttag

SEQ ID NO: 96668 - DNA, 942 bp, Artificial Sequence
  derived and/or modified sequence
atgggcccctggggggagccagaattgctagtgtggaggccagaggcagtggccagcgagccaccagtgccagtgggactggtgctgaccttactgtgttctttggtgcctatttgtgttcttaggaggccaggagcaaatcacgaaggcagcgccagtcgccaaaaggcattgtctctggtcagttgcttcgccgggggagtcttcctagcaacatgtctgctggatctgctgccggattacttggcagccatcgacgaggccctggccgcgctccatgtcacgctacagttcccactccaagagttcattctggctatgggcttctttctggtactggttatggaacagattacccttgcctataaggaacagtccgggccttctcccttggaggaaactcgggcgcttctgggcaccgtgaatggcgggccccaacactggcatgacggaccaggggttcctcaagcatccggagctcctgcaaccccgtctgccctcagagcatgtgtgttagtgttcagcctggcactccactccgtgtttgaagggttggctgtgggtctccagagggatcgcgcacgggcaatggaattgtgtctggctctcctgctacataagggcatcctggcggtcagccttagcctccgtctgctccaatctcacctacgggcgcaggtcgttgcgggctgtggcatcctcttctcctgcatgacccctctcgggatcggtctaggtgcggcactcgctgaatctgcaggccctctccaccagctggcccagagcgtgctggaggggatggcggcagggacgtttctgtacattactttcctggaaatactgccacaggaacttgcctcatccgagcaaaggatactcaaggtaatccttctgctagctggattcgccctcctcacagggctcctttttatacaaatatag

SEQ ID NO: 96669 - DNA, 975 bp, Artificial Sequence
  derived and/or modified sequence
atgggcccctggggcgagcctgagctgctggtgtggaggcctgaggccgtggccagcgagccccctgtgcctgtgggcctggaggtgaagctgggcgccctggtgctgctgctggtgctgaccctgctgtgcagcctggtgcccatctgtgtgctgcggcggcctggggccaaccacgagggcagcgccagccggcagaaggccctgagcctggtgtcctgctttgctgggggcgtcttcctggccacctgcctgctggacctgctgcctgactacctggccgccattgatgaggccctggccgccctgcacgtgaccctgcagttccccctgcaggagttcatcctggccatgggcttcttcctggtgctggtgatggagcagatcaccctggcctacaaggagcagagcggccccagccccctggaggagacccgggccctgctgggcaccgtgaatggaggcccccagcactggcatgatggccctggggtgccccaggccagcggggccccagccacccccagcgccctgcgggcctgtgtgctggtgttcagcctggccctgcacagcgtgtttgagggcctggccgtgggcctgcagagggaccgggcccgggccatggagctgtgcctggccctgctgctgcacaagggcatcctggccgtgtccctgagcctgcggctgctgcagagccacctgcgggcccaggtggtggccggctgcggcatcctcttcagctgcatgacccccctgggcatcggcctgggcgccgccctggccgagagcgctggccccctgcaccagctggcccagagcgtgctggagggcatggccgccggcaccttcctgtacatcaccttcctggagatcctgccccaggagctggccagcagcgagcagaggatcctgaaggtgatcctgctgctggccggctttgccctgctgaccggcctgctcttcatccagatctag

SEQ ID NO: 96670 - DNA, 723 bp, Artificial Sequence
  derived and/or modified sequence
atgggcccctggggcgagcctgagctgctggtgtggaggcctgaggccgtggccagcgagccccctgtgcctgtgggcctggaggtgaagctgggcgccctggtgctgctgctggtgctgaccctgctgtgcagcctggtgcccatctgtgtgctgcggcggcctggggccaaccacgagggcagcgccagccggcagaaggccctgagcctggtgtcctgctttgctgggggcgtcttcctggccacctgcctgctggacctgctgcctgactacctggccgccattgatgaggccctggccgccctgcacgtgaccctgcagttccccctgcaggagttcatcctggccatgggcttcttcctggtgctggtgatggagcagatcaccctggcctacaaggagcagagcggccccagccccctggaggagacccgggccctgctgggcaccgtgaatggaggcccccagcactggcatgatggccctggggtgccccaggccagcggggccccagccacccccagcgccctgcgggcctgtgtgctggtgttcagcctggccctgcacagcgtgtttgagggcctggccgtgggcctgcagagggaccgggcccgggccatggagctgtgcctggccctgctgctgcacaagggcatcctggccgtgtccctgagcctgcggctgctgcagagccacctgcgggcccaggtggtggcctag

SEQ ID NO: 96671 - DNA, 621 bp, Artificial Sequence
  derived and/or modified sequence
atgggcccctggggcgagcctgagctgctggtgtggaggcctgaggccgtggccagcgagccccctgtgcctgtgggcctggaggtgaagctgggcgccctggtgctgctgctggtgctgaccctgctgtgcagcctggtgcccatctgtgtgctgcggcggcctggggccaaccacgagggcagcgccagccggcagaaggccctgagcctggtgtcctgctttgctgggggcgtcttcctggccacctgcctgctggacctgctgcctgactacctggccgccattgatgaggccctggccgccctgcacgtgaccctgcagttccccctgcaggagttcatcctggccatgggcttcttcctggtgctggtgatggagcagatcaccctggcctacaaggagcagagcggccccagccccctggaggagacccgggccctgctgggcaccgtgaatggaggcccccagcactggcatgatggccctggggtgccccaggccagcggggccccagccacccccagcgccctgcgggcctgtgtgctggtgttcagcctggccctgcacagcgtgtttgagggcctggccgtgggcctgcagagggaccgggccaggtag

SEQ ID NO: 96672 - DNA, 966 bp, Artificial Sequence
  derived and/or modified sequence
atgggcccctggggcgagcctgagctgctggtgtggaggcctgaggccgtggccagcgagccccctgtgcctgtgggcctggaggtgaagctgggcgccctggtgctgctgctggtgctgaccctgctgtgcagcctggtgcccatctgtgtgctgcggcggcctggggccaaccacgagggcagcgccagccggcagaaggccctgagcctggtgtcctgctttgctgggggcgtcttcctggccacctgcctgctggacctgctgcctgactacctggccgccattgatgaggccctggccgccctgcacgtgaccctgcagttccccctgcaggagttcatcctggccatgggcttcttcctggtgctggtgatggagcagatcaccctggcctacaaggagcagagcggccccagccccctggaggagacccgggccctgctgggcaccgtgaatggaggcccccagcactggcatgatggccctggggtgccccaggccagcggggccccagccacccccagcgccctgcgggcctgtgtgctggtgttcagcctggccctgcacagcgtgtttgagggcctggccgtgggcctgcagagggaccgggcccgggccatggagctgtgcctggccctgctgctgcacaagggcatcctggccgtgtccctgagcctgcggctgctgcagagccacctgcgggcccaggtggtggccggctgcggcatcctcttcagctgcatgacccccctgggcatcggcctgggcgccgccctggccgagagcgctggccccctgcaccagctggcccagagcgtgctggagggcatggccgccggcaccttcctgtacatcaccttcctggagatcctgccccaggagctggccagcagcgagcagaggatcctgaaggtgatcctgctgctggccggctttgccctgctgaccggcctgctcttctag

SEQ ID NO: 96673 - DNA, 669 bp, Artificial Sequence
  derived and/or modified sequence
atgaaggcccagctgcagttccccctgcaggagttcatcctggccatgggcttcttcctggtgctggtgatggagcagatcaccctggcctacaaggagcagagcggccccagccccctggaggagacccgggccctgctgggcaccgtgaatggaggcccccagcactggcatgatggccctggggtgccccaggccagcggggccccagccacccccagcgccctgcgggcctgtgtgctggtgttcagcctggccctgcacagcgtgtttgagggcctggccgtgggcctgcagagggaccgggcccgggccatggagctgtgcctggccctgctgctgcacaagggcatcctggccgtgtccctgagcctgcggctgctgcagagccacctgcgggcccaggtggtggccggctgcggcatcctcttcagctgcatgacccccctgggcatcggcctgggcgccgccctggccgagagcgctggccccctgcaccagctggcccagagcgtgctggagggcatggccgccggcaccttcctgtacatcaccttcctggagatcctgccccaggagctggccagcagcgagcagaggatcctgaaggtgatcctgctgctggccggctttgccctgctgaccggcctgctcttcatccagatctag

SEQ ID NO: 96674 - DNA, 942 bp, Artificial Sequence
  derived and/or modified sequence
atgggcccctggggcgagcctgagctgctggtgtggaggcctgaggccgtggccagcgagccccctgtgcctgtgggcctggtgctgaccctgctgtgcagcctggtgcccatctgtgtgctgcggcggcctggggccaaccacgagggcagcgccagccggcagaaggccctgagcctggtgtcctgctttgctggaggagtcttcctggccacctgcctgctggacctgctgcctgactacctggccgccattgatgaggccctggccgccctgcacgtgaccctgcagttccccctgcaggagttcatcctggccatgggcttcttcctggtgctggtgatggagcagatcaccctggcctacaaggagcagagcggccccagccccctggaggagacccgggccctgctgggcaccgtgaatggaggcccccagcactggcatgatggccctggggtgccccaggccagcggggccccagccaccccatctgccctgcgggcctgtgtgctggtgttcagcctggccctgcacagcgtgtttgagggcctggccgtgggcctgcagagggaccgggcccgggccatggagctgtgcctggccctgctgctgcacaagggcatcctggccgtgtccctgagcctgcggctgctgcagagccacctgcgggcccaggtggtggccggctgcggcatcctcttcagctgcatgacccccctgggcatcggcctgggcgccgccctggccgagagcgctggccccctgcaccagctggcccagagcgtgctggagggcatggctgctggcaccttcctgtacatcaccttcctggagatcctgccccaggagctggccagcagcgagcagaggatcctgaaggtgatcctgctgctggccggctttgccctgctgaccggcctgctcttcatccagatctag

SEQ ID NO: 96675 - DNA, 975 bp, Artificial Sequence
  derived and/or modified sequence
atgggcccctggggcgagcccgagctgctggtgtggcggcccgaggcagtcgcgtctgagcctcctgttcccgtgggactggaggtcaagctaggtgccctggttctcctgctggtccttaccttactgtgcagccttgtgccaatatgcgtacttcgcagaccaggagctaatcacgagggcagtgcctctcgccagaaggccttatccctggtctcctgttttgccggtggggtgtttctagctacttgtctcctggatcttctgccggactaccttgccgctattgatgaagctttggccgctcttcatgtgaccctacaatttcctctgcaggagttcattctcgccatggggttctttctggttctcgtgatggagcagattacacttgcatacaaggagcagagcgggccttcaccactggaggagaccagggcgttgcttgggacagtgaatggcgggccacaacattggcacgacggccccggggtcccccaggcatctggagccccagccaccccaagcgcacttagggcatgcgtcctcgttttttcactggctctgcactcagtcttcgagggtctcgccgtgggtctccagagggaccgcgccagggctatggagctctgtttggctcttctgctgcataaaggaattctcgctgtgtccttaagtctgcgtttactgcagagtcatctacgagcccaagttgttgctggttgtggtatactgttctcgtgtatgacacccttaggcatcggactgggtgcagcactcgccgagtcggccgggcccctgcaccagcttgctcagagtgtgctcgagggaatggctgcaggtacattcttatatattacctttctcgaaattctgccccaggagctggcttcatcagaacagcgcattcttaaggtgatccttctactcgccgggttcgccttgctgacagggctgctgttcattcaaatatag

SEQ ID NO: 96676 - DNA, 975 bp, Artificial Sequence
  derived and/or modified sequence
atgggcccctggggcgagcccgagctgctggtgtggcggcccgaggccgttgccagcgaacctcctgtccccgtcggcctggaagtgaagctgggagccctggtgctcttgctggtcctgacgttgctgtgctcactagtacccatttgcgtgctgcggcgcccaggagccaatcacgagggctccgcttctcgacagaaagctttgtctctggtgagttgcttcgcagggggagtttttctcgccacttgcctcctggacctgctgccagactacttggctgccatcgacgaggctctggccgcgctgcacgttaccctgcagtttcccctacaagaatttattctggccatgggtttttttctggtcttagtgatggagcaaatcaccttagcatacaaagaacaatccggaccttctccactcgaggagaccagggcactgctcggtaccgtcaatggcggacctcagcactggcatgatggccctggagtcccccaggccagtggggcccctgccacaccaagcgccctccgtgcttgtgttttagtcttttccctggcactacattccgtgtttgagggtttagccgtgggtttgcagcgagaccgggcacgcgccatggagttgtgtctggcactgctgctgcacaaaggaatactcgcggtaagtttatcacttagactcctgcaaagccacctgagggcacaggtggtggccgggtgcgggatcttattcagttgtatgaccccactgggcataggactgggggccgccctcgcagaatctgcaggccccctgcatcaactcgctcaaagtgtgctggaaggcatggccgccgggacattcctatacatcaccttcctggaaatcttgccgcaagagctggcctcttctgaacagcgaatcctcaaggtgatcctgctgctggccgggttcgcgctgctgacaggtttactctttattcagatctag

SEQ ID NO: 96677 - DNA, 975 bp, Artificial Sequence
  derived and/or modified sequence
atgggcccctggggcgagcccgagctgctggtgtggcggcccgaggcggtggcctccgaacctccagttcccgttggactggaagtgaagttgggggcactcgtcctgctcttggtgctcacgttactatgctctttagtcccaatctgtgtgttgcggcggcccggagctaaccatgaggggagtgcatcgcggcagaaggccctgagcctcgtgagctgttttgctggaggcgtcttcctggcaacatgtctcctcgatttactccctgattacctggctgcgatcgacgaggccttggcggctctccatgtgacattgcagttcccactccaggagtttattctggccatgggtttctttctggtgctggtcatggagcagatcaccctcgcatataaagagcagagtgggcctagcccgctggaggaaactcgggctttgctgggcacagtcaacggtggcccacagcactggcatgatggacctggagtgccgcaagcctccggtgcaccagctacaccaagcgccctccgggcctgtgttctcgtattcagcctagccttgcactcagtgtttgagggcctagctgtagggctgcagagggaccgcgctagggccatggagctttgtctcgccctgctgcttcacaagggcattcttgctgtgagtctttccttgcgacttctgcagagccacctgagggcccaggttgtggccgggtgcggcattcttttcagctgtatgacccctctgggtatcggactaggggccgccctggccgaaagtgctggtcctttacaccagctggctcagtcggtactggaaggcatggccgccggtacttttctatatatcacctttctggagatcctgcctcaggaactggcttcgagtgagcagaggatactcaaggtgattcttctgcttgccgggttcgccctgctaactgggctcctcttcatccagatatag

SEQ ID NO: 96678 - DNA, 975 bp, Artificial Sequence
  derived and/or modified sequence
atgggcccctggggcgagcccgagctgctggtgtggcggcccgaggcggttgccagtgaacccccagtacctgtggggctcgaggtcaaattgggcgcactcgtcctgctcctcgtgctgaccctcctgtgctccctggtgcccatctgtgtgttacgacgcccgggtgcaaaccatgaaggcagcgccagtcgccagaaagcattaagcctggtctcctgctttgccgggggcgtgtttctcgccacctgtctcttggacttacttcccgattatttggccgccattgacgaggcgctggctgctctccacgtcacactgcaatttcccctacaagagtttattctggccatgggctttttcctggttctggtgatggaacagatcaccctggcatacaaggagcagtcggggccatcacctttggaagagacacgggcgctgctcggcacagtcaatggaggaccgcagcattggcatgacggacctggcgtcccccaggcaagtggagcccccgccactccttctgccttgcgcgcctgcgtcctggtgtttagcctggccctgcacagtgtctttgagggacttgccgtggggttacagcgagacagagcccgtgcaatggagttgtgtctggcgctcctactgcacaaaggcattctggccgtaagcctgagtctgcgccttctgcagtcccatttgcgtgctcaggtggtcgctggttgtgggatccttttctcgtgcatgactccccttgggatcggcttgggcgctgccctggctgaaagcgccggtccgttacaccaattggctcagtccgtgttagagggaatggccgctggtacattcctttacattactttcctggaaatcctcccccaagagcttgcgtcttccgagcaaaggattttgaaggttattctgctgctggccggctttgctttactaacgggcctgttgtttatccaaatctag

SEQ ID NO: 96679 - DNA, 723 bp, Artificial Sequence
  derived and/or modified sequence
atgggcccctggggcgagcccgagctgctggtgtggcggcccgaggcggtggcctccgagcctccagtgccagttggcctcgaggttaaactgggcgcattagtgctcctcctggtcctgaccctcctttgtagcttggttccgatttgcgtgcttcggaggccaggggcaaaccatgaagggtccgcaagcagacagaaggccttatctctcgtgtcatgctttgcaggcggggttttcctggcaacatgtctgctggatttgctgcccgactatctggccgcgattgacgaggctctggccgccttgcacgtgaccctacaattcccgctgcaagaattcatcctggcaatggggttcttcttggtcctggtaatggagcaaattactttggcgtacaaggaacaaagtggcccttctcccctggaggagacgcgagcgctcctgggcaccgttaacggtggacctcaacattggcacgacggacctggtgtgccccaggcaagcggagctcccgccaccccttctgcgcttcgtgcctgcgtcctcgttttctctctggcactccatagcgtgtttgagggcttggccgtaggccttcagagagaccgcgcccgcgcgatggagctgtgtctggccctgctgctgcacaaagggatactcgctgtgtcgctgtctctgaggctgttgcagagtcacctgcgggctcaggtggtggcatag

SEQ ID NO: 96680 - DNA, 621 bp, Artificial Sequence
  derived and/or modified sequence
atgggcccctggggcgagcccgagctgctggtgtggcggcccgaggccgtagcttctgaaccaccggtcccggtaggcttggaggtgaaactcggagctctggtgcttttgcttgttcttacactactctgcagcctggtaccaatatgcgtactccgcagacctggcgctaaccacgagggaagcgcttcacgacagaaggcattaagcctcgtcagttgctttgcaggcggggtttttctagcaacctgcctgttagatcttctgcccgattatctcgcagcaatcgacgaggccctggccgctcttcacgtaaccttacagtttcccctgcaggagttcatactggctatggggtttttcctggttttagtgatggaacagatcacgcttgcttataaagagcaatccgggccctctccacttgaggagacacgggctttactcggtacggtcaacggtggtccccagcactggcatgatggccctggtgtcccccaggccagtggggctcctgcaacgcctagcgctcttcgggcttgcgtgctggtgtttagccttgccttgcactccgtcttcgagggactggctgtcggactgcagagggatcgggctaggtag

SEQ ID NO: 96681 - DNA, 966 bp, Artificial Sequence
  derived and/or modified sequence
atgggcccctggggcgagcccgagctgctggtgtggcggcccgaggcggtagccagcgagcctccggtgcccgtcgggctggaagtaaagctcggggcgctggtcctgctgctagtattgactctcttatgcagtctggttcctatttgcgtgttgcggaggcctggcgctaaccacgaaggatcagctagcaggcaaaaagcactgtcgctagtgagttgtttcgcagggggggtgtttcttgctacctgcttgctcgacctgctgcctgactatctggctgcgatagacgaggccctggccgccctgcacgtcaccttgcagtttcctttgcaagagtttatcttagccatgggcttttttttagtcctggtcatggaacaaataaccctcgcctataaagaacagtccggcccaagtcctctggaagagacccgggctctgctgggcacagtaaatggtggaccacaacactggcacgatggtccaggggtaccacaggcctctggggctccagcgacaccatctgcactgcgcgcttgcgtgcttgtattcagtttagctctgcactccgtctttgaggggctggcggtcgggctccaaagagacagggctagagcaatggagctttgcctcgccttactgctgcataaaggcatccttgcagtgagcttgtctctgcgactgttacagtcacaccttagagcccaggtggtcgcaggctgtgggatccttttttcatgcatgactcctcttgggatcggactgggcgctgcactggctgaatccgcaggccccctacaccagcttgcccaaagcgtgctggaaggaatggccgccggcactttcctttatattacgttcttagagatcctaccccaggaattggcaagcagtgaacagcgtatcttgaaggtcattctgttgctcgcagggtttgctctgcttactggcctgctgttctag

SEQ ID NO: 96682 - DNA, 669 bp, Artificial Sequence
  derived and/or modified sequence
atgaaggcccagctgcagttccccctgcaggagttcatcctggccatgggattctttctagtgctggtgatggagcagattacactagcgtataaggagcagtcaggtccatcaccattggaagagacccgtgctttgctaggcaccgtaaatggtggacctcagcattggcacgatggtccaggcgttcctcaggcctctggcgccccagctactcccagcgccttacgagcatgcgtgctggtgttctcacttgcactccactccgtgttcgaaggattagcagtgggactgcagagagatcgagcccgggccatggagctatgtcttgctctgctgttgcataaaggaatcctcgcagtcagtctgtctctgaggctcttacaaagccatttgagagcgcaggtggttgccgggtgcggaatactcttttcatgtatgacacccctcgggattggactgggtgccgcgctggcagagtccgctggtcctttacaccagctagcccagagcgtcctcgaaggaatggctgcagggaccttcctgtacattacctttctggagattctaccccaggagctcgcttctagtgagcagagaattttgaaagtgattctgctgcttgccggctttgcactcctgaccggtctgctatttatccaaatttag

SEQ ID NO: 96683 - DNA, 942 bp, Artificial Sequence
  derived and/or modified sequence
atgggcccctggggcgagcccgagctgctggtgtggcggcccgaggccgtggcctctgagccgccagtgcctgtgggactggttctaacacttctgtgcagcttagtgccaatctgtgtgctccggaggcccggcgctaatcatgaaggttcagcttctaggcagaaggcattatcgctcgtttcctgctttgcagggggcgtgttcctggccacttgtctgcttgatctgctgccagactatctcgcagccatcgacgaggccctcgctgccctgcacgtaacactccaatttccactacaagagttcatcctagccatgggattcttcctggtgctggtgatggagcagataaccctcgcttacaaggaacagagcggcccatcaccattggaggaaactcgggcactgttgggcacagtgaatggcggccctcagcattggcatgatgggccaggcgtaccacaggcttccggcgcacctgctaccccttccgctttgcgtgcctgtgttctcgtgtttagcctggcgctgcactccgtctttgagggcctggccgtcggtctgcagcgggatagagctcgagcgatggaattgtgccttgcactgttactgcacaagggaattctagccgtgtctttatccttgagacttttgcaaagccacctcagagcccaagttgtcgcaggttgcgggatactcttttcttgcatgacccctttggggattggtttgggcgccgcgcttgcagagtcagccgggcctttgcatcagcttgcacagagcgttctagagggcatggcagctggcacttttttgtatatcacattcttggaaatattaccacaggaactggccagctctgagcaaaggatactcaaggtgattttgctattggccggatttgccctgttaaccgggctcctttttattcagatatag

SEQ ID NO: 96684 - DNA, 975 bp, Artificial Sequence
  derived and/or modified sequence
atgggaccatggggtgagccagagctacttgtctggagacccgaagccgtagccagtgaacctcctgtcccagttgggttggaggttaaactgggcgcactggtcttgttgcttgtgcttactcttctgtgctccctcgtcccgatttgcgtgttgaggaggccaggggcaaaccacgagggttccgctagtcgtcagaaggctctctctctggtaagctgtttcgccggaggcgttttcctggcaacgtgcctgttagatttgctaccagattacctcgcagccatcgatgaagctctggccgcactgcatgtcacattgcaattccctctacaggaatttattcttgccatgggcttttttttggtcctggtgatggagcagatcactctggcatacaaggagcagagtgggccatctccgcttgaagagacgagggccctgctgggcacagtgaacggcggaccccagcactggcatgacggcccaggggtaccccaggcttctggcgctcccgcaactccttcagcactcagggcttgtgtcctcgttttctctctggccctgcattcagtgtttgagggactggcagtgggacttcagagagatcgagccagggcaatggaactgtgtctggcactgttactgcataagggtatcctggcagtgagcctgagtctcagactgctgcagtctcatctccgagcacaggtcgtagctggttgtggaatcctgttcagctgtatgacccccttgggtatagggctgggggcagccttggccgaatctgccggtcccctgcaccagttagcccaatccgtgctggagggcatggcagcaggcaccttcctctatatcacctttctcgaaatcctgccccaggaattggcatcatccgagcagcgtattctaaaagttatcctgctgttggctgggtttgcgctgcttacaggcctgctctttatccagatctag

SEQ ID NO: 96685 - DNA, 975 bp, Artificial Sequence
  derived and/or modified sequence
atgggcccatggggcgagccagagcttctcgtgtggcggccagaggccgtggccagcgaaccccctgtacccgttgggctggaggtcaagcttggtgccctggtgctgctcctggttctcacgctactttgtagtctggtccccatctgcgtgctgaggaggccaggagctaaccatgaaggctccgcatcccgccaaaaagcactcagcctggtgtcttgtttcgcagggggagtgtttctggccacctgtctcctagacctacttccagattatctggcagccatcgacgaagctctggcagcactgcatgtgacgctgcagttccccctgcaagagttcattttagccatgggtttttttctggtccttgtgatggaacaaataacactggcatataaagagcagagcggaccttctccactagaggagacccgggctcttctggggacagtgaacggcggaccacagcattggcacgatggccctggcgtgccccaagccagcggtgctccggcaacacctagtgctctgagagcctgcgttctggtcttctcgttagccctccattccgtgtttgaggggctggcagtcggcctacagagagatcgcgctagagcaatggagctgtgcctggcacttttgctgcacaaagggattcttgctgtgtcactgagtttacgcctccttcagtctcatctgcgagctcaagtggtcgccggatgcggtatactgttttcgtgtatgacacctctcggtatcggcctgggagcggctctcgcggagtccgccggaccccttcatcaactagcccagtccgttctggagggcatggccgcaggaactttcctgtatattacattcttagagattttgccccaagagctggccagttccgaacaacggattttgaaagtgatactccttttggcgggtttcgctctcctgaccggattactttttattcagatctag

SEQ ID NO: 96686 - DNA, 975 bp, Artificial Sequence
  derived and/or modified sequence
atgggcccttggggagagccagagctgttggtgtggaggccagaggctgtggccagcgagccccctgtaccggttggacttgaggtcaagttgggagctctggtactgttgctggtattgacactgctgtgctccttggttccaatctgcgtgctgaggcgtccaggtgcgaaccacgaaggcagtgcctccagacagaaggccctgtccttggtgtcctgtttcgctggtggggtctttttggctacctgtctgctagacttgctcccggattatctggctgcaattgatgaggcgctggctgctctgcatgtgaccctgcagtttcccctgcaggagttcatcctcgccatgggctttttcctcgtgctggttatggagcagatcactttggcgtacaaggagcagtccggccctagcccactggaagaaacaagggcacttctggggacagtcaacggaggacctcagcactggcatgacggacccggtgtgcctcaggcatccggcgctcccgctacaccctctgcactgcgggcttgcgtgctagtgttctctctcgcgctccatagcgtgttcgagggtctcgctgtggggctgcaacgagatagagcacgtgcaatggagctgtgtctggctctgctcctccataaagggatcctagccgtgtctctctccctcaggctgttgcagtcgcaccttagagcacaggtcgttgctggctgcgggattctgttctcttgtatgacaccgcttgggattggcttgggtgcggctctggcggagtccgctggccctttgcatcagctcgcccagagcgtgttagagggaatggccgctgggaccttcctgtatatcacttttctggagatcttgcctcaagagctagcttccagcgagcagaggattctgaaggtaatcttgctcctggccggttttgccttgctgactggactgcttttcatccagatatag

SEQ ID NO: 96687 - DNA, 975 bp, Artificial Sequence
  derived and/or modified sequence
atggggccatggggcgaacctgagctcctggtatggagacctgaggctgtggctagcgaacccccagtgcccgtagggctcgaagttaagttaggagcattggtgctgctgctggtacttactctgctctgctccctcgtaccaatttgtgtgctccgccgaccgggagccaatcacgagggcagtgcttcgcgccagaaagcgctatcactggtgagctgttttgcgggaggagtctttctggccacctgtcttctggatttactgccggactacctggctgcaatagatgaggctttggctgcgctgcatgtgaccctgcagttcccgctccaagaattcatccttgcgatgggatttttcctggtgctcgttatggagcaaatcactttggcttacaaagaacagtctgggccatcaccattagaggaaactagagctttgctggggacggtgaacgggggaccacagcattggcacgatggacccggtgtcccccaagcatcaggggctccggcaaccccttctgctcttcgcgcttgcgtgctcgtcttcagtctcgcactgcatagcgtgttcgagggcctcgctgttggactgcaacgagatcgggctcgcgcaatggagctgtgtttagctctgttactccataaggggattttggccgtgagccttagcttaaggttactgcagagccacctcagggctcaggtcgtggctggctgcgggatcttattttcttgcatgactcccctgggaattggactgggcgcagctctggctgagagtgctggtccactccaccagttggctcaaagtgtattggagggcatggctgccggaacctttctttacatcaccttcctggagatcttgccccaggagcttgcctcttcagaacagagaatcctgaaggtaatcctgctgcttgccggatttgctttgctcacaggcttactctttatccaaatctag

SEQ ID NO: 96688 - DNA, 723 bp, Artificial Sequence
  derived and/or modified sequence
atggggccatggggagagcctgagttactagtctggcggcctgaagctgttgcgtccgagccaccggtcccagttggactcgaggtgaagctgggtgccctggtgttgctgctggtgctcacccttctctgcagtttagtgcctatctgcgtgctgcggaggcctggcgcaaaccacgaaggttccgcatcacggcaaaaggctctgtcactagtatcttgcttcgctgggggagtatttctagcaacgtgtcttcttgacctactgccagactacctggcagccatcgacgaagcactagccgcacttcacgtgactctgcaattccccctccaagagtttattctggccatgggattttttctggtactggtgatggaacagattacccttgcatacaaggaacagtcaggaccctccccactggaggaaacccgggcactgctgggtaccgtcaatggaggccctcagcactggcacgatgggccaggtgtgcctcaggcctctggggcacccgctactccctccgcccttagggcctgcgtgttggttttctcgctcgccctgcactccgttttcgaaggcctggcggtgggcctgcagagggaccgggcacgtgccatggagctgtgtctggcactgctcttacacaagggcattctcgccgtaagcctatctctgcggcttctgcaatctcaccttagggcccaagtggtggcttag

SEQ ID NO: 96689 - DNA, 621 bp, Artificial Sequence
  derived and/or modified sequence
atgggaccctggggtgaacctgaattactcgtgtggaggccggaggccgtagcatctgagccccctgtccccgttgggctggaagtaaaactcggggctctggtgctgctgctggttttgacattactctgctccctcgtcccaatttgtgtgctgcgaagacctggagcgaaccatgaagggtccgctagtcggcagaaagctctgagtttggtctcgtgcttcgctggaggtgtgtttctggcgacctgcctgctcgatctgcttcctgattatctggccgcaattgacgaggcattggccgctctgcacgtcaccctccagttcccacttcaggagttcattcttgcgatgggcttctttctggtactcgttatggaacaaatcacactggcatacaaggagcagtctggaccaagcccccttgaggagacgagagctctgctaggcacagtcaacgggggaccccagcattggcatgatggaccgggagtgcctcaggcatccggggctcctgccacacccagtgctctgcgagcctgcgtcctggtgtttagcctggccctgcactcggtgttcgagggattggccgtcggtctgcagcgtgatcgggcacggtag

SEQ ID NO: 96690 - DNA, 966 bp, Artificial Sequence
  derived and/or modified sequence
atgggcccatggggggagcctgaactgttggtctggcggcctgaggcagttgccagcgaacccccagttccggttggtctggaggtgaaactgggcgctctggtcctgctactggtcttgactttactgtgttctctcgtgccgatctgcgtattgaggcggcctggcgcaaaccacgaaggatctgcctcaagacagaaggctttgtcccttgtcagctgcttcgccggtggagtatttttggccacttgtttgctggacctgctgcccgactacctcgccgctatcgacgaagcgctagctgctctccatgtgacacttcagttccccctgcaagagtttatcctggcgatgggtttttttctcgttctcgtaatggaacaaataactctggcctacaaggagcagtccggcccttcaccccttgaggagacacgggcactgctgggaacagtgaacggaggaccccagcactggcatgacggccctggggtaccgcaagcctctggagcaccggctacaccttccgcactgagagcctgcgtcctggtgttctccttggcactgcattccgtcttcgaaggcctcgcagtcggccttcagcgagatagggcaagggcaatggaactgtgtctggccctgctcctacacaaaggaattctcgctgtcagtctgtctttacgcctattacagtcccatctccgggcacaggttgtcgctggatgtggaatcctgttttcctgcatgacaccccttggtataggattgggtgctgcactggccgagtctgcaggaccactgcatcagctggcacagtccgtcttggagggcatggcggcaggcactttcctgtacataacttttctagagatcctgcctcaggagctcgcttcatccgagcagcgcatcctcaaggtcattttgctcctggccggatttgcactcttaactggattgcttttttag

SEQ ID NO: 96691 - DNA, 669 bp, Artificial Sequence
  derived and/or modified sequence
atgaaagcgcagctgcagttccccctacaggagtttattctggccatgggcttcttcttggtcctggtgatggaacagataacgcttgcctataaagagcagtccggaccaagccccctggaggaaaccagggcgctgcttggcaccgtgaatggaggcccacaacactggcacgatggccctggagtgccgcaggcttctggagctccggcaacaccgagcgcactgagagcatgcgtccttgtttttagtctggcactgcactccgtgttcgagggcttggctgtcgggcttcagagagacagagcaagggcgatggagctttgccttgcactactcctccacaagggcatattggccgtcagcctctctttaaggctgcttcaatctcacctgcgggctcaagtggtggctgggtgtggtatacttttctcgtgcatgacacccctgggcattggccttggggcagcccttgcagaatccgccggtccgctccatcaactggcacagagcgtgctagaaggcatggcagcaggaacgtttctctacattacctttctggaaattctgccacaggagctggccagcagtgagcaacgcatcctgaaggttatccttctcctggctggctttgccttactcactgggctgcttttcatccaaatatag

SEQ ID NO: 96692 - DNA, 942 bp, Artificial Sequence
  derived and/or modified sequence
atggggccatggggcgaacccgagctactggtgtggcgtcccgaggccgtcgctagcgagcctcccgtgccagtcggccttgtcctgacactcctgtgctctctcgtgcccatctgtgtcctgcgacgtccaggagctaatcacgagggatctgctagccggcagaaagccctgagcctcgtttcatgcttcgccggtggcgtcttccttgctacctgcttgcttgacctcttgccagattacctggctgctatcgatgaggcactcgccgcattgcatgtcacgttacaattcccattacaagagtttatcctagctatgggcttctttcttgtactggtcatggagcagataacactggcctacaaggaacagtccggacccagcccgctggaggagactcgtgcgctgctcggtactgtcaacggcggtccgcaacactggcatgatggtcctggtgtaccacaggcatctggcgcacctgcaaccccctcggctttacgggcttgtgtcctcgtgttctctctggcgctgcatagtgtgtttgaaggtctcgccgtgggcctgcaacgagatagagcaagagccatggaactctgtctggctctcctcttacacaaggggattctcgcggtgagcctcagcctgcgactactccagtctcacctgcgggcacaggtagtggcaggatgcggcatcttattttcttgtatgactcccttagggataggcctgggagccgcactcgccgagagcgccggaccactccaccagctggcccaatccgtattggaaggaatggcagccggaaccttcctgtacatcacctttctggagatcctgccgcaggaactcgcaagctcagaacagaggattttgaaagtcatattactattggcgggttttgcgctcctcactgggcttctgttcattcaaatctag

SEQ ID NO: 96693 - DNA, 2427 bp, Artificial Sequence
  derived and/or modified sequence
aggagagtcaggccaatggggccgcagttctttcttttttttttctttattcttatttttggagacagggtctcgctctgttgcccaggctggagtgcggtggtgcgatcacggttccatgcagcccccgacctcccgggctcaggtgattctcccgcctcagcaccgcgagcagctaggaccacaggcgcgagccactgcgtccggccggcgggacttatttgtcaggcggggattgggttccgccagcctaaagggaggggtaagcgccagaatatgaatcgccgggaagctgggagaaagctccgggaaaccctgagcagccaggtcgcctgctccgcccgctcccgctcccgatctctgattgctcctaactgacgtcactcccggtctgtccccgcccactcggtgctgccattggcagtcggtcgtgggtctgagagtcactggagctaccagaagcatcatggggccctggggagagccagagctcctggtgtggcgccccgaggcggtagcttcagagcctccagtgcctgtggggctggaggtgaagttgggggccctggtgctgctgctggtgctcaccctcctctgcagcctggtgcccatctgtgtgctgcgccggccaggagctaaccatgaaggctcagcttcccgccagaaagccctgagcctagtaagctgtttcgcggggggcgtctttttggccacttgtctcctggacctgctgcctgactacctggctgccatagatgaggccctggcagccttgcacgtgacgctccagttcccactgcaagagttcatcctggccatgggcttcttcctggtcctggtgatggagcagatcacactggcttacaaggagcagtcagggccgtcacctctggaggaaacaagggctctgctgggaacagtgaatggtgggccgcagcattggcatgatgggccaggggtcccacaggcgagtggagccccagcaaccccctcagccttgcgtgcctgtgtactggtgttctccctggccctccactccgtgttcgaggggctggcggtagggctgcagcgagaccgggctcgggccatggagctgtgcctggctttgctgctccacaagggcatcctggctgtcagcctgtccctgcggctgttgcagagccaccttagggcacaggtggtggctggctgtgggatcctcttctcatgcatgacacctctaggcatcgggctgggtgcagctctggcagagtcggcaggacctctgcaccagctggcccagtctgtgctagagggcatggcagctggcacctttctctatatcacctttctggaaatcctgccccaggagctggccagttctgagcaaaggatcctcaaggtcattctgctcctagcaggctttgccctgctcactggcctgctcttcatccaaatctagggggcttcaagagaggggcaggggagattgatgatcaggtgcccctgttctcccttccctcccccagttgtggggaataggaaggaaaggggaagggaaatactgaggaccaaaaagttctctgggagctaaagatagagcctttggggctatctgactaatgagagggaagtgggcagacaagaggctggccccagtcccaaggaacaagagatggtcaagtcgctagagacatatcaggggacattaggattggggaagacacttgactgctagaatcagaggttggacactatacataaggacaggctcacatgggaggctggaggtgggtacccagctgctgtggaacgggtatggacaggtcataaacctagagtcagtgtcctgttggtcctagcccatttcagcaccctgccacttggagtggacccctcctactcttcttagcgcctaccctcatacctatctccctcctcccatctcctaggggactggcgccaaatggtctctccctgccaattttggtatcttctctggcctctccagtcctgcttactcctctatttttaaagtgccaaacaaatccccttcctctttctcaaagcacagtaatgtggcactgagccctacccagcacctcagtgaagggggcctgcttgctctttattttggtcccggatcctggggtggggcagaaatattttctgggctggggtaggaggaaggttgttgcagccatctactgctgctgtaccctaggaatatggggacatggacatggtgtcccatgcccagatgataaacactgagctgccaaaacatttttttaaatacacccgaggagcccaagggggaagggcaatgcctacccccagcgttatttttggggagggagggctgtgcatagggacatattctttagaatctattttattaactgacctgttttgggacctgttacccaaataaaagatgtttctaga

SEQ ID NO: 96694 - DNA, 2084 bp, Artificial Sequence
  derived and/or modified sequence
gggagctatgggagggggcgggaattcccgactctaggccggaagcgcgcggagaccatgtagtgagaccctcgcgaggtctgagagtcactggagctaccagaagcatcatggggccctggggagagccagagctcctggtgtggcgccccgaggcggtagcttcagagcctccagtgcctgtggggctggaggtgaagttgggggccctggtgctgctgctggtgctcaccctcctctgcagcctggtgcccatctgtgtgctgcgccggccaggagctaaccatgaaggctcagcttcccgccagaaagccctgagcctagtaagctgtttcgcggggggcgtctttttggccacttgtctcctggacctgctgcctgactacctggctgccatagatgaggccctggcagccttgcacgtgacgctccagttcccactgcaagagttcatcctggccatgggcttcttcctggtcctggtgatggagcagatcacactggcttacaaggagcagtcagggccgtcacctctggaggaaacaagggctctgctgggaacagtgaatggtgggccgcagcattggcatgatgggccaggggtcccacaggcgagtggagccccagcaaccccctcagccttgcgtgcctgtgtactggtgttctccctggccctccactccgtgttcgaggggctggcggtagggctgcagcgagaccgggctcgggccatggagctgtgcctggctttgctgctccacaagggcatcctggctgtcagcctgtccctgcggctgttgcagagccaccttagggcacaggtggtggctggctgtgggatcctcttctcatgcatgacacctctaggcatcgggctgggtgcagctctggcagagtcggcaggacctctgcaccagctggcccagtctgtgctagagggcatggcagctggcacctttctctatatcacctttctggaaatcctgccccaggagctggccagttctgagcaaaggatcctcaaggtcattctgctcctagcaggctttgccctgctcactggcctgctcttcatccaaatctagggggcttcaagagaggggcaggggagattgatgatcaggtgcccctgttctcccttccctcccccagttgtggggaataggaaggaaaggggaagggaaatactgaggaccaaaaagttctctgggagctaaagatagagcctttggggctatctgactaatgagagggaagtgggcagacaagaggctggccccagtcccaaggaacaagagatggtcaagtcgctagagacatatcaggggacattaggattggggaagacacttgactgctagaatcagaggttggacactatacataaggacaggctcacatgggaggctggaggtgggtacccagctgctgtggaacgggtatggacaggtcataaacctagagtcagtgtcctgttggtcctagcccatttcagcaccctgccacttggagtggacccctcctactcttcttagcgcctaccctcatacctatctccctcctcccatctcctaggggactggcgccaaatggtctctccctgccaattttggtatcttctctggcctctccagtcctgcttactcctctatttttaaagtgccaaacaaatccccttcctctttctcaaagcacagtaatgtggcactgagccctacccagcacctcagtgaagggggcctgcttgctctttattttggtcccggatcctggggtggggcagaaatattttctgggctggggtaggaggaaggttgttgcagccatctactgctgctgtaccctaggaatatggggacatggacatggtgtcccatgcccagatgataaacactgagctgccaaaacatttttttaaatacacccgaggagcccaagggggaagggcaatgcctacccccagcgttatttttggggagggagggctgtgcatagggacatattctttagaatctattttattaactgacctgttttgggacctgttacccaaataaaagatgtttctagacatctgtacagta

SEQ ID NO: 96695 - DNA, 2398 bp, Artificial Sequence
  derived and/or modified sequence
gtcggctgcccaggcctccccgggcccgggaacaggagtcccagctcacgcattcttcatctgcttcccgcgacgcttggcggcctcgcaccccgcctcctggagcccggactttcaggcaccgccctcagtgtcgcctcagtccgtcccgggaccgcagactcttagggcccctctctttggccatctgcctctaggtcccatcctggggcctgaagcgcttgttctctgcgctgggaaaaggggaacgatggagcgatccagcacccaaacttaccctgtccaggtggcccacgaagctacccaagacatctctgcacagccctagcctttttggcttcacccactccgttcgggagttggggacccggcctctacattccttaggggaactccagctccaggtctgagagtcactggagctaccagaagcatcatggggccctggggagagccagagctcctggtgtggcgccccgaggcggtagcttcagagcctccagtgcctgtggggctggaggtgaagttgggggccctggtgctgctgctggtgctcaccctcctctgcagcctggtgcccatctgtgtgctgcgccggccaggagctaaccatgaaggctcagcttcccgccagaaagccctgagcctagtaagctgtttcgcggggggcgtctttttggccacttgtctcctggacctgctgcctgactacctggctgccatagatgaggccctggcagccttgcacgtgacgctccagttcccactgcaagagttcatcctggccatgggcttcttcctggtcctggtgatggagcagatcacactggcttacaaggagcagtcagggccgtcacctctggaggaaacaagggctctgctgggaacagtgaatggtgggccgcagcattggcatgatgggccaggggtcccacaggcgagtggagccccagcaaccccctcagccttgcgtgcctgtgtactggtgttctccctggccctccactccgtgttcgaggggctggcggtagggctgcagcgagaccgggctcgggccatggagctgtgcctggctttgctgctccacaagggcatcctggctgtcagcctgtccctgcggctgttgcagagccaccttagggcacaggtggtggctggctgtgggatcctcttctcatgcatgacacctctaggcatcgggctgggtgcagctctggcagagtcggcaggacctctgcaccagctggcccagtctgtgctagagggcatggcagctggcacctttctctatatcacctttctggaaatcctgccccaggagctggccagttctgagcaaaggatcctcaaggtcattctgctcctagcaggctttgccctgctcactggcctgctcttcatccaaatctagggggcttcaagagaggggcaggggagattgatgatcaggtgcccctgttctcccttccctcccccagttgtggggaataggaaggaaaggggaagggaaatactgaggaccaaaaagttctctgggagctaaagatagagcctttggggctatctgactaatgagagggaagtgggcagacaagaggctggccccagtcccaaggaacaagagatggtcaagtcgctagagacatatcaggggacattaggattggggaagacacttgactgctagaatcagaggttggacactatacataaggacaggctcacatgggaggctggaggtgggtacccagctgctgtggaacgggtatggacaggtcataaacctagagtcagtgtcctgttggtcctagcccatttcagcaccctgccacttggagtggacccctcctactcttcttagcgcctaccctcatacctatctccctcctcccatctcctaggggactggcgccaaatggtctctccctgccaattttggtatcttctctggcctctccagtcctgcttactcctctatttttaaagtgccaaacaaatccccttcctctttctcaaagcacagtaatgtggcactgagccctacccagcacctcagtgaagggggcctgcttgctctttattttggtcccggatcctggggtggggcagaaatattttctgggctggggtaggaggaaggttgttgcagccatctactgctgctgtaccctaggaatatggggacatggacatggtgtcccatgcccagatgataaacactgagctgccaaaacatttttttaaatacacccgaggagcccaagggggaagggcaatgcctacccccagcgttatttttggggagggagggctgtgcatagggacatattctttagaatctattttattaactgacctgttttgggacctgttacccaaataaaagatgtttctagac

SEQ ID NO: 96696 - DNA, 2723 bp, Artificial Sequence
  derived and/or modified sequence
cagcggggtccatgtcggctgcccaggcctccccgggcccgggaacaggagtcccagctcacgcattcttcatctgcttcccgcgacgcttggcggcctcgcaccccgcctcctggagcccggactttcaggcaccgccctcagtgtcgcctcagtccgtcccgggaccgcagactcttagggcccctctctttggccatctgcctctaggtcccatcctggggcctgaagcgcttgttctctgcgctgggaaaaggggaacgatggagcgatccagcacccaaacttaccctgtccaggtggcccacgaagctacccaagacatctctgcacagccctagcctttttggcttcacccactccgttcgggagttggggacccggcctctacattccttaggggaactccagctccaggtcctatttggaggcggctcctagtttcctagttttctgggggcaccaggtgaaagggtgatgagatatccatacagcctttctcatgcctcggtttcccccgtgcagtctccctgaataagtcacttgggaaagaaagtgtgagaagagaggaatgttcctggtacaggagtagatgagtcaccctgggtaggggaaggtcacaaagtggctggggccagggagctgcactctgctgaccaagcttccccattccttgccccatcttcctttgcatgatttttcccaaccactctggtctgtcttcctaggtctgagagtcactggagctaccagaagcatcatggggccctggggagagccagagctcctggtgtggcgccccgaggcggtagcttcagagcctccagtgcctgtggggctggaggtgaagttgggggccctggtgctgctgctggtgctcaccctcctctgcagcctggtgcccatctgtgtgctgcgccggccaggagctaaccatgaaggctcagcttcccgccagaaagccctgagcctagtaagctgtttcgcggggggcgtctttttggccacttgtctcctggacctgctgcctgactacctggctgccatagatgaggccctggcagccttgcacgtgacgctccagttcccactgcaagagttcatcctggccatgggcttcttcctggtcctggtgatggagcagatcacactggcttacaaggagcagtcagggccgtcacctctggaggaaacaagggctctgctgggaacagtgaatggtgggccgcagcattggcatgatgggccaggggtcccacaggcgagtggagccccagcaaccccctcagccttgcgtgcctgtgtactggtgttctccctggccctccactccgtgttcgaggggctggcggtagggctgcagcgagaccgggctcgggccatggagctgtgcctggctttgctgctccacaagggcatcctggctgtcagcctgtccctgcggctgttgcagagccaccttagggcacaggtggtggctggctgtgggatcctcttctcatgcatgacacctctaggcatcgggctgggtgcagctctggcagagtcggcaggacctctgcaccagctggcccagtctgtgctagagggcatggcagctggcacctttctctatatcacctttctggaaatcctgccccaggagctggccagttctgagcaaaggatcctcaaggtcattctgctcctagcaggctttgccctgctcactggcctgctcttcatccaaatctagggggcttcaagagaggggcaggggagattgatgatcaggtgcccctgttctcccttccctcccccagttgtggggaataggaaggaaaggggaagggaaatactgaggaccaaaaagttctctgggagctaaagatagagcctttggggctatctgactaatgagagggaagtgggcagacaagaggctggccccagtcccaaggaacaagagatggtcaagtcgctagagacatatcaggggacattaggattggggaagacacttgactgctagaatcagaggttggacactatacataaggacaggctcacatgggaggctggaggtgggtacccagctgctgtggaacgggtatggacaggtcataaacctagagtcagtgtcctgttggtcctagcccatttcagcaccctgccacttggagtggacccctcctactcttcttagcgcctaccctcatacctatctccctcctcccatctcctaggggactggcgccaaatggtctctccctgccaattttggtatcttctctggcctctccagtcctgcttactcctctatttttaaagtgccaaacaaatccccttcctctttctcaaagcacagtaatgtggcactgagccctacccagcacctcagtgaagggggcctgcttgctctttattttggtcccggatcctggggtggggcagaaatattttctgggctggggtaggaggaaggttgttgcagccatctactgctgctgtaccctaggaatatggggacatggacatggtgtcccatgcccagatgataaacactgagctgccaaaacatttttttaaatacacccgaggagcccaagggggaagggcaatgcctacccccagcgttatttttggggagggagggctgtgcatagggacatattctttagaatctattttattaactgacctgttttgggacctgttacccaaataaaagatgtttctagaca

SEQ ID NO: 96697 - DNA, 1030 bp, Artificial Sequence
  derived and/or modified sequence
ggagtgcggtggtgcgatcacggttccatgcagcccccgacctcccgggctcaggtgattctcccgcctcagcaccgcgagcagctaggaccacaggcgcgagccactgcgtccggccggcgggacttatttgtcaggcggggattgggttccgccagcctaaagggaggggtcgcctgctccgcccgctcccgctcccgatctctgattgctcctaactgacgtcactcccggtctgtccccgcccactcggtgctgccattggcagtcggtcgtgggtctgagagtcactggagctaccagaagcatcatggggccctggggagagccagagctcctggtgtggcgccccgaggcggtagcttcagagcctccagtgcctgtggggctggaggtgaagttgggggccctggtgctgctgctggtgctcaccctcctctgcagcctggtgcccatctgtgtgctgcgccggccaggagctaaccatgaaggctcagcttcccgccagaaagccctgagcctagtaagctgtttcgcggggggcgtctttttggccacttgtctcctggacctgctgcctgactacctggctgccatagatgaggccctggcagccttgcacgtgacgctccagttcccactgcaagagttcatcctggccatgggcttcttcctggtcctggtgatggagcagatcacactggcttacaaggagcagtcagggccgtcacctctggaggaaacaagggctctgctgggaacagtgaatggtgggccgcagcattggcatgatgggccaggggtcccacaggcgagtggagccccagcaaccccctcagccttgcgtgcctgtgtactggtgttctccctggccctccactccgtgttcgaggggctggcggtagggctgcagcgagaccgggctcgggccatggagctgtgcctggctttgctgctccacaagggcatcctggctgtcagcctgtccctgcggctgttgcagagccaccttagggcacaggtggtggct

SEQ ID NO: 96698 - DNA, 912 bp, Artificial Sequence
  derived and/or modified sequence
ccatcctggggcctgaagcgcttgttctctgcgctgggaaaaggggaacgatggagcgatccagcacccaaacttaccctgtccaggtggcccacgaagctacccaagacatctctgcacagccctagcctttttggcttcacccactccgttcgggagttggggacccggcctctacattccttaggggaactccagctccaggtcctatttggaggcggctcctagtttcctagttttctgggggcaccaggtgaaagggtctgagagtcactggagctaccagaagcatcatggggccctggggagagccagagctcctggtgtggcgccccgaggcggtagcttcagagcctccagtgcctgtggggctggaggtgaagttgggggccctggtgctgctgctggtgctcaccctcctctgcagcctggtgcccatctgtgtgctgcgccggccaggagctaaccatgaaggctcagcttcccgccagaaagccctgagcctagtaagctgtttcgcggggggcgtctttttggccacttgtctcctggacctgctgcctgactacctggctgccatagatgaggccctggcagccttgcacgtgacgctccagttcccactgcaagagttcatcctggccatgggcttcttcctggtcctggtgatggagcagatcacactggcttacaaggagcagtcagggccgtcacctctggaggaaacaagggctctgctgggaacagtgaatggtgggccgcagcattggcatgatgggccaggggtcccacaggcgagtggagccccagcaaccccctcagccttgcgtgcctgtgtactggtgttctccctggccctccactccgtgttcgaggggctggcggtagggctgcagcgagaccgggctcggg

SEQ ID NO: 96699 - DNA, 1141 bp, Artificial Sequence
  derived and/or modified sequence
agtccgtcccgggaccgcagactcttagggcccctctctttggccatctgcctctaggtcccatcctggggcctgaagcgcttgttctctgcgctgggaaaaggggaacgatggagcgatccagcacccaaacttaccctgtccaggtctgagagtcactggagctaccagaagcatcatggggccctggggagagccagagctcctggtgtggcgccccgaggcggtagcttcagagcctccagtgcctgtggggctggaggtgaagttgggggccctggtgctgctgctggtgctcaccctcctctgcagcctggtgcccatctgtgtgctgcgccggccaggagctaaccatgaaggctcagcttcccgccagaaagccctgagcctagtaagctgtttcgcggggggcgtctttttggccacttgtctcctggacctgctgcctgactacctggctgccatagatgaggccctggcagccttgcacgtgacgctccagttcccactgcaagagttcatcctggccatgggcttcttcctggtcctggtgatggagcagatcacactggcttacaaggagcagtcagggccgtcacctctggaggaaacaagggctctgctgggaacagtgaatggtgggccgcagcattggcatgatgggccaggggtcccacaggcgagtggagccccagcaaccccctcagccttgcgtgcctgtgtactggtgttctccctggccctccactccgtgttcgaggggctggcggtagggctgcagcgagaccgggctcgggccatggagctgtgcctggctttgctgctccacaagggcatcctggctgtcagcctgtccctgcggctgttgcagagccaccttagggcacaggtggtggctggctgtgggatcctcttctcatgcatgacacctctaggcatcgggctgggtgcagctctggcagagtcggcaggacctctgcaccagctggcccagtctgtgctagagggcatggcagctggcacctttctctatatcacctttctggaaatcctgccccaggagctggccagttctgagcaaaggatcctcaaggtcattctgctcctagcaggctttgccctgctcactggcctgctcttc

SEQ ID NO: 96700 - DNA, 1409 bp, Artificial Sequence
  derived and/or modified sequence
attcccgactctaggccggaagcgcgcggagaccatgtagtgagaccctcgcgaggtctgagagtcactggagctaccagaagcatcatggggccctggggagagccagagctcctggtgtggcgccccgaggcggtagcttcagagcctccagtgcctgtggggctggaggtgaagttgggggccctggtgctgctgctggtgctcaccctcctctgcagcctggtgcccatctgtgtgctgcgccggccaggagctaaccatgaaggctcagctccagttcccactgcaagagttcatcctggccatgggcttcttcctggtcctggtgatggagcagatcacactggcttacaaggagcagtcagggccgtcacctctggaggaaacaagggctctgctgggaacagtgaatggtgggccgcagcattggcatgatgggccaggggtcccacaggcgagtggagccccagcaaccccctcagccttgcgtgcctgtgtactggtgttctccctggccctccactccgtgttcgaggggctggcggtagggctgcagcgagaccgggctcgggccatggagctgtgcctggctttgctgctccacaagggcatcctggctgtcagcctgtccctgcggctgttgcagagccaccttagggcacaggtggtggctggctgtgggatcctcttctcatgcatgacacctctaggcatcgggctgggtgcagctctggcagagtcggcaggacctctgcaccagctggcccagtctgtgctagagggcatggcagctggcacctttctctatatcacctttctggaaatcctgccccaggagctggccagttctgagcaaaggatcctcaaggtcattctgctcctagcaggctttgccctgctcactggcctgctcttcatccaaatctagggggcttcaagagaggggcaggggagattgatgatcaggtgcccctgttctcccttccctcccccagttgtggggaataggaaggaaaggggaagggaaatactgaggaccaaaaagttctctgggagctaaagatagagcctttggggctatctgactaatgagagggaagtgggcagacaagaggctggccccagtcccaaggaacaagagatggtcaagtcgctagagacatatcaggggacattaggattggggaagacacttgactgctagaatcagaggttggacactatacataaggacaggctcacatgggaggctggaggtgggtacccagctgctgtggaacgggtatggacaggtcataaacctagagtcagtgtcctgttggtcctagcccatttcagcaccctgccacttggagtggacccctcctactcttcttagcgcctaccctcatacctatctccctcct

SEQ ID NO: 96701 - DNA, 1268 bp, Artificial Sequence
  derived and/or modified sequence
attcccgactctaggccggaagcgcgcggagaccatgtagtgagaccctcgcgaggtctgagagtcactggagctaccagaagcatcatggggccctggggagagccagagctcctggtgtggcgccccgaggcggtagcttcagagcctccagtgcctgtggggctggtgctcaccctcctctgcagcctggtgcccatctgtgtgctgcgccggccaggagctaaccatgaaggctcagcttcccgccagaaagccctgagcctagtaagctgtttcgcggggggcgtctttttggccacttgtctcctggacctgctgcctgactacctggctgccatagatgaggccctggcagccttgcacgtgacgctccagttcccactgcaagagttcatcctggccatgggcttcttcctggtcctggtgatggagcagatcacactggcttacaaggagcagtcagggccgtcacctctggaggaaacaagggctctgctgggaacagtgaatggtgggccgcagcattggcatgatgggccaggggtcccacaggcgagtggagccccagcaaccccctcagccttgcgtgcctgtgtactggtgttctccctggccctccactccgtgttcgaggggctggcggtagggctgcagcgagaccgggctcgggccatggagctgtgcctggctttgctgctccacaagggcatcctggctgtcagcctgtccctgcggctgttgcagagccaccttagggcacaggtggtggctggctgtgggatcctcttctcatgcatgacacctctaggcatcgggctgggtgcagctctggcagagtcggcaggacctctgcaccagctggcccagtctgtgctagagggcatggcagctggcacctttctctatatcacctttctggaaatcctgccccaggagctggccagttctgagcaaaggatcctcaaggtcattctgctcctagcaggctttgccctgctcactggcctgctcttcatccaaatctagggggcttcaagagaggggcaggggagattgatgatcaggtgcccctgttctcccttccctcccccagttgtggggaataggaaggaaaggggaagggaaatactgaggaccaaaaagttctctgggagctaaagatagagcctttggggctatctgactaatgagagggaagtgggcagacaagaggctggccccagtcccaaggaacaagagatggtcaagtcgctagagacatatca

SEQ ID NO: 96702 - DNA, 975 bp, Artificial Sequence
  derived and/or modified sequence
atgggcccctggggcgagcccgagctgctggtgtggagacccgaggccgtggccagcgagccccccgtgcccgtgggcctggaggtgaagctgggcgccctggtgctgctgctggtgctgaccctgctgtgcagcctggtgcccatctgcgtgctgagaagacccggcgccaaccacgagggcagcgccagcagacagaaggccctgagcctggtgagctgcttcgccggcggcgtgttcctggccacctgcctgctggacctgctgcccgactacctggccgccatcgacgaggccctggccgccctgcacgtgaccctgcagttccccctgcaggagttcatcctggccatgggcttcttcctggtgctggtgatggagcagatcaccctggcctacaaggagcagagcggccccagccccctggaggagaccagagccctgctgggcaccgtgaacggcggcccccagcactggcacgacggccccggcgtgccccaggccagcggcgcccccgccacccccagcgccctgagagcctgcgtgctggtgttcagcctggccctgcacagcgtgttcgagggcctggccgtgggcctgcagagagacagagccagagccatggagctgtgcctggccctgctgctgcacaagggcatcctggccgtgagcctgagcctgagactgctgcagagccacctgagagcccaggtggtggccggctgcggcatcctgttcagctgcatgacccccctgggcatcggcctgggcgccgccctggccgagagcgccggccccctgcaccagctggcccagagcgtgctggagggcatggccgccggcaccttcctgtacatcaccttcctggagatcctgccccaggagctggccagcagcgagcagagaatcctgaaggtgatcctgctgctggccggcttcgccctgctgaccggcctgctgttcatccagatctag

SEQ ID NO: 96703 - DNA, 723 bp, Artificial Sequence
  derived and/or modified sequence
atgggcccctggggcgagcccgagctgctggtgtggagacccgaggccgtggccagcgagccccccgtgcccgtgggcctggaggtgaagctgggcgccctggtgctgctgctggtgctgaccctgctgtgcagcctggtgcccatctgcgtgctgagaagacccggcgccaaccacgagggcagcgccagcagacagaaggccctgagcctggtgagctgcttcgccggcggcgtgttcctggccacctgcctgctggacctgctgcccgactacctggccgccatcgacgaggccctggccgccctgcacgtgaccctgcagttccccctgcaggagttcatcctggccatgggcttcttcctggtgctggtgatggagcagatcaccctggcctacaaggagcagagcggccccagccccctggaggagaccagagccctgctgggcaccgtgaacggcggcccccagcactggcacgacggccccggcgtgccccaggccagcggcgcccccgccacccccagcgccctgagagcctgcgtgctggtgttcagcctggccctgcacagcgtgttcgagggcctggccgtgggcctgcagagagacagagccagagccatggagctgtgcctggccctgctgctgcacaagggcatcctggccgtgagcctgagcctgagactgctgcagagccacctgagagcccaggtggtggcctag

SEQ ID NO: 96704 - DNA, 621 bp, Artificial Sequence
  derived and/or modified sequence
atgggcccctggggcgagcccgagctgctggtgtggagacccgaggccgtggccagcgagccccccgtgcccgtgggcctggaggtgaagctgggcgccctggtgctgctgctggtgctgaccctgctgtgcagcctggtgcccatctgcgtgctgagaagacccggcgccaaccacgagggcagcgccagcagacagaaggccctgagcctggtgagctgcttcgccggcggcgtgttcctggccacctgcctgctggacctgctgcccgactacctggccgccatcgacgaggccctggccgccctgcacgtgaccctgcagttccccctgcaggagttcatcctggccatgggcttcttcctggtgctggtgatggagcagatcaccctggcctacaaggagcagagcggccccagccccctggaggagaccagagccctgctgggcaccgtgaacggcggcccccagcactggcacgacggccccggcgtgccccaggccagcggcgcccccgccacccccagcgccctgagagcctgcgtgctggtgttcagcctggccctgcacagcgtgttcgagggcctggccgtgggcctgcagagagacagagccagatag

SEQ ID NO: 96705 - DNA, 966 bp, Artificial Sequence
  derived and/or modified sequence
atgggcccctggggcgagcccgagctgctggtgtggagacccgaggccgtggccagcgagccccccgtgcccgtgggcctggaggtgaagctgggcgccctggtgctgctgctggtgctgaccctgctgtgcagcctggtgcccatctgcgtgctgagaagacccggcgccaaccacgagggcagcgccagcagacagaaggccctgagcctggtgagctgcttcgccggcggcgtgttcctggccacctgcctgctggacctgctgcccgactacctggccgccatcgacgaggccctggccgccctgcacgtgaccctgcagttccccctgcaggagttcatcctggccatgggcttcttcctggtgctggtgatggagcagatcaccctggcctacaaggagcagagcggccccagccccctggaggagaccagagccctgctgggcaccgtgaacggcggcccccagcactggcacgacggccccggcgtgccccaggccagcggcgcccccgccacccccagcgccctgagagcctgcgtgctggtgttcagcctggccctgcacagcgtgttcgagggcctggccgtgggcctgcagagagacagagccagagccatggagctgtgcctggccctgctgctgcacaagggcatcctggccgtgagcctgagcctgagactgctgcagagccacctgagagcccaggtggtggccggctgcggcatcctgttcagctgcatgacccccctgggcatcggcctgggcgccgccctggccgagagcgccggccccctgcaccagctggcccagagcgtgctggagggcatggccgccggcaccttcctgtacatcaccttcctggagatcctgccccaggagctggccagcagcgagcagagaatcctgaaggtgatcctgctgctggccggcttcgccctgctgaccggcctgctgttctag

SEQ ID NO: 96706 - DNA, 669 bp, Artificial Sequence
  derived and/or modified sequence
atgaaggcccagctgcagttccccctgcaggagttcatcctggccatgggcttcttcctggtgctggtgatggagcagatcaccctggcctacaaggagcagagcggccccagccccctggaggagaccagagccctgctgggcaccgtgaacggcggcccccagcactggcacgacggccccggcgtgccccaggccagcggcgcccccgccacccccagcgccctgagagcctgcgtgctggtgttcagcctggccctgcacagcgtgttcgagggcctggccgtgggcctgcagagagacagagccagagccatggagctgtgcctggccctgctgctgcacaagggcatcctggccgtgagcctgagcctgagactgctgcagagccacctgagagcccaggtggtggccggctgcggcatcctgttcagctgcatgacccccctgggcatcggcctgggcgccgccctggccgagagcgccggccccctgcaccagctggcccagagcgtgctggagggcatggccgccggcaccttcctgtacatcaccttcctggagatcctgccccaggagctggccagcagcgagcagagaatcctgaaggtgatcctgctgctggccggcttcgccctgctgaccggcctgctgttcatccagatctag

SEQ ID NO: 96707 - DNA, 942 bp, Artificial Sequence
  derived and/or modified sequence
atgggcccctggggcgagcccgagctgctggtgtggagacccgaggccgtggccagcgagccccccgtgcccgtgggcctggtgctgaccctgctgtgcagcctggtgcccatctgcgtgctgagaagacccggcgccaaccacgagggcagcgccagcagacagaaggccctgagcctggtgagctgcttcgccggcggcgtgttcctggccacctgcctgctggacctgctgcccgactacctggccgccatcgacgaggccctggccgccctgcacgtgaccctgcagttccccctgcaggagttcatcctggccatgggcttcttcctggtgctggtgatggagcagatcaccctggcctacaaggagcagagcggccccagccccctggaggagaccagagccctgctgggcaccgtgaacggcggcccccagcactggcacgacggccccggcgtgccccaggccagcggcgcccccgccacccccagcgccctgagagcctgcgtgctggtgttcagcctggccctgcacagcgtgttcgagggcctggccgtgggcctgcagagagacagagccagagccatggagctgtgcctggccctgctgctgcacaagggcatcctggccgtgagcctgagcctgagactgctgcagagccacctgagagcccaggtggtggccggctgcggcatcctgttcagctgcatgacccccctgggcatcggcctgggcgccgccctggccgagagcgccggccccctgcaccagctggcccagagcgtgctggagggcatggccgccggcaccttcctgtacatcaccttcctggagatcctgccccaggagctggccagcagcgagcagagaatcctgaaggtgatcctgctgctggccggcttcgccctgctgaccggcctgctgttcatccagatctag

SEQ ID NO: 96708 - protein, 15 aa, Artificial Sequence
  derived and/or modified sequence
HLEINPDHPIVETLR

SEQ ID NO: 96709 - protein, 724 aa, Artificial Sequence
  derived and/or modified sequence
MPEEVHHGEEEVETFAFQAEIAQLMSLIINTFYSNKEIFLRELISNASDALDKIRYESLTDPSKLDSGKELKIDIIPNPQERTLTLVDTGIGMTKADLINNLGTIAKSGTKAFMEALQAGADISMIGQFGVGFYSAYLVAEKVVVITKHNDDEQYAWESSAGGSFTVRADHGEPIGRGTKVILHLKEDQTEYLEERRVKEVVKKHSQFIGYPITLYLEKEREKEISDDEAEEEKGEKEEEDKDDEEKPKIEDVGSDEEDDSGKDKKKKTKKIKEKYIDQEELNKTKPIWTRNPDDITQEEYGEFYKSLTNDWEDHLAVKHFSVEGQLEFRALLFIPRRAPFDLFENKKKKNNIKLYVRRVFIMDSCDELIPEYLNFIRGVVDSEDLPLNISREMLQQSKILKVIRKNIVKKCLELFSELAEDKENYKKFYEAFSKNLKLGIHEDSTNRRRLSELLRYHTSQSGDEMTSLSEYVSRMKETQKSIYYITGESKEQVANSAFVERVRKRGFEVVYMTEPIDEYCVQQLKEFDGKSLVSVTKEGLELPEDEEEKKKMEESKAKFENLCKLMKEILDKKVEKVTISNRLVSSPCCIVTSTYGWTANMERIMKAQALRDNSTMGYMMAKKHLEINPDHPIVETLRQKAEADKNDKAVKDLVVLLFETALLSSGFSLEDPQTHSNRIYRMIKLGLGIDEDEVAAEEPNAAVPDEIPPLEGDEDASRMEEVD

SEQ ID NO: 96710 - protein, 154 aa, Artificial Sequence
  derived and/or modified sequence
MDSCDELIPEYLNFIRGVVDSEDLPLNISREMLQQSKILKVIRKNIVKKCLELFSELAEDKENYKKFYEAFSKNLKLGIHEDSTNRRRLSELLRYHTSQSGDEMTSLSEYVSRMKETQKSIYYITGESKEQVCPCPTWLPLLVSSVFFPLLSLC

SEQ ID NO: 96711 - protein, 183 aa, Artificial Sequence
  derived and/or modified sequence
MDSCDELIPEYLNFIRGVVDSEDLPLNISREMLQQSKILKVIRKNIVKKCLELFSELAEDKENYKKFYEAFSKNLKLGIHEDSTNRRRLSELLRYHTSQSGDEMTSLSEYVSRMKETQKSIYYITGSPCWCLVFFSLSCPCVEGSKLRVSSPIPSLLLTAGLDVVYCGLFYFLHFVLKLKYAK

SEQ ID NO: 96712 - protein, 142 aa, Artificial Sequence
  derived and/or modified sequence
  misc_feature (1)..(1): Xaa can be any naturally occurring amino acid
XFIRGVVDSEDLPLNISREMLQQSKILKVIRKNIVKKCLELFSELAEDKENYKKFYEAFSKNLKLGIHEDSTNRRRLSELLRYHTSQSGDEMTSLSEYVSRMKETQKSIYYITGESKEQVCPCPTWLPLLVSSVFFPLLSLC

SEQ ID NO: 96713 - protein, 150 aa, Artificial Sequence
  derived and/or modified sequence
  misc_feature (1)..(1): Xaa can be any naturally occurring amino acid
XFIRGVVDSEDLPLNISREMLQQSKILKVIRKNIVKKCLELFSELAEDKENYKKFYEAFSKNLKLGIHEDSTNRRRLSELLRYHTSQSGDEMTSLSEYVSRMKETQKSIYYITGESKEQVANSAFVERCPCPTWLPLLVSSVFFPLLSLC

SEQ ID NO: 96714 - protein, 171 aa, Artificial Sequence
  derived and/or modified sequence
  misc_feature (1)..(1): Xaa can be any naturally occurring amino acid
XFIRGVVDSEDLPLNISREMLQQSKILKVIRKNIVKKCLELFSELAEDKENYKKFYEAFSKNLKLGIHEDSTNRRRLSELLRYHTSQSGDEMTSLSEYVSRMKETQKSIYYITGSPCWCLVFFSLSCPCVEGSKLRVSSPIPSLLLTAGLDVVYCGLFYFLHFVLKLKYAK

SEQ ID NO: 96715 - DNA, 2175 bp, Artificial Sequence
  derived and/or modified sequence
atgcctgaagaagtgcaccacggcgaggaggaagtggagacattcgcctttcaggccgagattgctcagcttatgagtctcattataaacacattttacagcaataaggaaatcttcttgcgggaactaatatctaatgctagcgacgccctcgataaaatacggtacgaatccctgactgacccttcgaagttggactcaggaaaagaactgaagattgatattattcctaacccccaagaacgtaccctcacattggtggacactggaatcgggatgacgaaggcagatttgattaataatcttgggacaatcgccaaatctggcacaaaggcttttatggaagcccttcaagccggcgcagacatttctatgattggccagttcggcgtcggtttttatagcgcatatctggttgctgaaaaggtggtggtcataacaaaacacaacgacgacgaacaatatgcctgggaatcttccgcgggcggaagcttcactgtgcgcgctgaccacggagaaccaataggacggggcactaaagttatcttacacctgaaagaagaccagactgagtacctggaagagcgccgagtgaaggaggttgtgaaaaaacactcgcagttcatcgggtatcccatcaccttgtacctggaaaaagagcgggaaaaagagatttctgatgatgaggccgaagaagaaaagggggagaaggaggaagaggataaagacgacgaggaaaaacccaaaattgaggatgtcggctccgatgaagaggacgattccggaaaagacaagaaaaaaaagaccaaaaagatcaaagaaaaatatattgaccaagaagagctgaacaaaaccaagcccatctggacaagaaaccccgatgacatcacccaggaagaatacggcgagttctacaaatccctgaccaacgactgggaggaccatctggcagtcaaacatttctctgtagagggacagctggaattcagggcactgctcttcataccccgacgcgccccctttgatctgtttgaaaataaaaagaaaaaaaacaatataaaactgtatgtgaggcgagtgttcataatggacagttgcgacgagctcatccctgagtacctgaatttcatccgcggcgtagttgatagcgaggaccttcccctcaatatttcacgcgaaatgctgcagcagtcaaagatactgaaggtcatcaggaagaacatcgtgaagaagtgtttagaactcttcagcgaactggcagaggacaaggaaaattacaaaaaattctacgaggctttcagtaagaatctgaagctgggtattcatgaagacagcactaatcggcgaagactgtccgaactcctgagatatcatacctcccaatccggagacgaaatgacgtcgctgtccgagtatgtgtctcgcatgaaggagacacagaaatctatttactacataactggcgagtcgaaggagcaagtggccaactctgcctttgtggaaagggtccgcaagagaggatttgaggtggtctacatgactgagcctattgatgagtactgtgtccagcaattgaaagaatttgatggtaaatctctggtgagcgtgacaaaagagggactcgaattgccagaagacgaggaagaaaaaaagaagatggaagaaagtaaagccaaatttgaaaacttgtgcaagttgatgaaagagatcctggacaagaaggtggagaaggttaccatcagtaatcgccttgtgagctctccatgctgcatcgtgacaagcacatatgggtggacagcaaatatggagagaattatgaaggcacaggcactccgcgacaactctacaatggggtatatgatggccaagaaacatttggaaattaatcccgatcaccccattgtggaaacactcaggcagaaagctgaggctgataagaatgacaaggcggtgaaggacctggtggttctgctcttcgagacggctctgctgtctagtggtttttccctggaggacccacagacacactccaacaggatttatcgcatgataaagctggggctggggatcgacgaagacgaggtggcggcggaggagccaaacgccgccgtccccgacgaaattccgccgctggagggcgacgaggacgcaagccggatggaagaggtagactag

SEQ ID NO: 96716 - DNA, 2175 bp, Artificial Sequence
  derived and/or modified sequence
atgccagaagaagtgcatcacggggaagaagaagtggaaactttcgcctttcaggctgaaatcgcacagctgatgtccctgatcataaacacattctacagtaacaaagagatattcctgcgcgagcttatcagcaacgctagcgacgcccttgataaaatccgctacgagtcattgaccgatcctagtaagctggatagtggaaaggaactgaagattgacattattcccaacccacaggaacgtacactgacgctggtggatacaggcataggcatgaccaaagccgacctcatcaacaatcttggaacaattgccaaaagcggtactaaggcatttatggaagcccttcaggctggcgccgacatctccatgatcggccagttcggggtcggattctattctgcttacctggtcgcagagaaagtggtagttattacaaagcacaacgacgacgaacagtacgcctgggagtcctctgctggcgggtcgttcacagtgcgagctgaccatggagagccaatcgggcggggaactaaggtgatccttcatctgaaagaagaccagacagagtatctggaggagagaagagttaaggaagtggttaagaaacacagccagttcatcggctatccaattactctttacctggagaaagagcgggaaaaggaaatttcagacgacgaggccgaagaggagaagggagagaaggaagaggaggacaaagacgatgaagagaaaccaaagatcgaggatgtggggagcgacgaagaggatgactccggcaaggataaaaagaaaaagaccaagaaaattaaagagaaatatatcgaccaggaagaactgaacaaaaccaagcccatctggacacggaatcccgatgacattacacaggaagagtatggcgagttctacaaatctttgactaacgattgggaggaccacctcgccgtcaaacatttttcggttgaaggacagctcgaattccgcgcgttattattcattccccgaagggcacctttcgacctcttcgaaaataagaagaaaaagaataacatcaagctgtacgtgagacgggtgtttatcatggattcatgcgatgagctgattcccgagtatctcaacttcatccgcggggtggtggattccgaagacctgccgctcaacataagcagggaaatgttgcaacagtccaagattttgaaggtgatccgcaaaaatatagtgaagaaatgcctggagctcttttctgagctcgcagaagataaggagaattacaaaaagttttacgaggcttttagtaagaatcttaaactcggtattcatgaagattctaccaacaggagacgtctgtcagaactgctgagatatcacaccagccagtccggcgatgaaatgacgtcactctctgaatatgtctcacgcatgaaggaaacacagaaaagcatctattatattactggagagagcaaggagcaggtcgccaattcagcctttgtcgagagggtgaggaagcgaggctttgaggtggtgtacatgacagagccaatcgacgagtactgcgtgcaacagctcaaagaattcgatggcaaatcccttgtgagcgtgacaaaggagggcctcgaactgcccgaggatgaggaggagaagaaaaaaatggaggagtctaaggctaagtttgagaacctgtgcaagcttatgaaggagattctcgacaagaaagtagaaaaagtcacgattagcaatcgactggtttcctcaccctgttgtatcgttacgtctacctacggatggaccgcgaatatggaaagaataatgaaggctcaggcactccgggataattcaactatgggctatatgatggccaagaagcacctggagatcaatcctgatcatccgattgtggaaactcttaggcaaaaagccgaggccgacaagaacgataaagctgtgaaggatcttgttgtcttgcttttcgagacagcactgctttcctctgggtttagccttgaagatccccagacgcatagtaaccgcatctaccgaatgattaaactgggcctgggaatcgacgaggatgaggtggccgccgaggaaccaaacgcggccgtgcccgatgaaatcccccctctggagggcgatgaagatgccagtcggatggaggaggtggactag

SEQ ID NO: 96717 - DNA, 2175 bp, Artificial Sequence
  derived and/or modified sequence
atgcctgaggaggtccaccatggcgaagaggaggtggaaaccttcgcgtttcaggctgaaatcgctcaacttatgtctctgattatcaacaccttctactctaacaaagaaatatttctgcgggagctgatctctaacgcatccgatgctcttgataagattcggtatgagtcgctgacggatccgtcgaaactagatagcggcaaggagctgaaaattgatatcataccaaatccccaggaacggacgcttactctcgtggacactggaattgggatgacaaaggcggacctcattaacaaccttggaaccatagcgaagagcgggaccaaggcttttatggaggccttgcaggctggcgcagatatcagcatgatcgggcaattcggcgtgggcttctacagtgcatacctggttgcggagaaagtggttgtgataacaaaacacaacgacgatgagcaatacgcctgggaaagcagtgcagggggcagtttcaccgtacgcgccgaccacggagaacccattggtcgtggaacaaaagttatactgcatctgaaggaagatcagacagaatacctcgaggaacgaagagtaaaagaggtggtcaaaaagcactcccagttcattggctacccaattaccttgtacctggagaaagaacgggagaaggagataagtgatgatgaagccgaggaagagaagggtgagaaggaagaggaggacaaggacgacgaagaaaagcccaaaatcgaggacgtgggatctgacgaggaagacgacagtgggaaagacaaaaaaaagaagacaaagaagataaaggagaaatatatagatcaagaggagctcaataagacaaaaccgatttggactcgcaatccagatgacatcacccaggaggagtacggggaattttacaaaagcctgactaatgactgggaggatcatcttgctgtgaagcatttcagcgtggagggacagctcgaatttagggcactacttttcattccccgcagggccccgttcgacttgtttgaaaacaaaaaaaaaaagaacaatataaagctatacgtgagaagagtgtttatcatggactcgtgtgacgagttaattcctgaatacctgaattttattagaggcgtggtggatagcgaagatcttcccctgaatatctctagagagatgttacagcagagcaagatccttaaagtcattaggaaaaatatcgttaagaaatgcctggaactgttctcagagttagccgaagataaagaaaattacaagaagttctacgaggcctttagcaagaacttgaaacttggtatccatgaggatagcacgaatcgccgccgcttgagcgagctgctgaggtaccatactagccagtccggagacgagatgacctcactatctgaatacgtttctagaatgaaagaaactcagaaatcaatctactacataacaggcgagagtaaggagcaggtggctaatagcgccttcgttgagagagtacgaaaaagaggctttgaggtggtgtacatgaccgaaccaatagatgagtactgcgtccaacagctgaaagaattcgacggtaagagcctggtgtccgtgaccaaggaagggttggagcttcccgaggatgaggaggagaaaaaaaaaatggaagagtccaaagccaagttcgagaacctctgcaagctgatgaaagagatactagataaaaaggtagagaaggtcactatcagtaaccgccttgtttcgagcccatgctgcattgtgaccagcacctatggctggactgcaaacatggagcgaatcatgaaagctcaggccctgagagataattctacaatgggttatatgatggctaaaaagcatctagagattaatcctgatcacccaatagttgagacactgcgtcagaaggcagaggccgataagaacgataaagccgtaaaagacctagtggtcctgctcttcgaaactgccctgctgagcagcgggttctccctcgaagacccacagacgcacagtaataggatttacagaatgattaagctcggcttgggaatcgacgaggacgaggttgcagccgaagagcctaacgccgcagttcccgacgaaatcccacccttagaaggcgacgaggatgctagccgaatggaagaagtagattag

SEQ ID NO: 96718 - DNA, 2582 bp, Artificial Sequence
  derived and/or modified sequence
ggcacgcagtagctctctcgagtcactccggcgcagtgttgggactgtctgggtatcggaaagcaagcctacgttgctcactattacgtataatccttttcttttcaagatttttattttagatgcctgaggaagtgcaccatggagaggaggaggtggagacttttgcctttcaggcagaaattgcccaactcatgtccctcatcatcaataccttctattccaacaaggagattttccttcgggagttgatctctaatgcttctgatgccttggacaagattcgctatgagagcctgacagacccttcgaagttggacagtggtaaagagctgaaaattgacatcatccccaaccctcaggaacgtaccctgactttggtagacacaggcattggcatgaccaaagctgatctcataaataatttgggaaccattgccaagtctggtactaaagcattcatggaggctcttcaggctggtgcagacatctccatgattgggcagtttggtgttggcttttattctgcctacttggtggcagagaaagtggttgtgatcacaaagcacaacgatgatgaacagtatgcttgggagtcttctgctggaggttccttcactgtgcgtgctgaccatggtgagcccattggcaggggtaccaaagtgatcctccatcttaaagaagatcagacagagtacctagaagagaggcgggtcaaagaagtagtgaagaagcattctcagttcataggctatcccatcaccctttatttggagaaggaacgagagaaggaaattagtgatgatgaggcagaggaagagaaaggtgagaaagaagaggaagataaagatgatgaagaaaaacccaagatcgaagatgtgggttcagatgaggaggatgacagcggtaaggataagaagaagaaaactaagaagatcaaagagaaatacattgatcaggaagaactaaacaagaccaagcctatttggaccagaaaccctgatgacatcacccaagaggagtatggagaattctacaagagcctcactaatgactgggaagaccacttggcagtcaagcacttttctgtagaaggtcagttggaattcagggcattgctatttattcctcgtcgggctccctttgacctttttgagaacaagaagaaaaagaacaacatcaaactctatgtccgccgtgtgttcatcatggacagctgtgatgagttgataccagagtatctcaattttatccgtggtgtggttgactctgaggatctgcccctgaacatctcccgagaaatgctccagcagagcaaaatcttgaaagtcattcgcaaaaacattgttaagaagtgccttgagctcttctctgagctggcagaagacaaggagaattacaagaaattctatgaggcattctctaaaaatctcaagcttggaatccacgaagactccactaaccgccgccgcctgtctgagctgctgcgctatcatacctcccagtctggagatgagatgacatctctgtcagagtatgtttctcgcatgaaggagacacagaagtccatctattacatcactggtgagagcaaagagcaggtggccaactcagcttttgtggagcgagtgcggaaacggggcttcgaggtggtatatatgaccgagcccattgacgagtactgtgtgcagcagctcaaggaatttgatgggaagagcctggtctcagttaccaaggagggtctggagctgcctgaggatgaggaggagaagaagaagatggaagagagcaaggcaaagtttgagaacctctgcaagctcatgaaagaaatcttagataagaaggttgagaaggtgacaatctccaatagacttgtgtcttcaccttgctgcattgtgaccagcacctacggctggacagccaatatggagcggatcatgaaagcccaggcacttcgggacaactccaccatgggctatatgatggccaaaaagcacctggagatcaaccctgaccaccccattgtggagacgctgcggcagaaggctgaggccgacaagaatgataaggcagttaaggacctggtggtgctgctgtttgaaaccgccctgctatcttctggcttttcccttgaggatccccagacccactccaaccgcatctatcgcatgatcaagctaggtctaggtattgatgaagatgaagtggcagcagaggaacccaatgctgcagttcctgatgagatcccccctctcgagggcgatgaggatgcgtctcgcatggaagaagtcgattaggttaggagttcatagttggaaaacttgtgcccttgtatagtgtccccatgggctcccactgcagcctcgagtgcccctgtcccacctggctccccctgctggtgtctagtgtttttttccctctcctgtccttgtgttgaaggcagtaaactaagggtgtcaagccccattccctctctactcttgacagcaggattggatgttgtgtattgtggtttattttattttcttcattttgttctgaaattaaagtatgcaaaataaagaatatgccgtttttataca

SEQ ID NO: 96719 - DNA, 2674 bp, Artificial Sequence
  derived and/or modified sequence
gtgcccggatgctggggcgagggagggtgcactgcggcgccccctcctcgcgtggtcctggccgacgcatgtccggcagtgacgagtgtcggcctggtggctacggccaccatctttcttgggtttggtcctgttctgtaattttgtgctgtgaaagggtcgtggtggagcttttggcttaagaattctttgtccggatttaattgctcctccgatgcctgaggaagtgcaccatggagaggaggaggtggagacttttgcctttcaggcagaaattgcccaactcatgtccctcatcatcaataccttctattccaacaaggagattttccttcgggagttgatctctaatgcttctgatgccttggacaagattcgctatgagagcctgacagacccttcgaagttggacagtggtaaagagctgaaaattgacatcatccccaaccctcaggaacgtaccctgactttggtagacacaggcattggcatgaccaaagctgatctcataaataatttgggaaccattgccaagtctggtactaaagcattcatggaggctcttcaggctggtgcagacatctccatgattgggcagtttggtgttggcttttattctgcctacttggtggcagagaaagtggttgtgatcacaaagcacaacgatgatgaacagtatgcttgggagtcttctgctggaggttccttcactgtgcgtgctgaccatggtgagcccattggcaggggtaccaaagtgatcctccatcttaaagaagatcagacagagtacctagaagagaggcgggtcaaagaagtagtgaagaagcattctcagttcataggctatcccatcaccctttatttggagaaggaacgagagaaggaaattagtgatgatgaggcagaggaagagaaaggtgagaaagaagaggaagataaagatgatgaagaaaaacccaagatcgaagatgtgggttcagatgaggaggatgacagcggtaaggataagaagaagaaaactaagaagatcaaagagaaatacattgatcaggaagaactaaacaagaccaagcctatttggaccagaaaccctgatgacatcacccaagaggagtatggagaattctacaagagcctcactaatgactgggaagaccacttggcagtcaagcacttttctgtagaaggtcagttggaattcagggcattgctatttattcctcgtcgggctccctttgacctttttgagaacaagaagaaaaagaacaacatcaaactctatgtccgccgtgtgttcatcatggacagctgtgatgagttgataccagagtatctcaattttatccgtggtgtggttgactctgaggatctgcccctgaacatctcccgagaaatgctccagcagagcaaaatcttgaaagtcattcgcaaaaacattgttaagaagtgccttgagctcttctctgagctggcagaagacaaggagaattacaagaaattctatgaggcattctctaaaaatctcaagcttggaatccacgaagactccactaaccgccgccgcctgtctgagctgctgcgctatcatacctcccagtctggagatgagatgacatctctgtcagagtatgtttctcgcatgaaggagacacagaagtccatctattacatcactggtgagagcaaagagcaggtggccaactcagcttttgtggagcgagtgcggaaacggggcttcgaggtggtatatatgaccgagcccattgacgagtactgtgtgcagcagctcaaggaatttgatgggaagagcctggtctcagttaccaaggagggtctggagctgcctgaggatgaggaggagaagaagaagatggaagagagcaaggcaaagtttgagaacctctgcaagctcatgaaagaaatcttagataagaaggttgagaaggtgacaatctccaatagacttgtgtcttcaccttgctgcattgtgaccagcacctacggctggacagccaatatggagcggatcatgaaagcccaggcacttcgggacaactccaccatgggctatatgatggccaaaaagcacctggagatcaaccctgaccaccccattgtggagacgctgcggcagaaggctgaggccgacaagaatgataaggcagttaaggacctggtggtgctgctgtttgaaaccgccctgctatcttctggcttttcccttgaggatccccagacccactccaaccgcatctatcgcatgatcaagctaggtctaggtattgatgaagatgaagtggcagcagaggaacccaatgctgcagttcctgatgagatcccccctctcgagggcgatgaggatgcgtctcgcatggaagaagtcgattaggttaggagttcatagttggaaaacttgtgcccttgtatagtgtccccatgggctcccactgcagcctcgagtgcccctgtcccacctggctccccctgctggtgtctagtgtttttttccctctcctgtccttgtgttgaaggcagtaaactaagggtgtcaagccccattccctctctactcttgacagcaggattggatgttgtgtattgtggtttattttattttcttcattttgttctgaaattaaagtatgcaaaataaagaatatgccgtttttataca

SEQ ID NO: 96720 - DNA, 2569 bp, Artificial Sequence
  derived and/or modified sequence
ggcacgcagtagctctctcgagtcactccggcgcagtgttgggactgtctgggtatcggaaagcaagcctacgttgctcactattacgtataatccttttcttttcaagatgcctgaggaagtgcaccatggagaggaggaggtggagacttttgcctttcaggcagaaattgcccaactcatgtccctcatcatcaataccttctattccaacaaggagattttccttcgggagttgatctctaatgcttctgatgccttggacaagattcgctatgagagcctgacagacccttcgaagttggacagtggtaaagagctgaaaattgacatcatccccaaccctcaggaacgtaccctgactttggtagacacaggcattggcatgaccaaagctgatctcataaataatttgggaaccattgccaagtctggtactaaagcattcatggaggctcttcaggctggtgcagacatctccatgattgggcagtttggtgttggcttttattctgcctacttggtggcagagaaagtggttgtgatcacaaagcacaacgatgatgaacagtatgcttgggagtcttctgctggaggttccttcactgtgcgtgctgaccatggtgagcccattggcaggggtaccaaagtgatcctccatcttaaagaagatcagacagagtacctagaagagaggcgggtcaaagaagtagtgaagaagcattctcagttcataggctatcccatcaccctttatttggagaaggaacgagagaaggaaattagtgatgatgaggcagaggaagagaaaggtgagaaagaagaggaagataaagatgatgaagaaaaacccaagatcgaagatgtgggttcagatgaggaggatgacagcggtaaggataagaagaagaaaactaagaagatcaaagagaaatacattgatcaggaagaactaaacaagaccaagcctatttggaccagaaaccctgatgacatcacccaagaggagtatggagaattctacaagagcctcactaatgactgggaagaccacttggcagtcaagcacttttctgtagaaggtcagttggaattcagggcattgctatttattcctcgtcgggctccctttgacctttttgagaacaagaagaaaaagaacaacatcaaactctatgtccgccgtgtgttcatcatggacagctgtgatgagttgataccagagtatctcaattttatccgtggtgtggttgactctgaggatctgcccctgaacatctcccgagaaatgctccagcagagcaaaatcttgaaagtcattcgcaaaaacattgttaagaagtgccttgagctcttctctgagctggcagaagacaaggagaattacaagaaattctatgaggcattctctaaaaatctcaagcttggaatccacgaagactccactaaccgccgccgcctgtctgagctgctgcgctatcatacctcccagtctggagatgagatgacatctctgtcagagtatgtttctcgcatgaaggagacacagaagtccatctattacatcactggtgagagcaaagagcaggtggccaactcagcttttgtggagcgagtgcggaaacggggcttcgaggtggtatatatgaccgagcccattgacgagtactgtgtgcagcagctcaaggaatttgatgggaagagcctggtctcagttaccaaggagggtctggagctgcctgaggatgaggaggagaagaagaagatggaagagagcaaggcaaagtttgagaacctctgcaagctcatgaaagaaatcttagataagaaggttgagaaggtgacaatctccaatagacttgtgtcttcaccttgctgcattgtgaccagcacctacggctggacagccaatatggagcggatcatgaaagcccaggcacttcgggacaactccaccatgggctatatgatggccaaaaagcacctggagatcaaccctgaccaccccattgtggagacgctgcggcagaaggctgaggccgacaagaatgataaggcagttaaggacctggtggtgctgctgtttgaaaccgccctgctatcttctggcttttcccttgaggatccccagacccactccaaccgcatctatcgcatgatcaagctaggtctaggtattgatgaagatgaagtggcagcagaggaacccaatgctgcagttcctgatgagatcccccctctcgagggcgatgaggatgcgtctcgcatggaagaagtcgattaggttaggagttcatagttggaaaacttgtgcccttgtatagtgtccccatgggctcccactgcagcctcgagtgcccctgtcccacctggctccccctgctggtgtctagtgtttttttccctctcctgtccttgtgttgaaggcagtaaactaagggtgtcaagccccattccctctctactcttgacagcaggattggatgttgtgtattgtggtttattttattttcttcattttgttctgaaattaaagtatgcaaaataaagaatatgccgtttttataca

SEQ ID NO: 96721 - DNA, 2175 bp, Artificial Sequence
  derived and/or modified sequence
atgcctgaggaggtgcaccacggggaggaggaggtggagacctttgccttccaggccgagatcgcccagctgatgagcctcatcatcaacaccttctacagcaacaaggagatcttcctgcgggagctgatcagcaatgccagtgatgccctggacaagatccgctatgagagcctgacagaccccagcaagctggacagcggcaaggagctgaagattgacatcatccccaacccccaggagaggaccctgaccctggtggacacaggaattggcatgaccaaggctgacctgatcaacaacctgggcaccatcgccaagagcggcaccaaggccttcatggaggccctgcaggccggggctgacatctccatgattggccagtttggagtgggcttctacagcgcctacctggtggccgagaaggtggtggtgatcaccaagcacaatgatgatgagcagtatgcctgggagagcagcgctgggggcagcttcaccgtgcgggctgaccatggagagcccatcggccggggcaccaaggtgatcctgcacctgaaggaggaccagacagagtacctggaggagcggcgggtgaaggaggtggtgaagaagcacagccagttcatcggctaccccatcaccctgtacctggagaaggagcgggagaaggagatcagtgatgatgaggccgaggaggagaagggggagaaggaggaggaggacaaggatgatgaggagaagcccaagattgaagatgtgggcagtgatgaggaggatgattctgggaaggacaagaagaagaagaccaagaagatcaaggagaagtacatcgaccaggaggagctgaacaagaccaagcccatctggaccagaaatccagatgacatcacccaggaggagtatggagagttctacaagagcctgaccaatgactgggaggaccacctggccgtgaagcacttctctgtggagggccagctggagttccgggccctgctcttcatcccccggcgggccccctttgacctgtttgagaacaagaagaagaagaacaacatcaagctgtatgtgcggcgggtcttcatcatggacagctgtgatgagctgatccctgagtacctgaacttcatccggggcgtggtggacagcgaggacctgcccctgaacatcagccgggagatgctgcagcagagcaagatcctgaaggtgatcaggaagaacatcgtgaagaagtgcctggagctgttcagcgagctggccgaggacaaggagaactacaagaagttctatgaggccttcagcaagaacctgaagctgggcatccacgaggacagcaccaacagaagaaggctgtctgagctgctgcgctaccacaccagccagagcggagatgagatgaccagcctgtctgaatatgtgtccaggatgaaggagacccagaagagcatctactacatcactggagagagcaaggagcaggtggccaacagcgcctttgtggagcgggtgaggaagaggggctttgaggtggtgtacatgacagagcccattgatgagtactgtgtgcagcagctgaaggagtttgatggcaagagcctggtgtctgtgaccaaggagggcctggagctgcctgaagatgaggaggagaagaagaagatggaggagagcaaggccaagtttgagaacctgtgcaagctgatgaaggagatcctggacaagaaggtggagaaggtgaccatcagcaaccggctggtgagcagcccctgctgcatcgtgaccagcacctacggctggacagccaacatggagcgcatcatgaaggcccaggccctgcgggacaacagcaccatgggctacatgatggccaagaagcacctggagatcaacccagaccaccccatcgtggagaccctgcggcagaaggccgaggccgacaagaatgacaaggctgtgaaggacctggtggtgctgctgtttgaaacagccctgctgagcagcggcttcagcctggaggacccccagacccacagcaaccgcatctacaggatgatcaagctgggcctgggcattgatgaagatgaggtggccgctgaggagcccaatgctgctgtgcctgatgagatcccccccctggagggagatgaagatgccagcaggatggaggaggtggactag

SEQ ID NO: 96722 - DNA, 2175 bp, Artificial Sequence
  derived and/or modified sequence
atgcccgaggaggtgcaccacggcgaggaggaggtggagaccttcgcctttcaggccgagatcgctcagcttatgagcctcattatcaatactttttatagcaacaaggaaatcttcctgcgggaactgattagtaacgcctctgacgccctcgacaaaatccggtatgagagtctaactgatccatccaaattggattctggtaaggaacttaagatcgacattatcccaaatccccaggagcgcacattaacattggtggacacaggcatagggatgactaaagcagacctgattaataatctaggaacgatcgccaaaagcggaaccaaggcgttcatggaagccctacaggccggagccgatatcagtatgattggtcaatttggagttggcttctactcagcatatcttgtggctgaaaaagtggtggtgattacgaaacacaatgacgacgaacagtatgcctgggagagctctgctggtgggagctttaccgtacgagcagaccatggcgagcctatcgggaggggaacaaaagttatcctgcacctgaaggaggaccaaactgaatacctagaggagcgcagagtcaaggaggtagtgaaaaaacatagccaattcattggataccccatcacactgtatcttgaaaaggagagggagaaggaaatttcggacgacgaggccgaagaagagaagggggagaaagaggaggaagataaagatgatgaggagaagcccaagatcgaggatgtcggcagcgacgaagaagatgattccggaaaggacaagaaaaagaagaccaagaagattaaagagaaatacatagaccaagaagagctgaataagactaaaccaatttggacacgtaatcctgatgacatcacccaggaagaatatggggagttctataagtctttgacgaacgactgggaggaccacctggccgtcaagcatttctcagtggagggtcagcttgaatttagagctctgctgtttataccgcggcgggctcccttcgatctcttcgagaataagaaaaagaaaaacaacataaaactgtacgtccggagggtgttcattatggactcttgtgatgagctgattccagagtatcttaacttcatacgcggggtggtcgactctgaggatctcccgctgaacatctcacgagaaatgctacagcagtccaagatcctgaaggtgattcggaagaacattgtgaaaaagtgccttgagctattttctgagctagcagaagacaaggaaaattataagaagttctacgaggccttctccaaaaacttgaagttaggcattcatgaggattctacaaatcgacggcggctatccgagttgttgcgctaccatacgagccagtcaggcgacgaaatgacttccctgagcgaatatgtttctcgcatgaaggaaacccaaaaatctatatattacatcaccggggagtctaaagaacaagtagctaacagcgctttcgtggaacgggtaagaaagcggggatttgaggtggtgtacatgacagagcctatcgatgaatactgcgttcagcaactgaaagagtttgacgggaagagcctggttagtgtgacaaaggaggggcttgagctgcccgaggacgaagaggaaaaaaaaaagatggaagaatcaaaggctaaattcgagaacctttgtaagttaatgaaggaaatcctggacaagaaggtagaaaaagtcaccatctctaacaggctcgtgtcctcaccgtgctgtatcgtcacgagcacctacgggtggactgctaatatggagcgcataatgaaggcgcaggccttacgagacaatagtacaatggggtacatgatggccaagaaacatcttgaaattaatccggatcacccaatagtggaaacattacgacaaaaggctgaggcagacaaaaacgacaaggcagttaaagatttggtcgtactgctgtttgaaacagcccttctctcatccgggttttctctggaagatcctcagacacattctaaccgtatataccgtatgataaagctcggattaggcattgacgaggatgaggtggctgccgaagaacccaatgctgctgttccagatgagatcccaccccttgagggggacgaggacgcttctcggatggaggaggtcgactag

SEQ ID NO: 96723 - DNA, 2175 bp, Artificial Sequence
  derived and/or modified sequence
atgcccgaggaggtgcaccacggcgaggaggaggtggagaccttcgcattccaagcagagatagcccagctgatgtccctgattattaacacattttactcgaacaaagagatttttctcagagaactcatatcaaacgcctcagatgcccttgacaaaattcggtacgagagtctcaccgatcccagcaaattggatagcgggaaggagcttaaaatagatataatcccaaaccctcaggagcgcacactcacactggtcgacacagggatcgggatgacaaaagcagacctcattaataatctgggaacaatcgctaagtccggaactaaagcatttatggaggccctgcaggccggcgccgatatcagcatgattggacagttcggggtgggattttattctgcgtaccttgttgcggagaaggtggtggtcattactaagcacaatgatgacgaacaatacgcttgggagtcgagcgcaggtggtagcttcactgtgcgtgctgaccacggcgagccaataggaagaggaaccaaggttatcttacacctcaaggaggaccagacggagtatttggaggagagacgtgttaaagaggttgtaaaaaagcacagccagtttatcggttatccaataaccttgtatctcgagaaagagagagagaaggaaatcagcgacgatgaggctgaggaggaaaaaggggagaaggaagaggaggataaagatgacgaggaaaagccgaagatcgaggatgttggatctgatgaagaggacgattcaggtaaggataaaaaaaaaaaaacgaaaaaaatcaaggagaagtatatcgaccaggaggagttgaataaaaccaagcctatctggacacgaaacccagacgatattacccaggaagaatacggcgagttctataaaagtctgacgaatgactgggaggaccacttagccgtcaagcatttctcggttgagggccagcttgagttcagggcattactgttcattcccagaagagccccattcgatctgttcgagaacaagaaaaaaaaaaataacatcaagctgtacgtgcgccgtgttttcatcatggatagctgtgacgagttgatccccgagtatctcaacttcattcgcggagtcgttgattctgaagacttgcccctgaacatctctagggaaatgctgcagcagagcaagatcctgaaggtgatccgaaagaacattgtgaagaagtgcctggagctcttcagcgaactggccgaggacaaagagaactataagaaattctacgaggctttttcaaaaaacctgaaactcgggatacacgaggatagcactaatcggcggcggttgtccgagctgctccgataccacacctcccagtcaggcgacgaaatgacatcccttagcgaatatgtttctcgtatgaaggagacccagaaaagcatttattatatcaccggggaatctaaggagcaggtggcaaatagcgcctttgttgagagagttcgtaagcggggttttgaagtggtatatatgacggaacccatcgacgaatactgtgtgcaacagttgaaggagtttgatggtaaaagtctcgtgtccgtgaccaaggaggggctagagctgcctgaggatgaagaagaaaaaaagaagatggaggaaagtaaggccaaatttgaaaacctgtgtaagctgatgaaagagatccttgacaagaaagttgaaaaggttacaatttccaaccgtctggtttcttcgccttgttgtattgtgactagtacctatggatggaccgcaaatatggaacgaatcatgaaggcccaggcgttgcgagataattcaacgatgggatatatgatggccaaaaagcacctggaaattaatcccgaccatccaattgtagaaaccctgagacagaaagccgaagcagataaaaatgataaagccgtgaaggatctcgtagtcctgctctttgagacagctctgctgtcgagcggcttttccctcgaagatccccagacgcattccaacaggatttatcggatgattaagttgggactgggcatcgacgaagacgaggttgccgcagaggaaccaaatgctgcagtccccgatgaaattccaccactcgaaggggacgaggatgcctcccgaatggaggaagtggactag

SEQ ID NO: 96724 - DNA, 2175 bp, Artificial Sequence
  derived and/or modified sequence
atgcccgaggaggtgcaccacggcgaggaggaggtggagaccttcgcgtttcaggctgagattgcacagttgatgtctctgataatcaacaccttttactcaaataaagagatcttcctgagggagttgattagtaatgcctctgacgccttagataaaatccgctacgagagtctgaccgaccctagcaagctggactctgggaaggaactcaagatcgacatcattccgaaccctcaggagagaacactgacccttgtcgatacaggaattggaatgaccaaggccgatctgatcaacaatctgggaacaatcgccaagtccggcacaaaagcctttatggaggctctgcaggccggagccgacatttccatgatcggccagtttggcgtcggcttctatagcgcatatctcgtcgccgagaaagttgtggtgattaccaagcacaacgacgatgagcagtacgcctgggagagctccgctggcgggagctttacggtgcgggccgatcacggggagcccatcggaagaggcaccaaggttatcctccacttaaaggaggaccagaccgaatacctggaggagcggagagttaaggaagtggtgaagaaacacagccaattcatcggctacccaatcaccctgtatctggaaaaagagcgggaaaaagaaatcagtgatgacgaggctgaggaggagaaaggcgaaaaggaggaagaggataaggatgatgaagagaaacccaaaatcgaagacgtgggctccgacgaggaagacgatagcggcaaggataaaaaaaagaagacaaaaaagatcaaggaaaagtatatcgaccaggaggagctgaataaaactaaacccatttggacacgaaatcccgacgacatcacgcaggaggagtacggggagttttataagagcttgaccaatgactgggaagaccacctggccgtgaagcacttttccgtcgaagggcagttagagttccgcgccctcttattcatcccacgccgtgcccccttcgacttgtttgagaacaaaaaaaagaagaataatataaagctctatgtgcggcgcgttttcataatggattcatgcgacgagctcattcctgaatatctgaattttattaggggtgtcgtcgattctgaggatcttccgctgaatatttcccgagagatgttacagcagagcaagattctgaaggtaattcgcaagaacattgtcaagaagtgtctcgagctcttctcagagctagcagaggataaggaaaactacaaaaaattttatgaagcctttagtaaaaatctgaagctggggattcacgaggattcgacaaataggaggcgactttcagagctgcttcgataccatacatcacaaagcggcgacgaaatgactagtctgtcagagtatgtttctcgaatgaaggagacacagaagtctatctactacatcactggcgaaagcaaagagcaggttgcaaactcagcgttcgttgagagggttcgaaagaggggctttgaggtggtttatatgaccgagcccatcgatgaatattgcgtacaacagctcaaggagtttgacggcaaatctctggtgagcgttaccaaggaaggcttggagttgccagaggacgaggaggaaaaaaaaaagatggaggagtcaaaggccaagttcgaaaacctctgcaaattgatgaaagagattctggataaaaaggtggaaaaggtaaccatcagcaaccggttggtgtcgagcccctgctgcattgttacctccacctacgggtggactgcgaacatggaacgaattatgaaggcccaggcccttagggacaattctaccatgggctacatgatggccaaaaaacacttagaaattaatcccgatcaccctattgtcgaaactctgcgacaaaaggccgaagcggacaagaatgacaaggctgtaaaggacctcgtcgtgttactctttgagactgcacttctctcctccggcttctccctggaagatccacagactcactccaatagaatctacagaatgatcaagctggggctcggtatcgacgaggacgaagtggccgccgaggaaccaaacgctgccgtacctgatgagatcccccccctggaaggtgatgaggacgcctcacgaatggaagaggtggactag

SEQ ID NO: 96725 - DNA, 2175 bp, Artificial Sequence
  derived and/or modified sequence
atgccagaggaggttcaccatggcgaagaggaggtagaaacgtttgccttccaggccgaaattgcccaactcatgtctctgattattaacacattttactcaaataaagagatctttctcagagagttgatttccaacgcgtcagacgccctggataaaatccgctacgaatctctgaccgacccttcaaaactggacagcggtaaagagctgaaaatagacataattccgaatccacaggaaagaacgctgacactggtggatacagggatcggcatgactaaggctgatctgataaacaatctcggcaccatcgctaaatctggtaccaaggccttcatggaagcactccaggccggagcggacatcagcatgatcggccaatttggcgttgggttctactctgcatacctggtggccgaaaaggtagtggtaattaccaagcacaatgatgatgaacagtacgcctgggagagctccgcgggaggcagtttcaccgttcgagcggaccacggggagccaattggacgtggtaccaaggtgatcctgcacctaaaggaggaccagacggagtacttagaggagagacgagttaaggaggttgtcaaaaagcattctcaattcattgggtatccaattacactctacctggaaaaagaaagagagaaggagataagcgacgacgaggccgaagaggagaagggggaaaaggaagaggaggataaagacgatgaggagaagccgaagattgaagatgtcgggtcggacgaggaggacgactccgggaaggataaaaagaaaaagaccaagaaaatcaaggaaaaatatattgaccaggaagaactcaacaagaccaagccgatttggacccggaatcccgatgatataacgcaagaggagtacggtgagttctataaatcgctgactaacgactgggaggaccaccttgccgtcaagcacttctccgttgagggccaacttgaatttagagccctgctgttcataccgaggagggcaccattcgacctattcgagaacaaaaaaaaaaaaaataacattaagttatatgtgaggcgagttttcatcatggattcatgtgacgaactcatacctgagtacctgaacttcatccgcggagttgtcgatagcgaggacttgcccctaaacatctctcgcgaaatgctgcagcagtctaagatccttaaggtgatccgaaagaatatcgttaagaagtgtcttgagctgttttctgaactggccgaagataaggagaattataaaaagttctatgaagcgttctctaagaatcttaagctgggcatccacgaggactccacgaacaggcgcaggttgtctgagcttctgcgctaccacacctctcagtccggagacgagatgacatccctgagtgaatacgtgtcacgcatgaaagagacccaaaagtcaatttactacattacaggagagtccaaggaacaggtcgcaaattcagccttcgtggagcgggtcaggaagaggggcttcgaagttgtttacatgaccgagccaatagacgagtattgtgttcaacagcttaaagagtttgacgggaaatcccttgtgagcgtcactaaggagggcctggagctacccgaggacgaggaggagaaaaagaaaatggaggagtcaaaggccaagttcgagaacctgtgtaagctgatgaaagagatactggataagaaagtggaaaaggtgacaatcagtaataggctggtcagctccccgtgctgcattgtaaccagcacatacgggtggaccgcaaatatggagcgtattatgaaagctcaagccctcagagacaattcaactatggggtacatgatggcaaagaaacatctggaaattaaccccgaccatcctatcgtcgaaaccctccgacaaaaggcagaggccgacaagaatgataaggccgtaaaagacctcgtggttctgctctttgaaactgcgctgctgtcttcgggatttagtctcgaagatcctcagacgcatagcaatcgcatctaccgcatgattaaactcgggttggggattgacgaagacgaagtcgccgcagaggaaccgaatgccgctgtgcctgacgagattcctcccctggaaggagacgaagatgcgagcaggatggaggaagtggactag

SEQ ID NO: 96726 - DNA, 2175 bp, Artificial Sequence
  derived and/or modified sequence
atgcctgaagaagtacatcacggggaggaggaagtggaaacattcgcctttcaggctgaaattgctcagcttatgtctctgatcatcaatactttctacagtaataaggaaatcttcctacgcgagctcatttctaatgcgagcgacgcgctcgataaaattagatatgagagtttgacagaccctagcaagttggatagtggcaaagagctgaaaattgatatcattccgaatcctcaggaaaggactcttactctcgtcgacacaggtatcggcatgaccaaggccgatctcattaacaacctcgggaccatcgcaaagagtggaactaaggccttcatggaagctttgcaggccggtgccgatatttccatgatcgggcagtttggagttggcttctattctgcttatctggtcgccgaaaaggtggtggttatcaccaagcataatgatgacgaacagtatgcctgggaatcttcagccggagggagcttcaccgttagagcagaccacggggaacccataggcagggggacgaaggtgatacttcatctgaaggaagatcaaactgagtacctggaagagagacgtgtcaaagaggttgtgaaaaagcatagccagtttattggataccctatcaccctgtacctggaaaaggagcgggagaaggagatcagcgatgatgaggctgaagaagagaaaggggaaaaggaggaggaggataaagatgatgaggagaagccgaagatcgaagacgtgggcagtgatgaggaggatgacagcgggaaagacaagaaaaagaaaaccaagaagataaaggaaaagtacatcgaccaagaggagctgaataagacgaagcccatttggacgcgtaatcccgacgatatcacacaagaagagtacggggaattttacaaaagtcttactaacgattgggaagatcatctggcagtcaaacacttctccgtggagggccagcttgagttccgggctttgctgttcatacccagacgagccccatttgatttgttcgagaataagaaaaagaaaaataatatcaagctgtacgtgaggagggtgttcattatggatagctgcgatgagctgattcctgagtacctgaatttcatcaggggcgtcgtggattccgaggacttgccgcttaatattagcagagaaatgctccagcagtctaaaatactcaaggttatcagaaaaaacatcgttaaaaaatgcctagaactgttttctgaattggcggaggacaaagaaaactacaaaaagttctatgaggccttctctaaaaaccttaaactgggaattcatgaagactccacaaacagacgcagactgtcggagttgctccgttaccacaccagccagtccggcgacgagatgactagcctttcggagtatgtgtctagaatgaaggagacccaaaaaagcatttactatataactggagaaagtaaagagcaggtggccaattctgccttcgtcgaaagagtgaggaaacgcggattcgaggtggtatacatgactgagccgattgacgagtactgcgtacagcaactgaaagagttcgacgggaagtccctggtttcagtgactaaggaaggactggaacttcccgaggatgaagaggaaaagaagaaaatggaggagagtaaggctaaatttgaaaatctctgtaagctgatgaaggagatactcgataagaaagtggagaaagtgacaatttcaaaccgtctagttagctctccctgctgcatagtgactagcacatacgggtggacagctaacatggaacgcataatgaaggctcaggcgctgcgcgacaatagcaccatgggctatatgatggccaaaaaacatctggagataaatcctgaccatcccattgtggagacgctgaggcagaaagcagaggctgataaaaatgacaaggcagtaaaggacctggtggtactgctattcgagacagcattactgagcagcggtttctcactggaggatccacaaacccactctaaccggatatatcgcatgattaagctggggctgggcatcgacgaagatgaagtggccgctgaggaaccaaatgctgcggtccccgatgaaatcccaccccttgagggagacgaggacgcatcgcgcatggaggaggtggactag

SEQ ID NO: 96727 - DNA, 2175 bp, Artificial Sequence
  derived and/or modified sequence
atgcctgaagaggtccatcatggtgaagaagaagtcgagacattcgcgttccaggctgagatcgcccagctcatgtccctgataatcaataccttctactccaataaagaaattttcctgagggagctcattagtaatgcatcagacgcccttgataagattaggtacgaaagtctaactgatccgtctaaactggatagtggaaaggagttgaagattgacattatcccaaacccacaggaacgaacacttacacttgtggataccggcattggcatgacgaaggctgatctgattaataacctcggtactattgctaagtccggtacaaaagcgttcatggaggcccttcaggctggagctgacatctctatgattgggcagtttggagtggggttttactcggcttacctcgtcgctgaaaaggtggtggtcattaccaaacacaacgacgacgagcagtatgcatgggaaagctcagccggaggcagctttactgtcagagccgatcatggtgaaccgattggtcgaggaacgaaagttatactgcatctcaaggaggaccagacggagtacctagaagagagacgtgttaaggaggtggtgaaaaagcattcccagtttattggctaccctattaccctctacctcgaaaaagagagagaaaaagagatctctgacgacgaggcggaagaagagaagggcgagaaagaagaggaagataaagacgatgaggaaaagcctaagatcgaagatgtgggctcggacgaagaggacgactctgggaaggataaaaaaaagaaaaccaagaaaataaaagaaaaatacattgatcaggaagagctgaacaaaaccaaacctatctggaccagaaatcccgatgacatcacccaggaagagtatggcgaattttacaaatctctcaccaacgactgggaggatcacttggctgtcaagcacttctctgtcgagggccagttggagtttcgcgcactgttgttcatccctcggcgagcacccttcgacctgttcgagaataagaagaagaagaacaacattaaactgtatgtacgtcgggtcttcattatggattcttgtgacgagctgataccagagtacttaaacttcattaggggtgtcgtggatagcgaggatcttccccttaacatatctcgggagatgctgcagcaaagcaagattctgaaagtgattagaaaaaacatcgtcaagaaatgcctggaattgttcagcgaactggccgaagataaagagaactataagaaattctatgaagccttcagcaagaacttgaagctggggatccacgaagactcaacaaaccgtcgacgcctgagcgaactgcttagatatcatacgtcccagtctggtgatgagatgacatctcttagtgagtacgtgtcacgtatgaaggagactcagaagtcaatttactacatcacaggggaatcaaaggagcaggtcgctaacagcgcgtttgtggagcgagtgaggaaacgaggtttcgaagttgtatatatgaccgagcctattgatgagtactgtgttcagcagctaaaggaatttgacggtaagagtctggtctctgtgacaaaagaggggctggagctcccagaggatgaggaggagaaaaaaaaaatggaagagtctaaagccaaattcgaaaacctatgcaagctaatgaaggaaatcctggacaagaaggtggagaaggtcactatttcaaaccgcctggtctcctcaccctgttgtatcgttaccagtacctacgggtggactgctaacatggaaaggatcatgaaagctcaggctctgcgtgataattctacaatgggttatatgatggcgaaaaagcacctggaaataaacccagaccaccctattgtggagaccctccgccagaaggctgaagcagacaagaatgacaaagcagtgaaggatcttgtcgttcttctgtttgagacggcactccttagcagcggattctctctggaagacccacagacacacagtaatcgcatctatcgcatgattaaacttgggctgggtattgacgaggacgaggttgccgcagaggaacccaacgcggctgtgcccgatgagatccccccactggagggggacgaagacgcaagcaggatggaagaagtggattag
